United States Patent Application Publication US 2008/0114160 A1 - sequence listing, part 22

SEQ ID NO: 7111 - DNA, 18479 bp, Oryza sativa
ccgcttggatgcattcccttgactcctccctgttttcctgagaccaagtttcaagttcgaaatccaaattcaatttccaaatctcgtttcctccccggcgccgaatcccgccgcccccactttgaccgtgccggcccgcgctccgcgttcaaattcgaccgcttgatccaccgacctcgccgcccaacgcatcctcgccgttgccgttttcgggtcgcccacgaaaccatcgccccaccgccagccgagcgccagctcgtctgtgatctcccccttgcctataaatcctacccaccgagccccaaatcctccctcaacctcggtcgccgtcgcgcggccaaccccggagcaccgccgcctccttcgtcgccacggccaagaacgccgcgccgtcaccaaaccgtcccaccccgcgtcccttccttccctggtgcgcccgcttcggcgtcacgttcgtccccgtgcgccgccaacggccttcctccccttcccatcctcaaatcgccgccgacgccattcctcgccgattggtgagctcctcgtccccttccccttaaaggacgccgaaccagctcgctgtcgccctcccggaactcctcgcgccccctctctgtttccccggccgtgcccctctcggtgcaatgaccgccccgccgtgctctgttcccgccgccgccgcgctcggctgagcgccgccgttggcctccttttcgggactccccgcgccaccacccgccttgagctcccttgacccaccccaaacagtcgctctgcccgattcgccgccgccacgcatgaccgcgcgccgccgtgggcttcgcggccaacgccaacgggctttcttccattcccatcctcaaatgcccgccgacaccattccttaccgaatgggagccccccgtcccctttcccttaccgaacgccgaaccaactcgctgtccccctgccggacactcgcgggccccctttttggtttcccgggcatgccactcttgatgctatgaaccaccccgccatcccctcgccgtatcctctcgtctccaccctcctggagccccctcgactctccccgaaccgccgccctagccgccggccttctttcttgttcccacgtcgtgccgcccgattcaccaccgcgggacacgggcgcgctctgccgtcggttccccccttctcttcgaacccgctcgccaccaccttcctcgggcccctcttgacctcccccttgctgccccgtggccaccggcctcccctccagctctcgcgccgcgccggccttttcgttgccgcgccgcgccgccgcacgagcaacaccggcgaccatcagcctccgcgcccaacgcgtgtgcgtcgcaacaccacaccgattcgatcgaaccatagcccgcgcccccttttccctcccatcgcgtatccacgtcggcaatccggcgagcttcgccaccgtcgccggccgccgtcgcgccccttctctccggtccgatccgtggaaccgattccccgcttcctcctctcgcttccagtgcctgccgcccactccgattcgccgccgttcgctggagcgcaccgagcgccgttggccatccgatgagccgcccggcctcctctcccttccctgtccgacgtggcgtccacctggacgccacctcagccgctgaccccaccagaccaagtcaacccctgcctagtcagccacccccccccccttctctctccccgctcgtgggcctggcccatcgaccagctccccctcctcggcccattgaaacaaaggaagtccatttttactccctccgccaaacacaatgaccaaaagtctatatctgctccctcccaattcacctctctctcaccatatgttggccccacatgtcaatgagtgataaaaggatattcttgagaatattcatttccataaatgcaataaatcatatctcctgctccataaaacatttcctatattccaaattccataaaatccttcctcttaatctggggattccaataattcaacccattggtcctgcatgtcagtgactgtcaataatattcttgagaatattatttctataaattctataagccatttctcgtactccaaaaaatccaatagatcatttccttgtccagaaatccaattaagcttccaaaatccatatctcctcaaccgctcgaccgattgactccgttctacttccagtagttccgtaaaattgatatcaatttaatggcactattaattagtctaaataggatctttctttcagtcttttggttaggtttttgattgtttgcgtatagttgcggttaccggattttcgtcaagcggatttcttgaagattcgtgaagatcaagaccctgagcaaggcaagccacctttgaacatattgagcctatatttgaacttaattaatttgcttgaaaaatattatgcattgataggattgcacttaatctatttgccccgtctgcaaggcagaccggtgggcctacccaacttgttgcatctgatccttccattgttaattgttatatcatgttcccttgtaactatctagttgcgcctcgatattcgtgcactctgtgcgagtatcgacggtctccttcaaacttaaaatctgtgtaacttcttgggtaaaacttggtttacaaaagctttggaaaacccgacgcctgggtcggtgccttgtgaaagaaaatgagttttaaaaataaaatttgcgacacaaggccattcctgggcggaatacttgtgcggtcgcatctaaggaccgattcctttggaattacatccgagcatacaatagtgcgaccacacgggtggaatgggacgcccctggctgagtaaatagctaatcaagggagccttgatgccaagagacatgtggattcaacggggtggtgtcggggagaacccccgggcttcctggcacagtatggtctgggacctaacctgttgttggtctgggactcctctcattggcatatggtaaccctgtgtcggctttcgaaataccttgtcgtgaaagccccaaagtcaccagacgtggctgttctgcacgggctgggtgaccaaggctagtaacgtcgtgtgggtatagtgtaccccctctacagaggttattaaactgttcgaacagccgtgcccacggtcatgggcgaatgtgaggtgattccttagcgtagtttttgttttaccctgttttatgaaaaggtgttaaggtttgggaaacctaatgcttgggaagcaattagctgtccgggggacagtgggaccggaagtccctggaagtgattggtcgtttggggaccactattattgggaagtttggaaaaatggtttggtttgggaaaaccagctttgaggccaactctgggagttgtgaaaatcttgataaataaatttgttacttctcaccccgactgagctgagacttgtctcgctctggttgtggaaagcacacacttagattgttgaaaaccttgaaaacaaaactgattgaaaaataacaacctattctttgaaacttgcattaaccacctaagttcccctggcttgctgagtacgtaagtactcacccttgctctctatataaatatagttctgccagctctgaagatgaagttgaagtgaagtgaagattagggtttcgtcctagaccccagccgtcgcctgtggtgttgggggttagtccgttgtttccgttgctgctgccgctgttggtgttgcctcgtccgtgtcgtcggttgtaatctcgggctgtcctgagttgcaacctaagttaaggtaaataagtcctctatttattctaaggattgcaatgattcatatttgtcaccgtgggtaccagcgctatgtcctgggactagtactgagatcgcggtttcgtaggaagcggttcgcgccgtttttcctacgacacgctcctatcaggtgccgttgtacggcgatgccggattggggtgtgacacatagcaactcctatgccccgcagccgttgccgccgcccccgctcccacccccggggttcgtcctcgctgttgctgatgccctccctacctcccatcagcattgccatccctaccgccaaccgccggatgcaccatcgctgcccacccaaccaccggatccattgccgccaagctctccaccgtcctccccaccaccggatccgccgctccctgctcctgtatgccgccggatccctctggtgctggccactcccgctcgtccgcccacttgccaccatcgttgtcgtcgtagccatcgccactatcatcgtggccgcggtggaggaagggggaggggggaggggatggccgcttgaggagggggcgagaagatatgaggagaagataagggagtggagtggagtgtggagaagttaggaaatgagatattttaagaggagagaataaagagagggaggggacgggtaaacggcttggtgccaggcgggcctattaagaagcctgcctacgaaaattgttttttcgcatgtggtctttgaaccacgctctcggggcagcgatttttgcaggcgggagcagtttaatttgccagcaacctcaaggggtctcatccgaaaaaatcgtttctatagtagcggtaattaatttagaaatatcttaatgtaaaatgtagtttgtgcgctgctgcctttaattgtccatgagaagacgcgttccaggcacgaacgtgaccggaacacacgacgctcacgctgcaaacatgcagacgtgctcatgcaaaaaatcgaaaatagacgagctacagtacagtacaatacatcacaggacgctggttacaactttaagcaagaacacatgaaatgaaaaggcataggcatgcaggagaggcgcgcgcgttctagctgtacgtagtgtgtcaggctgctagctagtgctgcaggtagacgtggatctcgacgacgccgccggcggcgaggctgtagtcgtagctgctgctggccatgtacccgcgcgcgagccggaaccggccggtgccgccgacgaccaccgactcgcgcacgccgacgccgacgtcgatccggcccttgatcgccaccgagctgccgcggtgctcgccggcctccatcaccaggtgcatgctcaggtccgtcaccaacccgccctccgacacccgcaccccgaacccctgcgccgtgcccacgcgcgcgctgccggcgtccggcccctccgtcagcgcgttgttcagcaccacgatgtccccgaactgccgcggcggcgacgagccgtcgacgatgtcggtggtggactgcagcaaggagcggccggagacgacgcgcatggcggtgggagccgggccggtgtaggcgtcgtgcatgtagaagtggaggtgggtggtggtggtggtggtggcggcggcgctgtcatggcggcgaaggaggacggcggccgcgatgaggaaggagcagccgaggaggagggaaggagacagggaggatgacgccgccatgatcgacgttatcgagcttgctttgtgtgtggttgctactggcaggcagccctcatatatacacacactatgtacgtactggtttatgatttgttagaatctagttttaaacttaaccaaattgatatttttttctccttgttttaaacgtgggtttatttattaagatactgactagaccacctttcttttgtttcgctttgttccagttgctttcgatccagtactacctccgtttcatttcaggttataaaactttctagcattgcccatatttatatagatgttaatgaatctagacacatatatatgtatgtgtagattcattaacacacacacacacacacatatatatatatatatatatatatatatatatatatatatatatatatatatatatatatatatggataatagtagaatatcttataatattaaacagaggaagtattagctaagtgcaaggaaatatagggtctgtttggggagcttaagattctgcgaagtagctggtcggtagccagcttatgagaatctggaaaagctgggtttcccagcttatagcttctaggctgtgtttagttcacactaaaattgaaagtttggatgaaattgtaacaatgtgatggaaaagttggaagtttgtgtgtgtaagaaagttttgatgtgatggaaaagttgaaagtttgaagaaaaactttggaactaaacatggccctagtttattttctggtttatacaattacagcttctcaaaatctagaccaaaagctgaactgtttgggggagcttctgattctggaagaaactgcagcagctagaagctctctcaaacagggtcaatccttgcatataatttttttactcctttcttgtcattttcgaaaagaaaaacttcgctttagttagtactactctattggttcttttgacgccgtcaatttttatatgcgttttaaccatttatcgtatttaaaaatcttatacaattatgcaaaaatagaagtcttaaatgataaaattaatcacaataaaacaaataataaaataaatgatattatagcatttttaataaaataaatgttttacatatgttaagtcaatgatgctaaagagatactatacacaagcatgatgtgtgggagtggtaataatatttaacaatgaaacatagagaggcgtttttaagggtggcatttctggttgtgtgcgagtccctcccgtaggggtgaaaatggagcggattcggacggatagtggtcataccatatcctaaatcattgaagttaaactttatccaccttacattacccagtgcaacacacaggcattgtgcttgtttaaagaaaaaaggaattagcaacatctatattagataagtttcattaaatttaacattgaatatattttgatgcaatatttgttttatattgaaatgttaccatattttgctataaatttggtcaaaattttaaaagtttgactaaaaaaagtcaaacgacttctaatataaaacggagggagtatgatttttcacatgcaggtctatttttaagatgtggtgcttttaacataaccgcctacgaaaatcgcaacaaaatataaaataatgggccgggtgatgggagtggcaaaactctcgcttaattatcctctcccccgtcccctcttaccctccatctccagtacagcgtggtagcgtgggaagcgggcttcggatccagtggagctcgatgaggagtacctctgtgatggcctccatcgcttctctccccctcccttgtgttgggattgctcactcacagctacaagtgttaatcacaaacacttttgtctctctggtgggaaatcacttcctctctctctctctctctaccgtatttttgccacaaaggcttctcaggtagacacacacaagcagcacaagatgcaagtttctgttgattcaaccacccacggcctcatcatttttctcattatatatagactcaaattacatgcaaaggataacaaccagccaattctcttgaccgggactcacgccatgcactaacaaactaaccctctatgcaaggctgcatgtacacctacatgcaagctaacaaccagaacgtgcatctatccactattgcgtgcatgctgcgtttccacgccaacgaatgacacagccatctcggccacttcgcgatgtcatggcgcacgacgttctcctgcagcatctcacgtacccgccgtctcgcacggcttctcggccgcgtacgcatctcgcatacaaccataagcttcttcgggtaccatatcctgctacctatacatttattttctacatgcgaccaaagtaaacatgctaatgctaatgacaagattatttgtaacaccttgctcctggcagctacaacgatgggcatcaagcaacatcacagtggtggtgccggatccagcaaagctcgatttggaggacctcctgcgatggcctacatatcgcctctcctccttcctcacttcagatgattgtgatggcaggctctggacggtggcagcgacgcaatactagaaaaagcatttttcccaatataggggtcttttttttcgcaggcagacatgagtctgggaatcaaatgactgcctacaagaatataaatcagggtgaagttcgctgtctgtctgcgaaagtctattttcacaggcggattacttaagcggcgcctatgaaaatcattttcacaattttcacaggcggaccacctaagccgcgcctacgaaaatagattttcgcaggcgcactttatgtggtccgcctacaaaaatcgtacataccaagaaaacttcaatccttatctactactccaacccttccctatcactcatttctatcttctcaactctctccctccaccaccggcttctcagctccgccatcccctcccctcccatcccatctctccctccctccaccggcggcggcggcgcgcggacgcggcggcggctccccggcttcccctcctagatccagccggagggaggccggggaagggcagcggcggcggcgacgacgtggttccccggcctcccctcccagatccggccggagggaggccgggagagggcagcagcggcgtgcgcgacgcggcggcgacccggtgcggcggccgcagctccccggcctcccctcccagatccggccggagggaggtcggggggagggcgacggcggcggcggcggcgaggcgattttttttgtttttttattggattttcgcaggcgggccatttgcccgcttgcgaaaatagatgattttcaccatcgtccgtctgcaggcggtcctccccttcgcctgcaaaaattgcttttggccgcttgcaaaaatgctttttctagtagcgacgggctttgatcgtgtttgatctgatgaaggtggactttaggtgcactggatctggcggagcttgacgtggaacgcctctagtagagataatacggtgagatctggtggacttaagatgcaatagagcaatgtcttccggcagcgacgatgtgtcaggcgtcgaggaggtttgtggtcggatctagagtttctagaatactttttttatttttgtcccacaattgattttgtcatgaatgttaagaaaatagaagcacaacggagacacaaattttacataaaaaacccttgagggaaaaactacgggcaccgaccggcaattatcagtataaaggagttggatacaaatgcagaggatacattgggttgtctaccatttgttagaaaatagatgcacaacaaagacacgaattttacgtagaaaactcttgcaggaaaagaccacggacgccgaccggcaataatcactatatagtagttggatacaaacatagggttgtcacaccctccctgtgcggcttacaacagatatatatagctaggagtcctcatgggcaaagagtcgaagtcttaatgggaaactaatcctattaagaaactaatccgaatatattgtgtgcctaaaattcggatcacatatttaacaattgtgtcgtccaccgggattttcacagacacatctagatccctatggttgctctagctgcctgtgaaaagtcatattagcaatttaattagaaaaagcttcgtgtgtttatttattacgagaatgcttaattacgggcgaccggcgctggggagccggatcgggcgctccccccgcgcgcccctacccggcccacccacccacttctctctccccttttttttcataaaagatgtttcacctagtgtacttacaatgtttcactattatagatctaatgttgcagtgaattaaaatactcttttgcaaaaaaaaaacccacatattttggaacctttattaagggaatttggtttattttttgttccaccaaaaatattttacctattgtacttataatgtttcactatgtatagatctaatgttgcagtgaacgaaacattctattgcaacaaaaaaacccacatattttagaaaccccatattaagggaatttggtttattttttgttccgccaaaaaatgtttcacctaatgtactcacaatgtttcactatgtatagatctaatgttacagtaaactgaaacattctttcgctatttgctgaaacattatttttatataaggtgaaacaacacccgatttaaatgagtgaaacattttcgatctacttagtgaaacaattccgatatacctggtggaacatcgtgtaacatttaaagataattcaataataagctaaatttttttcgtcggaatatatctatgtgtggtcttgttttgaatatttaattgcaacgaatttaatggtgcaatcggatcatgatttggataagtaatttaagagaaaaatcagtttaaagtagttttgcacataaatcagacgctgacgtcatgctgatgtcagcgcccgattttaacctcctcccatcgggcgcccgagcgggagtcacgtcctatttattacggtgtgtatatatagtatagactagactaccatttgtttgttttgctttcaactagtggctaatatctaaggccctgtttagttcacaccaaacttctcccaactcccaactttccatcacttcacattctccccactcccaactttccatcacatcacatcacatccaaaactttcttacatacataaattctcaattttttttccaaactaccaactttccccaaacttctccccaatttcaaaaactaaacatgacgaaatataagccataccggaccaatccttatatacaactgggaggccaactggtcatttgctttcagctagtggctaatagctaagtacgacgaaatataagccataccggaccaatccttacatacaactggaggccaactggccaagtggttaatatcaattattccatcctggtcctttcttgaatggtcattcttgaaaaaaaatatctttactctaattataatattacactattatgcttgtttgcgagccagagaggccttttgtggcttaatttgtcgtcctccaaagtcccttatctcctgagttatgggtctatatatttctgtctgaacagtcctaaattttcttttagaaaaattcttcctccgccatattctagtaactacatcagttattcatcaaactttcatcactatgtctatgcataagtatttagaaacatgctatattacaagagttgctacattattaatataaccatttaacctctctgtttttattacaacctaatcatttatatatcggaaatgctataggacggtattccatttgaacgggatgatatctctgagatatcatgtcgtgatatctaatcggtatcaagatacctaaccggtaccatactattcaaaccagatatcgttgtagcaacccctttataaaatcagcacttatcaaagttttgtaccatatggccagcgatgaaaagtaaacagaaatggcgactcttatgacatggaatttttaaggggattggatcataaaaagaagggaaaattagaaccatgccattataattttacaaaatttgagatatatcatcctgacccacatgtcattgactcatacgggtcctaaatgtcattgagatatcgatagcatatctcaaactttacaaaattataatggcatgcttctaaattaccaaaaaaaaatggtgcatctacggtgcaaacaggctcgatttatggtagccttgtcctggatagctgacacatatggaaaccacacatttgatacagctccaagtgaacgggatgaggacccacgtggcttgactcgacttttttaacccgcttttcaacatatgtgttttcaagggaaaaagaaaagcatgtgtgcatgtttcttttgaagaacaatcaatccctcccctggctagtggataggaaattcgtctaaactatagctatttgcctatttatttagacatttttttccaagcaaagctagagttttgcatttaatgaaattacccgataattaataccccttttttaaaaaaataaactctctccatcttataaaaaaaacaacttctatggatgggaatatggataaaagcttgttcatatccatcctcataagttgatttaattttagatagagtacgtggctgtcaccgattcctaaagtggataaatccgagcacatgtttaaacatatgtttgaatattctgataggcatataagcctaccacctgtactgccgtagtacacgacaaggacattgcctcttgtgattgaggtgagttagtatgacaaaaatataatatttatgatatttattaataaatagctagctcgtgcagctcatggatataactctcctaatgatgtcagccttaggaaataccgatagaagggaaatggcaaatgtaaaataaatatggttagagcatctctagcagtgtcgctaaacacaaccctcaaaactattcaagggtgaacataaaaaaaatacggaagaaatttctgcgcttcccaattttttctcagctcgtgttgttctctcggtctcgagccgtcttcctctgcccggcgctcctccctcaggatgggaatggttaggttctggattgaacctaaaccatttcatgtgacaacgctaatccatggtttaataggggcaacccttaatgattctattaaatgaataggttatccaatagagcaaaaggttaaccgattgaacctagcacacaaccacacatatacaaggcaatacatcacaggattacatatctgcaaagcataacagggttacatatatgcaaagcagtacatcacaaggctaattacacagccaattcaccgtaaaagagcagagctgcagtaagttcacaataaaaaataattggaaatgcgtactccagtactccaccattaaccacaagaacatgatagcgtatcatttattacaatgtgcctaagtcaaaagaagatgcacagctaacatcatttcatacaaaagtatcatattgcattgatctggcattcaccaataggacattctctccaaaaacagcccccaccatcttcaacacacctttcatgtcctagcttccctaaagaaatgtaatataggtattattattcacagttatatcatgtcctagcttccctaaagaaatgtaatataggtattattattcacagttatatcatgtcctagcttccctaaagaaatgtaatataggtattattattcacagctatatatctctaataatagctactccctcagtttcatattgtaagaccttccagtattgctcatatttatatagatgttagtctacattaatataaatgttaataaatctagaagaagtacatatatttgaactgaacattttttttctcctcgagaggatgtcccccgcaatgaggtgctagttatcattttaaaaaacggtaagatgctaattgctttccatgaaccaacatatccaaactcctcataagtaccaacatcagttaggcatcacaaaagcggcactaataacatattgttagtgccagtacgttctacaactggcatatttagtccctcgtatatgttggttcttgtttagacccggcatgaggctcaccagggacgagttagcatgttcccatccggccaggctgtgttcgctagagcaagttcccatccgaaataatgcgcacagaaaatggaacggtctattaatggattagcgcgtgattaattaagtattagctgaatatttttcaaaaatggatcgatatgattttttaagcaactttcgtatagaaacatttttgaaaaaaacacaccgtttagcagtttgaaaagcatgcgcgcggaaaacgaggggatgaattgggaaacttgggttaaaaacaacaatcagcatatatgagtccattatttgtgctgattgtatgtaacaaccggcacatatgaggctcaccttacattccaattcttatattacgccaacatttgctgactatatataagtaaagtaagagagttaattagtaattaattctcatgctaaatattttatattgcaattaaccgttatacatatatagggccatataggccataaataaataaatagtattccctccattttatattataagttatttcagtttttgttattcaaattgttttagatttgaccaagttacggaaaaaaaaactagcaacatttataacatcaaatttatttcatttaatttagtattgaacatattttgataatatgtttgttttgttttaaaaatgttagtgtatttttatattaatttggtcaaacataagaaagtttaactatgaaaaaagtcaaatgacttataatatgaaatggagggagtagttagttaatcttgcataatctcctctcgatgcattactaacttctcgaacacttgaaaattgaaatgatgcataaaacacgtatactcaaataactactccaatagctaggcatgcgcagttgatcgatcgatgcagccgtccatgctagtgctagctgcaggtagacgtggatctcgacgccgccgccggtggcgaggctgtagtcgtagctcactagtacaaaaaaacatcaaaggtgccggttcccagctggctatagaaaactggcacctattaatcggtaccaatacaagcaaccggcccctataaaaaatataaacggcacctataactttgcacgatccaaaaaaaaaaagagccggctcgaatcgagctgaattcacaagccttcactgcgccatgcccccacgtcttgtttgaaatccccaaatcccccacatcacagatcacagatcatccataaatcatccacaaatcatagatcgaaacatattcaataagaaaatcatccacaaatcacaaaaacatcttaaaagaatctacaaaatcattcaaaaaaatttgcgcgcggccgcctgccaccgccgcctgccacctcccctcccaccggatccgacagaggggagtgcgcggccaccgccgccgccgccgcctccgccggaccgccgccagccgttgttgccgcctccaccgggccaccgccgaggtcggccgcctcccctccggctggattcggcggaggggagggcgcggccgccacaagccgctgccgcctccaccgggccaccaccgaggtccgccgcctcccctccagccggatctggcggaggggagggcatgtccgtcgccagccgctgccgccacaaccgggtgaccgccactgctgcctccgccgagccgccgtcgccaccgccaccgccgctcccacttccgccgggccaccgtcgagctgccgtcgagacgagagagagcgatagagggaggcgaaagagagagaacgatagagggagagcaagagagagacagagagagcgagaacgatagataaggacgggcggaccgagagatgggtggaccgagatatggataaggccggctcggtggctcggctcggctaaggataggtgccggttttttaagaaaaccgtctcggctcattataggtgccagttttttaataaaaccgacacctattaacctataataggtgtcggttttatttaaaaaactgacaccaatagtataggtgtcggtttctctttaaaaccgacacctataatggtttaaaggtgtcggttttatgtgtttttagcctgcgggagagggtaaaacactatacgtaccggttttaattgttccagcacctataatgccgatctctatgagcttttttgtagtagtggttcttcgtgaccatgtacccacgcgcgaaccggaaccgccccgtgccaccgatcaccaccgactcgcgctcaccggcgtccatgtcgatgcgccccttcgccgtcaccgagctgccgcggtgctcgccggcctccagcaccacgtgcaggctcacgtccgtcaccatgccgccctctgacacccgcaccgcgaacccctacgccgtgcccatgcgcgcactgttggcggatggcccctccgtcagcgcgctgtttagcaccacgatgtcgccgaactgccgccgcggcggcgaggacgacgacggcggcgatgtggcatcattgttgttgccgtcgccgtcgtcgagcaaggaacggccggagacgacgcgcatggtggtgggagccgggccggtgtacgtgtcgtgcatgtagaagtggaggtgggtagtggtggtggtggtggtggaggcgccgatgtggtggcggaggaagacggcgaccgcgaggatgagggaggagctgaggaggagggagcatagggaagccatggcctggtcgagcctgctgtgggctatgacagctgcttgctttgtttgtgttgttgcagctggcatgtatttatggatgtgacgagactgtgagcgctagtatgttataaaagttagttgatattgcggaacgactaaccttctcgatcgcttcgatcatttatcacccaaaacatatcagataatgatacaggaatatacgatatttgttaacgaagtttagctaaagtcctatatcttcggggctttgattatgggcgctcctttccaaccaatatagctcctagctactaagtacgatttccgacaaactcacctttcactccgtttattcgccacagttatataacttttttatcaaacatgtaggacaattgcgtatcattgcattacagaagaaccggtgattatatgtgcatccttgataaaaaaaaaacaaaacacggccacgaccttacctaaccatcttctagtgcaacaacgatgaggtaagaaatgccttaagcctttggccatgcccaacaaagcaactcctcactagtatacgataaagctccagcaaggttaattaggataagcatcttcaaatacacatcgattatgatgcttccaaattaaccaaggtcctagaatgatcagagagttaaggcctttttttcgaacttaaccatcaaccaaaccatccatcgtagctcaccaatccctcaaaagaggcttcattacatgaattgtgtaaatggttgatcgatcgtctccctagtctgatcacaatgagtgcattggacaaggtgtgtgacttcaacttgcaagaaagtcagctgtccagaacctattgtgttttgtatacaaccaaccacatgaaaaaacttcatttgcagggcctagcgcatgtattccaaaatacgttcccattgcagcctaaaaaaattagatccaaagaaaaggccctcacactactggaaaaatcatctttggtcggtcgaccaaattccacaatagtcccggatgtaataaaaaccgggactaaagaacatctttagttccggttcaaaaggttagagctactttttgatttttagtcccggttggtaacaccaaccgaaccgggactaaagatcatttttagtcccggttcaaaaaaacggcaggtggtgtcagacccctcctttatctttaatccttggtgttaccaaccgggactaaagatctatttatagtcccggttggtaacaccaaccgggataaaagaacaatatgatccggttggtgttaccaaccgggagaaaagagcgacatgcacggagaggcatggtgtcaaaccccctcttttatatttagtcccgtgtcaccaaccgggactaaagataaatttctagtcctggttggtattaccaaccgggaaaaaagatcgacaggatcagttaataagttcaaacctttatctcatcctctcctcactcagatccatctcttcctcttccttctcccatctcttcctctacctcctctatatccgccccatcccctcccctcccctccccacttctcaggcggcggccggacgggaggcgcctcctcctcccatctcttcctctacctcctctcctctgtatccgccccatcccctcccctccccacttcttaggcggcggcttccggatgagagacgccctcacacggctgccgggaggcggcggagccggcctcgcacaccggtggtgaggcaatgcgcgaggcacgaggcggggccgcggacgaggtggcaggcgctacctgtggcaagcagcggcgggcggcaccgcgccggatctcctctccttttttttataatttgtgattgagagatgtttaatttcttttttaaaattgtgattcattgcatagatctgagatgtataatcgatctgtgatgcatttgatttgtgtgtaattttttttaagatttgtgatgtatttgatttgtgtgtaagtaacttaggatttgtatttgtgatgttaatgatttgggatgttaatttaatttggggatttgggtatatgtatgacactcgatttgagggtttggtgtttgatctggtatatacatcttactcgatttgggagaaaataaaaagaaaatggaccaactgggactgcccctatcctctctttagtcccggt

SEQ ID NO: 7112 - DNA, 63122 bp, Oryza sativa
aaccgggacaaaaaaaaatcaaccgagctggcgccactgcccccacccggctgcctcggtctctccccctttctttcccctcccctctcattaattaaacagcctcatccatcctttgtccatccttatcctcctccatcccttctcctctcccattcctctcccttctcttctcttcctcctcctcctcctcctaccacgtgaggccgggtggcgcacggcggtagggagggcgcggagcggcgggcggccgggcaggcggccgaggcggtggaccgtgaggtaggcaaggcgggcagccggcaaggccggcggcgggcagccgagcaggcggccagcgaggcggcggcgctccccgggcgggcggcggagcccgaggcggcagcgggcgggcaccggccgttgaggcagcgggcagcgggcggcgacgctccccaggcggcggcggagcccaaggcggccgggcgggaggccagcgaggcggcggacggccggcacccgatctctgcgatgtggttttttcctgatctgtgcgatgtgtgcggccgatctgtgcgatgtggatttctttttctgatctgtgcagccgatctgtgcgatgtgatttctttttctgatctgtgtgatgtgtaatgtgtgaatgaatttgtggagatgattttgtgattttgtgaatgatttatgatgtatttggagatagaaaatgcagcttgatgtatttggggattttgtgaatgatctgtggtgttcgaatgatttgtggataatatgaatgatttgtggggctcgaaatcatggaagcagcaaggaaaaaaattaaaaaaaagaacattagccccggttgttaactctaaccgggactagatctcccggttagtaactccaaccgggagtaaagatccttctttagtcccagttattttaaccgggactaaaaatgggtatttttagtcccggattcgtagttccggttgcataaccgggactatagggggttgtgaaccgggactaaaaagggtttgtccaccagtgctagctagctaggttatgtgctactgcaccttatgtgccttttttttttttgacaaagcgagaatgcaacattcccaatattccaatattccgagcaaaaaggccgccgcaatatcaaacagtactatctctgtagagtatgtatccactacttccgtacaatccgtctcgataagattaatttgtggttaacgaggaagaattggattgagacgatacagtcagaggcaaaaattatctcctttaatttccctttgcattccttaccatttaaccatagttggtgtcatggggtgtgtgattttcttttttatattacatggtagctagatgcacataccactacacacgcaacaccatactcacacaccttgtgaatgtgtcccctaacatatactttaagagacggaaaccagcgacatatcactgatctcactaaagtcttattgaaagtccatatgcatgtgtgtaatattcttagacattaagattttaaactctgatagatagattcgtacacctacgactctaccaccatactattggtgattcccatggttgtatgattttgggcctttgaggtgtggagaaaaacataaggtagctcctaaatcaaacttaaagttaaaaggaccaaatactgccccagttgacacgtaattagcactaacctggagattaactgaagacccttctcgagaagccggagagaggacatcaaccagaggatggatggagctcaatcactggagattataaacgggatttacgacgatggcgccatggatagacgaggcagctgtaaagaaggcaggattgcttgcgatgatgatgaagacagtgttgacaaaaccgagcaagttgtaattgtgcagacatgccgtgcatgcgttaatcgcgtatacagtacagtttgtttgtccaaagcttggcagagctcctcaagtacaatttctaaggattaatataagagcacggttacacgtactaaactattagacttctactccctccgtttgtaatacatgacaccgttgatcttttgagatacatttgaccatccgtcttattaaaaaaaattatgtaatcatttattttgcttgacttgatttattatcaaatgttctttaagcatgatataattatttttatatttacataaaaattttgaataagataaataatcaaacgttggtcaacaagtcaacagcgcatacattagaaaacaggaggagtattaacattattgatctcaatcaattgatttaactagataggagctatagaaaatttatatgtacttctacagcatggcacatcagtgtttgttagtataggagtttactaaaaaaacaattagatttccgtgtgatatatggctctaaaatatgtcaacatacagctaggtagtcccttttccttaatataaaaaagttgctttaaagtaaacctatttgttgtttggaggaattaaattaaactaataaaaatcatatgagtaaattttctactatttaaaatagaggctactacttgataataacaaatgttatgcaagtaaaggacttcacagcattttcaagaataataacggcttgtgaggattatgcatgccagcctaattttttgctgctactaacaagaacggcgctagaataacggttacggtttgcacaagtttttcaatgctaactcaagtaggaaatgggtgattcatcatcggaaccgtcgaaattcagcaaatgtcgtggacggccagcttctaacattgacgaaaccagtggcggccagctgcatatatgcccactgaattgggcattttgatgcgtcatttacacataagttggaaatttgaagcatatatttccatcagttgacttcctccaggattaatttaactgcatctttaaaatatggtttctgaaaatctcttgcattagaacatcatacatctgcagacaattcactgtttgctggtttgcaggtgatatgatttgagcaagttgcggcgccattgttgactgatcacgttttagcttgtaaaacaaattatgagatggcgtgcgccatagtgtgaggatactgtacaacattatactcatgtagaacagaaactatgtaaaatgacacatgtaatgacttcgtgaatcctaagatatactgatatagtttttaaaggtactcataagaatgagatgtgcatgcatgtttgtatttatagaagtatgtacatctttacctgagcgccagtctttaatttatttccaaaaaaactacgtaaaacataccgagcttatatatgtgcatcaacgtcaatagtcacttacttcctccgttccaaaataaacgaatttaggataagatgtgatattttctaatacaatgaatatggtagaaacatatccagatttattatactagaaaacgtacatcacatcatagtttatgttagtttttttacttcctccatttcacaatgtatgacattctaatattttctacatttatattgatgttaatgaatctagatagatacattgtgaaacggagggagtataatacaggggaagtacttacaacgggagggaacaagaacagtgcaccaaattaggtgaacaaaggtacaaaacgcagtatgagtaaatgctacagtgttgattgcatcagccggtccaaattagattgacaagttcgaaaggaaaaaggatgaaaaatacgagtacgtcaaacatagtggtaagggtgtgtatgatgatagtacatagatatcgatccactacatcaaattacatatttttttccccatggccggcctccgaatttcaggtgttgattgccaaaagtctcctctccacattgctcaattggtcttctcaattaggcagtccaaactgttctgtgactagagtttgaatatcctcatgtgttgcttagaccgatagaagcgaccactcgtctggacctctcgtctcccaacccctcgtcttcgatggccttgccgccgcccgagcaggccaccagcgtgccaagcggctgtgaggaatgcggcagtggggcttcctcagcagggatctggctccgtatcgaaggggcgtcgggggcggtgcaggaagcggcaagaaggtgggcggcggaggcgttgcggtggcggccggaggtggtcgggcctacgtatggccgtgcgagctggtgtcagcggtggaggtggttggcaggtgtcaacgacagcatctcttcgggcggcggaggacgacggcagcctaagcatcgccggcgtatccttagcagggaaacggcaggtttgggtagaggtggactcgttcgcagcggcgtgggagtccgggtggaagacttctccggcggcgacggctaaggccctaggggcagcgctggtccgagacagcggcggcctgagtgccggtgcaaggttcacagtgaggaggaggcggatcccggtggcagcggccgccctaggggcggcagatgcctgtttatcgggtggaagaggttttcctcgatggaggttgcaaaggtctccggtagagccaacggccctaggggcggcgatgagctgggaatccaggaggggaggaggttcacgaagatggcggtggccctaggggcagtagaggcgtaggaatctagcgaagcggaggtgtatcataagtggatcttgttggctcgcgtttggttggctagttttagctggacggcgacggatgaaggtgggctaaactagtgacgtgtggcgtcaactcacctgaagcggaggaagatggcatcagcggagattcgcaacgacgacgcactaggtgtggcggcgactagacgactcacactcgctgaattttttggttctatgttcttctctttcttgagaggatatgtgagtctaaatgctcttgtatttttttggctgtgtatattatttgtggatatagaggccggattaatgaaaatccattatttaaaaaaatgtgttgctaggaccaggcttttcgtgacgaatttcagtaatcatcaggtaatacaatccttatgcccagtgagtgtttaaacacaactcttgctctggcagtcccaaatctgactcaacaagatgaattgttttataacaatatttctgtcacaatgatcaactgctaggacaatattcttctttttagtgaaatgatgccttaccttggccttttgtcccgagaaccagttatcatatatagctaattgccacaagtgaagttttttttttctttttgaaacaccatcctcctgctggatatgggccagttcggctgccattcctgcggcagcagcgcttgtgttgtgcggttgcaaaacaaataccagccgaacatgccctatattaagaagaatgggcctagtctacgagggagaccaaacccaaaaaccatacaaccaaacaataaattaagaaaaccatcaaaacctacacaaagggcaaaagagaaacaacctgtggcgataggactactaaggcacgactgaagacatcgagcaactccgacttcctaagacaagccagaacataccaacaaacccaccaaggagcgggaattactaggcgaagcctccgacaaggaaacaatatcaagaatgttgtcaatgtccgtccatagcaatatactaggttttcatctaaagaagaagatgaaaattgaagccaatgcaaattgccacgagctagtaaagtataaaatgatgacacgaagaacggacatcagaacccctgtattttccattaacaaaaagtatatctgtgcgttaatatggaccataattctaaaattatgtttaccaaaataacaggtggtattattatatataggaaacctccttaactgtacatgtgcatccatcaagctaacaagacaaaatttagttactgctggtgcatcatgcactgtttggacttcttccgtttgatcattaattactgtaacacattactgtgaaatcatgtcagaaaaaacaagagaaaaaaccaacaattaaaaacaagataattacgcttatgtcaaacaacaccaaacatttgctaatcagaagcatatattcatgaaaagtaaacttaattaacgatgcaagttgaaagcatctaccatgactaaaaaagtgagcaatatacagattgcatgcaagtaggactgagcagtaagctctggtttcccaaagaccccaaattatcaggattccataacttgtattcttcccatttcaaaagcactgcggtatgcaagacttcctaatttgaaaacattctcatctgccttcgttagctcagatgtctgcagagacttcccttccaggagcttgtccctcataattgtcaaggcttcaacaaacaaataatacatgccagtgatgacttgtgcacaagaaacatctatactactttaaaaattttaaaagtaggtaatggtgatggcagtaaatctgccaccccgcaaaccccattgcaatttttttgtagattaccccttaaacttttttataataaaaacaatcaaatctataatggtgttggcaatgattctgccaccccaccaatcccattgtaaatttttgtacgttgcctcttaaactttttgataatataaacaatcaaatctatcaccccaccaaccccattctaaatttttgtatattaccccttacacttttcataagtaaaaaaaattcaaatataaatagattgccacatataaaaatcaaataaggtgaatgttcactataaaaataggtaatatatttcaagatatatatttttatttgttttagacaatattatatttaatattttttatctgttacagactgcggacatttagctagtaaaagattaaatcaagaactaaatgttttggtcttctttcacacttcaaccttcggtctgatcctccgacttcctcttctcctccctcttcagcctcttcttctccctcttcagcctcctcttctccgccctcttcaacctcttcttccgcgccttcttcagcttcttcatgttcgaattccacttcacgttactgtccttaagatcgcgttcattcttgcccatcgaatcgggttattcacaattcagatctccaacagtactgaccctaccgatagtatagaaaaaccaaatgtcactcatctgatgcaacattattaatattcggaacaagaaaaacaaaatatcatttcattattcagaccataccctataggcttctctgatttgtcactagcagtaatgccattttcagcagcatgaccagctgtattgcaagaaaattctttctcaagcttggttaaaacttctgctgcatatgcccggatatactcacacatatcatacttcaggcacatgtcagggtcatcttcactcaacaagtaagatagtttcctagcctcctttgcgatccccttcagaacatagttttgaaattagcagcacaaggtttgtcagcaaaaaaaagaataagtaccaaaaaataatacactgagtggcagcttgttcaggtaggggaagtcacatacaaccaaagcagcagcggcaatggcagcatccgattcattcactttacagagcataagatttaaggcagactgccggagacctcattgctgaagctgatcgtctcggtgggatccaactcatgttccaatgaaatgcatatcaactcagcctccatcgtgatacacttgaaaccaccatttgcaataattgatgccagaaaaaaaaggttagtaaacatcataaaatgataattactgtttattagcacttgaattaggtagttaggcatgcatgcgtaccaccaagcctgcagctgcagcagaagattcgccctctgactgaatcatatggcttgcacactccttgatcttggagctcaggatgatctcttcaaccgtgagtgcactatgacagctcctaagcaacttgttctcaatcttgatacactagaaacgtttggttgttttgcaatggtgcaatgaagtttattaattaggaactgaatcaatgaaacaagtaaggtcgccacagtaagtatgcgtttgcagaggcaggaagacattaccaggttggctgcatcatggaggacaccacatccagcaggaggaatgccttgtccctggacagacctgagctgggagcagagagtggcaacttggccagcattgtggctggaatactcctcgaggtatttcttgaattgtggccactcaacagaactagaatggtacggaaacaacctttcccatccccatcctctctcgaaaagatcttgagtagagattaaaaaaattactcagtaatactgtactctccaaattactctgtccatcctaaaatatactccatctgtcccacttgttaaggcgcgatcaaacgtcgtacagtcttcaaaaataatatttgactttaaaattataataacaatgtttgtagcaacaaaatcataatcatatgaaaataaatttaaataacaatcgaatgatattatttttatcaaatgaaattaaatttatattaaaatatttattggtcaaatatttacatagttgaattttaaaatatgtgtatgtcttagtgagtgggacggagggagtaggacacaactatttttttatttttttaatgtttcataatacaatgtatgcatgtatataattaactaacgcctcccctctcccctaaattcattttttttatcatttactctcaacatctctaatcccgttaagtgcatacaatgtacttgatatgattcaaacgagaaagataatagtaattattttttgtttcttatgttagtgatggttgtaacttatatcttgggaggaaaagagtaaagtacacggtactctccaaattatagacccaaaaatacatcatatctctgtcaagaagaaaaaaattccaaaaaaataaaataaaaatctcttctctagatggattgaatcaggatccagcaaaaaggcaaaacattgaaccaagcatacatataacatatatccccaaccgtagagaggaaattcgtactacctggatagtcgatcaagaacaccggcggtgcgtcgagcagatcggcggtagtctcctcatcctccttgtcggcgacccactccaacgccatggcttcgcacaggtattccacatcacgggggatgtaggtggcagtgatgggcacctctgatgacttggtctctccattgctactcgcatctaccaccatggatctcctcttccattatagagtttcgtggatggattgtggggggcgaaacgcggggaggttttttttctttttgaaatctttgatgcggggagagtgggagacgcaagagaaattggacattaggccactaccaatagtgggtttcatcacaatgctattccgcggaatggcgttgttaaaatgccactcacaacagatgccaaacatttgtttttgccatttaagccaattctctccatgtccacctaattttccacccgggctgactaaaatacccctccggctgtcacaagcgagttgttcgtgccgccggcgcccgcaccgcccaagctcaccgccgatgacgtcccgcccccatggctgaagcccgctgcccacacatcggagaaagagaaggaaaccctaagccggccactgcgtcgcgtgccacaatctcctccgtcgtcgcgcccgccggccaccgcgccgctcctctcccgctaaccaccgtgcgccgctcgccaccatctcctctgccgtcatctccaccacatgccgcaggctgcacgccaccatggcccaagaaggctagctccaggaggagctcgtggtaggacaggacctgcgttgccgtcttgggctcagtcggcacggtgactgtggtggggatggagatcaacgagccggtgaccaaggcggcgggaggtgagccgaagccctcacgctcatcctcgctagctctccggattgtgtgtggtttgagctcaaagattgtgttcttgaatttgtagagcaagaggaggagccgagctccgccgagcctgaggttggcgccacccctgccgtcgtggtcttctcctcatcccacatgttcgccggagaagagaaagaaactgtaggagagaggggtattttggtcagttgaagtgcaaggaatggtgaatatggcaaagcaacggcttggtatcggttgaaagtggtattttaacgacgccattccacggaatggcattgcggtgaaacccactcttgaaagtggcataatgtctaatttctcgagacgcggagcaaaagcagaggacgctctctctgggccgggcagcccactggcatggtgagacacacaagacccagtaagcgccatgtctctctctccctgctttgagaggagatgtcagatgaaaagagaagatcgagaaatacaaaatagtgcatgaataattgaatattaactattttaaattttaaaaatagattaatataacatttttaaaaacaactttcctatagaaatgtttttttaaaaaaatacatgcggagaacaaaacaaatctcctctcaatcttagctgccgaacgcagtagtcagctatacaagtactattttcttttgaccggcgcaatcaaaagcaccgttttcctttgttcgagagctgaagaaaatagaagattgagagagatgaaaatcgagctgagttattagtatatgattagtttagttgtatattaattaatctaaacttgaaaatgtattaatacgattttttaaaacaatttttctattaatatgattagtttgaaaaatacgcgtgcgaagaacaaagtatttctcctctgtatccactgcaaaacaatacagccttagtatgacaaattatccgtcatcccccatccgatggaaaaacatctctatctccaccatctctactactttaatttaaatgtgtaatcctttacccgaaattgctaattggctcatacgcgctagataaataactaacgcgcgtttcagttttggcatatcattagcaaggccaaaggcccaagcacacttttaactttatgttttttcgtctgacggcgccagcatatgcacgtgctagtatagataggaattaacacaaaggggcagttgggcaagtgaggcaaatcaatgtacaacgtgattaccgctataattcttcattattagttttaatttttaattaggtgacgtgattaatatgagcactcatacctgaaaattttcaacctgtttttaaaactttcaacttaaatataaaaatttcaactcaaaattttgaaactttcaacataaattttgaaactttcaacccaaatttttgaaaactttcaactgaaaattcaaaattttcaactgaatttttaaaactttcaaatccatattttaaaactttcaagtcaaaattaaaatctttcaacgcaaattttgaactcgaatttgaaaatttcaactcaattatttataactttcaatttatattttcaaaaactttcaactgaaaattaaaaattttcatccaaaatttcaaaactttcaaatccaaattttaaaactttcaaatcaaaattgaaaactgtcaactccagaattcaaaaaaaaatcaattccaattctagaactttcaagtctaaaattcaaatcttttagttcttaatttcaaaagtttcaactccgaatctaaaatttaaatcttcatgttagatagtactccctccatctatttttgatagtcatatttctaaatctgaaaaatttatttttgatagccatatttcaatccaacaccctatcattttaatgactttctcggattcaatgcatgactctccattcttccacacataattggttacatgggcattgagaaatgtaaatattaatggatcgcttgtttacgaggaatgactagtagcatgtttaaatggatgataagtagaattacttatgtttggtctgtgtgccaagatgaaatattactatcaaaagtagatggagggagtatttattagcgttaatcatgtcattaacgctaatcacattattagcattagtagagaggggcagcttacgcgggttgatcggaggatttttatttttgtcgctaacaagaacgggaaaatcgccaaaagggtaacgacaaatcaccgattcctctgctccacgcgctcgcgacttgatcttccggcacgtgcgcattaggagcccccatcctttaccatcattgtagttctcccacacaaagaaacgtctcgaaaaaaaccatctcatccaaaaaaaaaacaacaatatttccacgcaataatcaaccagaaaaggatagaaaaaattaaaccttataattcatatctctcttctggcccttatgccactgtcgcatccatcctctccttctcatactgcaggcgcaaccaatgcacgaatagaacacatgcattgtattttgaattgatattttatttggtatatatccagaattaattttcaattggtgccggatttgagttttccaattggtagtgttgttgcaagaactcaacaagtgtatcaatttcccttccctctattctctgccctctatgggtgatatttacacatttatatacatggatatacaagaggaaaatgcctcggtgtccctatgccttacgatatgcctatgcgactggccggtgggccagccttggtcctagtggtaacttggtggaggacaggagagctgccccggtatgggggcaccactgttctcgaggggccttgctattacctaggtaaaggcatcctccgggtaatagcgtgctccgcctggcagccatcaacagtgtcagagttagttggggcgcgtagtgcgcatttattcgtgcccgctagcgcttgattcttgacttggcatgcgagggcatatcgaggcatgattcactccggccggcacactgagctcttcagacccctcggaggcccgtagcccttaggttccctccggagctccccttccgggctccgggttcccctctgggcttcggagctcggtcatttggagtggcaccggagcccgtggcgctgtgacctcccggagctcctccggagccgatcagccaccatccggagcctgcttaggtctcattcctctcgcccccaatgagatccgattctcctggatctccggaggcctccggagcgagggggccatccgcgaaccgacatggccctgattcatggtcatctcccggggaggaaggttctccggagcgctgcagcccttcggaggctagcgtctcctgatccggagatacttccccaacaggtagcaagatttaatttgataaaattttcaattactatcaagaatttgaagttgtgcgtgtcggtttcaaattggtatatcatatacacacagcagaccccacaaatgcaaaagatagggggagctctcacatttcttacaaatatgtacatattagtttcacctcacatgttagtatgcacacatttaagggagctcaaactcaccctttggaaagtaagttattatcaatctattcataagccttaatcgtttcatcatcaatcaatgatgcaaaaaggtgaagatttaaaatgcatctaggccctccagtggattttggctaattgataaaaacattccatcaagattctacttatgccgataatctagattcttccatagatatatctcctttaaccgagagaatggtgtatttgaataccaacaaacaactatgtagcgtgtgcctagctttaccaacacgatacccataaattatacggaattaggataacaagaatgaacacaagcccaaatttgctctatcatggctggtactccctcctttccaaaatataaaacataatcacccttaacctaaaaactaagaaacaattattatcatctctttgtttgaatcaccccaattaataccatacatacacccaatagaattaaagatcttatgagtataggatttaaaaaaataataatttaggtcagaggagatgctaattaattgcatacatacatgtatgacttatattataaaccaactttaaaaaatagttgtaccctatattttgaaatggagtaagtaattaaggtcgtgttggcccgttggccttgcaggcccacaccaaattgaagttacacacgactaacctcaatgattcgtcaatacgagataccaaaggcattaaagatgtggcgtggcccactctgatattctcaattcaaattaatacatgtcttgacgattctaagatatagtagatccaataatacataaaaggaccataagaccaatacacagaaaggaccatagagaaccaatatgtagaagggcattggcccgatctgaaggaaatttacggttaactttaaaagtgagcggcttgtggggtccaattgcaagatttcaatatccggccagttttaccaccaaattaattccgtataagaattagaatttacataatcatgaattggctaaggatctgattatataagttttggaactataaactctattttactttttctggacagaaatattttcagaatacactgggactgttaattcataacaaaaacactggactgcaaaagggatgagaaaaaaaaacaaactttgtatgcttaatgtaggtaatatccactacatcagattacaaatttttttttcccatgttacctccgaatttcagatcttggttatctaagtgtcaaaacattgttcaaccggtgttctgaatgagctaattaagcgcactaccattatctgtctccactccagtttgcctacttgacaccaacagtttgaatatccttatctgttgctgggagcaggctttccatgacgaatttcagtaatcactaatccagcatcatgtccaatcgcaactctgcaacagtaaggtcgtttcaaaaagaactctgaattaataaagaatgcagagcacatccgtaatgcatacaacgtaccgatagagttcacatgccacatagaagaagatgaaaaacatgccagttacaaatgttaaaaggagttcataaggaaaggtgtgatgacagtttttacacaaatagacaattgcagaaaagacagatcatctacttcataactcaaaaaatgagctgttctgatataaagtaagatctttgaggaatggataaattttaatttcaacaaatttaccgaaattcatgttctcagtcaagtttattttaattttacacttgcagaagttgcagggaagcagtaacattgtcaacaacataacatcaagataaatagtagaatccttttaatcactcaccgttttgaaccctttaagcaaactatagcagtaactttgccgagctcaaagtccagtacaccttccagcctagaagattatggaaaacagtgtcatttctgaaactttttggacatgaaaacatggcaagatcacatctcaaccttatgaagttgtgttaatatgtaccgcaaattaggaacttacttgaaggtagtggcattccacagacgaactgtctcatcatttgaacctgtgagtaggattggcagatctggatgggaacaaacacaggtgatacaatccgtatgtccttcaagtgtttgaacacaagtccttctctgacagtcccagatctgatcagcaacatgaaatgcattagaatgttacttccgcaaaaaacgatcaagagataccacaatattgttcttcagtgaacctgtcttaccttggccgttttgtcccatgaaccagttatcatgtacagctgattgcctcgagtaaagaaatcaaaacaatccactatagatacatgcccagacagtgtgaattcatgacgcgaagaacgtatattccaaacctgtattttttttccattgacaaaagcatacatatatttgtgttaatgacctaaattctcaagctgtatttaccaaattgacaggagggtacctgagcatccatcaagcttgcaacagcaaatttatgtgtatcttttgggttaaatttgatttgatatgctacgccatgggggtcaaatgtcctgatacactcccagtccttgttccagtcccacagcttgatctggtcttgtgagcctactgacagtaggtaaggctcagttggatggacatccaaagttgtgatggtccaactccaagcatgagctttgaatctcttcacttgctttactggggactcatatgtgtaaactcttatgaaaccatcgtgatgtccaaccacgaaccattgctttcgcgcgatgaacttggctgcagtaactgtagtgttggagtgagtaaatcagttagcattgctgtggcacatgtacaagtctatgcatggttagtagtgagtcagaagcatgcctattggtccatatgagccttgaatcaggttccttgtttcctgtggacaaatatatgggcaaatattagtccttgaacatccaaaagcatatttcaacatgctaaaattgtaggcatggagataactttcaatgaatttcactcacataggcaaactttacaacttataacttttttgttgtcattggcagttttctaaatttatagcgggtagtatatatgcttttagacaacagaatatgtttcttttttttttacatcactggcttctatatcagaaatatacgcaaatacctgtcccaccaaacaaacatgtaactagccgattactggacaaaagtttacgtctaaatatttgaattaaaaaaaaagttacacaattttttgcacgcctgctaggacctcacactccatgtgtagccaccttactttctcacatatgaagcagtacctcatgacaacgagataaatgttgttcatttgacttcacctctccaaaacttgtagtgagtatttgatagtactgtacaactttgagagcatgtctccatcaacagtatttgaaaaaaatgaagaaaaatgttttttaaatagaactaagagctcgtgaagaatatttgattccctagatgaattcaaataaaaataaacatttaactagaaagtttaagatatcatcgagagctataattttcgtacaagttttcttttcatctgacgtaatattaaaagctgtaattttttattgaaatgtggccattccttaagagaatcgccgatgaaaattgaactttatgggtggcttcttaagagaatcgcttatgaaaatgttgtattttgttccaggttatttccaaagaaaaccgcatgtgaaattttttcccttattatttgaaaatgacttgattttgaaaattaatagaaaatatattttaagtccaactaaagtgacccaaagctctctgtgatacttaatatttcctttaatatgatcagatcaaaagtattctaatatggttccttacttattaaaagttacctctatgtgagttgacatattatatatcttaagtgaatgactatatccaaggaaatattgaccacatcttattaaaggaaatactgtaggggtctcagataatttttggttcacctcaatcagatttaaaatgattttaatgtgaattttgaaagtttggccactttaaaagaataagaaaaaaaaaggatatgacggttcgtaacgaatgtttgagacattaaaagatctcaaatgaaaaaacatcaaactacaaaattgtattttccgtaaagagatataattataatataaagtttgttctcatccacttcataagaaaaaaaagtgattttttaaataggacccttgccatttttataggcggttaacaaatagatctgagaccttatgatgaatggttgagcccctaacaatatcaatatcaaattaaggcaactaaaaagttgtacatattgtcaacagctaaacttttcatatgaaaagattgttctgatccgacttcatacggaaagattgcgattttgtttacggaaaaagagtcatttcctttttataggcagttaataaatatatccaggaccttgtaatgaatgtttgagctactaaacaatctcaaatgaaaaaaaattcaactacaatgtagatctcattgggagctataattttcatataaagtttattctcatctaacttaatattaaaaaaatgactttttttattaaaatagagttgtttacatttttacagttagtttcttaagagatcagtccatgaaaataaatttttacaggaggtttcttaagaaagctgcaaattgaaataaattgatgtactacctcataaaatcacctaattttcatagacggttttcttaaggaataatatgtggaaatgtgttttaacaggcaattttaaactataaggccaggcttcttgccattattccacctataaaataaagaaagggtgcccacgaaaatattttttaaaagtagtgattgaaatgggttttttcttatatgatccttaaggaggttctgtgagataccataccattttatttttacatgtgcctttggtattttccttgtatagcggtagcacaaattaacagtaaagtagcatatgcagcttaccaagagtaataacttacaagcgtattatagttcaagatgtcaactgagccaaacatattgctcgtcaagatcctgtgtacataagaagaaatttacttatagtaaaagctatagtaacagacattttacagctgcttcaaaaaagatagaaatgtagtagtgttcaaagaaattaaaagataaacagatatctggccctgattttgtggaccctaactttattatagaataagcgcataaccaagtaaaagaacttacataaggaaaaagataatgagaaaacatgaccattgttttagtcatttctcctctacttccctttttcaaaataaaaaaaataaaaaaacataaccattcttttttagaattaaacataaccattgttaaatcaaaatttacgtatcagcgtatgttcccacaaatttttatttttgttttaggtctaaaataatatgggatcatgctaattgccaagtgtagttaacatgaaagtagtgaactaatacacgaacaatttgtccttttcttttggatataaacacaaatcttcgtttcatttgttattatggaaaaaaaactagaacatatgcagtttatctcctcttagaaccaaaaaagaaagactattcacataccatggttccgatggatgcacatctattggaaaatcaggatgttccattgggatgatctgatcaaatgacacatcgactgaagttaacgaaataataaaatgaatgggttttcaaatgttataaaagtatgcaacatgcatggttttggtgatacaaaaacaactaaaacttatttcacctgatcttcctctcggtcctcctctttctctttggaacaagaactgttatggtgatcggcttcatgattttctttggtctcatttaagttcaaatggcttggcaatttgctctcaagagtgacagactcgttgttgtgtgagggtagcttctccaaggcatggtctatcggcagctaaatgaggtccaaattaatgaagttaatagaaattctatcattggtgaataaatatgactttcaaatatatatgcatgttttcctctctgagaaaaaaaatgtaaataattattttgtagtatatagttataaaattgtacactcagcatcgcaggcatgaaaaatgagcaatagttaacaaggttggacctcgataacgcatattaaattattaaatagagcttacttcacatgatttagagcaggttagatggtacaaaactggaattggtcattccgtcattacacttttgattccctaaaaggattactctcatcaaaatgcagttccaagatgtaggggaaatagtgaaacagaggttgttgattcatggaaatcactaatgaaacaaggaatatattgtgaaaatgaatgtaaactcatcccttgatacattatagtttttcttatcaaatagatgacaaatacgataatgccacatcggcataagcaaaatgattcctctgcattatattcctccaggaagaacattgcgctgtagccttttataaacaaaacacacgatagtaataattaattacctcaccaatgatagcttctttctcgttaatttgattgatgatttccactatattaggcctattttccctatcagtctccatgcatttcagcgctatctcggtgcatgtcttcacttgctggcaatatgcttccagtagggaaccattccttcctgtctctaacctagttttccaattccctagtacctgtgcaatcagaataaaagatgaagtactattcaaacgaaataaaatatttcctcagttctaaaatgtttgatgttggttagttcatttttaactaacaaacgccataaaaaaataaacagattgagaagtttagttagaaataaatagggagtagtttagttagaaataaacgttggttctgaactcctgattacttgatcggtaaattcttgagaaggaatttcggtgcttctgaagtgtcctgtaggtccaggtccagcaattatctctagcattacaacgcccaagctgaatatgtctaacttgtttgatatttctttcctctctatgtattctcgtggcaggtatgggctgcacggggacaaataatatgatggatttcatataaatcacatttcttattattagaaaaggatacattcaaatgagttatatattcagcttacattgtcccaacaagagtttttgtagtcatggttttgtctttagtgatgaacctggacaaaccaaaatctgcaattttcggcaccatgttgttgtctagcaaaatattggcaggctttaggtccaaatggtaaataggtggcttcatttccacatgaagatgttttaaaccctcacatgtccctttaataattttgtaccgtataggccaatcaagaccatcaactttatctgcaaaggtaaacaaaagatatatcaatagaatgcaaatacacatgactaattttcttccgagctgaatatgtactccaaccagtttcataatacttgccgagttgtcattttggacaaggatgtggtctaaaataaaatttctaagtcaaacttattaagtttgaccaagaaatatagcaatatttccaacacaaaacatactatcaaaatatattcaatgttagatttaataaaactaatttgatgttgtaaatgttgttatatttttctgtaaacttgatcaacctcagaaaagttcgacttatgaaaaagtcaaagtggcttataatatagaacggatggattataataaatatataattttattaaagtatctttcaagattaagctatacatatattttccatgcttcttaagtaaatattttaaaatttattcatagtcaaagttcaaaacattttaacctcggccttatccaaaacgatagatattatgaaattaggggagtagtgggactttgagcaatatcataccagaaagatagttttcaaggctcccccgaggcatatactcgaagcagagtgctctatgtattgttgcaaccaaaactggtcttcctttgacttgtccatgtgtatgttttatttcatagcagtatccaactaactgtacaatgtttggatggttgaccatcataaggttcccaaactcattttgtaatttcttgtcgtcaaaatcttgcgtatcatgaagaatctttactgcaattttatctccatttttatgctttccctattaaagatctagggtcagtactcaaaacatgataagtttgtgataacatttcacaagccgaaaatgaaagcatcaggctctgtttgttttgtcatcacacttttactagaactaagtttcatgcaacaataaaatgtggtgcagggttgattgctcacctcagtgttatatgtgcatgtattgcaggcttattattatttagaaattagaacccactacaatggtttcaccaattattcacagtaaattggtgtttacataccaaacttgcctttaacttaccttgtaaactgttccatatccaccttcaccaagctttcgctcctcagagaatccatctgtaatttcttctaacaattggtatgctacattagttggattcatagctgaatttgtaacttgtccgttttaccaatatctcctctctgtgtgatgagaataaagagtaataagtttctgagaataaagagtaataatttgggtaattttactatgcttgataaggtactgggagatgttatattttctagtgtcaaacttgatacctccagctaccatatatctcaaaataataaaattttgatacttacaaatactttcttaaataccgtaaaattttcctaataatttactcgttttatgagaagagaaagactggagttaacagtagcactctaaatcttgaactgaaatttctcaaagcctggtttatggcattgactaaatgtgaatgaagggattaaagaaagttcaaaatgagccccgagatatgcatcatttggagaaaaatcaagtgaatttcgactagttttcttactcccaacaactcacttcggaactcatagccacggcaatgtgtaagaatttgagtgagtactagtggagaaaatcctagccttgtattaaaagggaaaaaaaaggaaagaaaaagaaagaccagcaggccaagcttgcttatccatcaacagagacacaccatcagtaaccaacattccatcagaccaatgtgaatcatgaatcaaatgtaaaagcccaagctaattaaggagcaattgaacaaacagtactgcctgcacaggaattggaagcagtaattaattaattaattagcactaacctggagagagataactgaagatcgacctagctttcgagaggctggagaggagaaagtagagacgggatcaggctcaactcaatctatcgcaggagatgagatgaggagatgattataaactgcagtttacgccggcgccgtagacgacgagccagctgtaacgccggattgcttgactgattgattgtaccttctgatgatcagttcatggaccacgatcgagcaagttgaaattaaggacatctagggcacgcgtatacagtacagttatcttgtccaaacctgcatgcttattctagcttgctattccctcaagtcccattttaagtatagttgtgggtttctatgtccaatgtttaatcatttgtcttatttaaatttttttttaaaaaaaataagttaagcataaagtattattcatgttttatcatctaataataatatagatactaatcataaaaaaatttaaataagatgaacggttaaacgttggacaataaacccacaattgtatttaaaatgagacggatggagtacggattagtagtggtcattggccaagaaaatccgtagtgccaaaggatgagatggctaggtggggataattctgttctctatggaatcctagatttgtcaccaggtgtacctttttgttttaggaataaaaaccactcctgacaagtttgccgaaaacagaccgacgtctgatggaagcagtaaaaaccgatgacttttgatcaaaataattacccacagcccaacattgcatggctcgtgagttgtgatatatacagggcccagggacagggacagagctagaacgaaatggtgaaggatggcacttactttactctactttagactaattttagactgatatgaacacttgagtttggattgaggtggtgcatatatgatgaaaatagacgaattatagctaaaaatattttcttgatcagatttctaggcaccccctcttctacctagcttcacccctgaaaatatggcaagcctaatttactctgctgaaaaaggacggtactactatcagggacgggagatcatgattttagaaatacctcatggtttaagccttaaattgaaaaaatatatcttatttaatttttcatcgataagatattagtgtaatgtttgaataccactatcaaaaattatgtgcccgctctgatactactaagaaataggaaaatgcatatcacattcacatatggttgcatcggtgctgctactagtagctagtggaagttgaccgtcgacgttgagcaaagcgtgtgggctgcaggacttggattggacggtccaagaagacgaccggcctaacataacagcgactgcagcagcagccaacaagcagctgctctctgcagcagtgtgtacatacattcaaaataaaacaactgctgtaggattttgggctgcagccgatcggctgggctggacagctgcagcccaaaatgccgcaggcagctgaaccgatcagcccttgtattaattggatgggttgggcctattacttactccctccatcttaaaagacagtcatgagttttttgtctaattttgatggttcgttttatttaaaaaaaatagtatttttgttgttattagatgataaaacataaatagtattttatttgtgacttatgttttttaaattttttcaaaaaaagttaaataaaacgaataattaaaattgaatacggaaacttatagctacgcttaaaatgagacgaagggagtagttggaagtatctgttgacttcctatttacctcacgggataacttctttcactgattgaagggcttgtaatggcttactacaagagacacaaaggtaacctcaagaagaccgtcactagctgcaactaatagtatggctacttgtcgaataaaaaaactaaagaaactggaatgtccgaataccattcgtaacccaaatcaaagaactcgaccccaggttcattttcccttgccttttccttaaatactagtatgattttgaggaagaaattttgttgtaatctgtgatcacttttgtatttgagtatcatacagatgtctatcagaatctctgctaccacaaaaaaaaactttagtggtggtggtgagtcgtgaacaatccaacggttgaatattttcctaggatccttgtcatcaccgcaccagtcaacgcccctcccagagccatgggcggtggaaatcctagctcccaaagttggcgtcattgtcgcaggcgccaccgctgtcaccgcagctccccgcaccggatctatcatcgtcaaggtcatccacatcgctgaggtcccagtgcctaatccgccgccgttgagctccccatcgaattcagcgggtcccttaaggaggcgcttgcgaaaatcagattcttacatatggcttcttatgaggcccacttgcgaaaataactttatttttatgtatggtctcataagatgaccacattttagcaagcgtgacttgacccaccccgggtaactgattgttgcatgtggacgaccattacagctcgcctagaacctgtagtgggcctcgtccgcaaaaatcaattctgttgatagatatagaaacaatgctctactgaagtacaacttttacatacacatatgagctaactaacaggagggccaatgggtgcgttgttgataaatacattatttttccgttgcaagagcacccagaaatacaccatatctctgtaaaaaagaagttctaaaacaaataaaataaaaccgtagagaggaacccgatgatatataaaatcaaggaaacttgtcctacttgatactagatgaagaacaccgacagtgcgtcgagcagatcgtcggtgatctcctcatcctcctccttgtccacgacccagtccaacgccatggctttgtgcaagtcttccagatcacgggggatgtaggtggcagtgagcacctcctctgacttggtctctctatcgctactcgcatctgcgccaccgatctcctcttccattctagggtttcgtggatggggtcgaagcacggcggggggttagggaaagcaagttttcgaaatcttgacacgaggaaagtgggtgggagacgtagaagaaaagcaagggactctctctctctgggccggaccggtatggcccactagagtagcgagacacaaggcccaataagcgccaagttttttctttctctctcttcctctcttgatcgactatggaaatcaaagcgccgtttgttccatttttacatgcgcaatcacaacaatgtttattttgctttagggtaagtacaaatgatatggacttttagttaatactcatgtagaggatatcattctacaataattgagacaacaaaaccttttataaccattaatgcaccaatataatcttttattactcttctttccttttcacaaccccaaatgtttcctttaatatatgctaagagtcgattgtaagccatgattatacatagcaatgatatttctcttcgttttcttctctcttctatgttaccaaatttatttgcgtggcaatggagagagaccgtcaataaacatcattgtacataccattaagatgatggaaattatccttcatcaccaatctgatggaaaatatatctctctatatctctacttaaaaatggagtcatcatccttcagtcatatccttccaccgtgtgcatgcacgcgtgtgtatatacatagccattagatctaatgttttattcacaaccacacttatatggacctggcccgttacaacgcaggggcatgttgatagtatactaagtggagtcgtcttttccccaacatcgtactttcgcaaataaaagacttgctaaaaaccatctcatcttaaaaaaaacaatagtgttttctctactccttttaaaacagagttgttttcctccttcccaaccatcttagtttcccaaataaaaaaccgtctcaaaaaaccacctcatccaaaaaatacaacttcaaaaatggagttgtcttcttccttccccacaatcctactctcctgaattaaaaaaaccatctcaaagaaaccaccttataaagaaaatgacaatgttttctatactactaaaaagtggagtcgttttcatccttcccaatcatcgtagttccccaaataaaaaaaaccacctcatccaaaaaagaaaccatatttgcacgcgaaaatcaaccaaaaaactagattaaaaaaacaaaaccctataattccaatctttttttcatcccttctcccaccgcacgcgtagcacatccatcctctccttctcgtattgtgtgcacaaccaatgcatgaatagaccacgtgccatgtcttttgattttatattttcatttggtatcaataatttggttttctgaattggtatcggatttgagttttttaactggtatcaagatttaatttgatattttttttcattagcataaataatataaagttgtgtgtgttggtttccaattggtatatcatgttacacacaacacacctcatgaatgcaaagagataggaggagctctggcatttctcataaatacgtgcatatgagtttcacttcacatgtccataataacatttaggaggtgctcaaactaaccttttcggattcaaagtcaaatattatcaatttgtttgtaaactttaatcgtgttgtcatcaacaaacaccgtaaaatagatggaaattgcaagtgcatctaggccccatattggattatggctaattgatgacaacattccatcaagattctacttatgctggtaatctgaattcacccatagacatatccctttaactgagagaacaacatatttgaataccagatgactccgtggtgtctgcccaactttatccgcacaatacccacaatttatatggagtagggataacaagaatgaacacaagcccaaacctttcgctgtcatggctggcaagaaattaaagtcgtgttggtccttggcttttatgggcccatgctgaattgaagttgtaccgactaatctcgaggaccactcgtcaatacgagataccaagggcattaaagatgggtctttggctccattggtggtgtggcccactctaatactctcaactgaaattaatgcatgcttcgacgcaatccacaagatacagtaggtccaatacacataaaggaccatagagaacaaatatgccttggtacaatctgaaggaaatttacagttaactgcaagagcgagcgggttgtgtggtccaattgcgagatttcaatatccggttagttttaccacaaaattccgcataagaattagaatttacgtgatcatgtattggctagatctgattatataagttttgaaactataaactctgttttatttttgctcgacagaaatattttcagaatatgctgggactgttaattcattcaaaaaagaaaaaaaagcactgggatgcaaaaggaatgagaaaaaacaaagtttgttttcttaatacaggtaatatccactacgtcagattacaaaactttggttatccaagtcttctctccacgttgctcatttagtcttctgaatgagttaattaagcgcagtaccattatctgtctccaatccagtctgcctagcttgacaccaaccctccaacagtttgaatatccttatctgttgctgggaccaggcttttcatggcgaatttcagtaatcactaatccagcatcatgtccaatcacaactctgcaacagtaagatcatttcaaaaagaactctgaattaaataaagaatgcagagcacatccttaatgcatagtgcatcatacatctttgtagtcacagaagaagaaaaaaacatgccagctacaaatgttaaaaagagttcatatggtaaggtgtgatgacagtttttacacaaatagacaattgcagcaaaggcagatcttctactttaaaactcaagaactgagttaacaaatttgaggaaaagataaattttaatttcaacaaatttatcaaaattgatgttttcagtcaagattattttgatttacacaattgcacttgcagaagttttatcagggaagcagtaatattcccaacaatctaacatcaagatgaataccgttttaattactcaccgttttgagcccttcaaacaaattatagcagtaacttgtccgagctcaaagtccagtacaccctcaagcctagaagattatgaaaaacaatgtcatctctgaaactttcggacagaaaaaacatggcaagatcacatctaaatcctagaagttatgtgttgggcgcagttagatgtacttacttgaaggttatggagttccacagacgaactgtctcatcatttgaacctgtaagtagtattggaagatctggatgggaacaaacacaggtaatgcaatccgtatgtccttcaagtgtttgaacacaagtccttctctggcaatcccagatctgacataacaagatgaattgcattgcaataatatttccaaaaaaatgatctcaactcctatgaaaatattcttctttagtgaagatgccttaccttggctgttttgtcccaggaaccagttatcatgtacagttgattgcctcgagtaaagtaatccaagcaactcactatatatccgtgcccagacaatgtgaattcatgacgggaagaacggatattccaaacctgtatttttttttcattaacaaaagtatacatatgttcgtgttaataacctacactctaaaattgtgcttaccaaattgactggagctaaacgaaaataagaaataaaaattcattgtacctgtgcatccttcaagctcgcaacagcaaatttatgtgtatcttttgggttaaattttatttgatatgctaggccatggaggtcaaatgtcttaatgcactcccagcccttgttccagtcccacagcttgatctggtcttgtgagcctattgacagtaggtaaggctcagttggatggacatccaaagttgtgatgttccatacatgagctttgaatctcttcacttgctttactggggactcatatgtgtaaactcttatgaaaccatcttgatgtccaaccacaaaccattgctttcgcgcgatgaacttggccgcgataactgtagagatggagtttgtaaataagttagcattgttgtgatttgtgacactatgttaaagactatgcatgatcagtagcaagtcatgaagcatgcctagtggtccatatgagccttgaatcaggttcactgtttcctgtggacaaatatatggggaaaaaatcttagttcttgaacatacaaaagcatatttcaacttgctaaaattttaagcatgagataacttatgatgaattctatttacagtgtgtatagtatatactcccccggtttcatattagttgtttcacttttttcttagtcaaacttctttaagtttgatcaaatttatagcaaaatatagtaatattttcaatacaaaacaaacattgtatcaaaatattttcaatgttaaatttaataaaactaatttggtgttgtggatgttgctatttttttctataaacatgatcaaaccttaaaaactttgattaagaaaaaagtcaaatgacttatagtatgaaacggaggaagtatatttttaaataacaaaagatgtttcttttttacatccatggcttctttatcagaaatataaccaaatattagtccctcgagaaaacatatatctaaatatttgaattaaaaaacaagttattgagaaacctaggacctcacactccatacatagccactttactatcccatgtactatgaatcaccttgttttgcttacaatatttctattagtatggttattcagttatgtcaagttacctctatgtgagttgacatattatgaaactagatattagtgaataactatattaaaggaaatattgacctcataacattaaaggaaatattgtaggaatcccaaataactttggttgacctcagtcagaattaaaatgatttttctaagaatttgtaaatatcaagcattttcaaagaataagtaaacaaataataaaaaaaggatatggaggcttgttacaaatgtttgagcccttaaaagacctcaaatgaaaataaaaacattaaagtacaaagctatctcaccgagagtcataattttcatataagtttgttctaatccaacttcatatgaaaaggttgtgattttttttttttggaatatgattgtttccactttttacaggtgattaaataaatagatttgagacattgtaacaagtgtttgagcccctaaacgatatggaatgaaaaaacattcaactatatcgttgatagataaacttttcataaaaagaatgttgttttcatccgacttcatataaaaagttatgatttttttttcattgggatagggttgtttccatttttatatgcggttaatagataaatatgagaccttgtattgtaatgaatctttgagtccctatatgatctcaaatgaaaaaaaaatcaactacaatgtagatttcgtctagagctataattttcatataaagtttgtctgacttaatatgaaatagcgaggatggcacccacaaaagtagttttttagtagtgaatgaaatgaggtcctttttcctgatccttaaggatattctgtgagataccacaccagccattttgttttaacatgtactacttggtattttcctagtatagcggtagcacaaattaacactaaagtagcatatgcagcttaccgagactaaacttatacctgcgtattacagttcaagatgtcaactgagccaaacatattgctcgtcaagatcctgtgtacataagaagaactttacttatagcagatgttttacagctgcttcaagaaggaaatatagtagtgttcaaagatagtaaaagagaaacaggtctaacctgattttgtgtaccctaactactattgtagcataagcgcataaccgagtaaaagaactttcataaggaaaataatgagaaacataaccattgtttaagtcatttgtcctctacttcactttttcaaataaaaaaaaacataacaattgttaaatgaaaatttacacatcagtatatttccccataatttttatttttgtttttagctctaaaataatatggggtcatgccagttgtcaagtgtatttaccatcaaagtagtgaactaatacacaaacattttttccttttcttttggatatacacacaaatcttggtttcgtttgttattatggagaaagactagaacatatgcagtttatctcctctcagaccccaaaaaagaaagactattcacataccatggctctgatggatgcacatctcttggaaaatcaggatgttccattgggatgatctgatcaaatgaaacaacaactgaagttaacgaaataataaaatgaatggtttttcaaatatgataaaagtatgcaaccggcatggtttcagtgtaaaaaaacagctaaaattaatttcacctgatcttcctcctggtcctcctctttctctttggaacatgattcgttatggtgatcttggttttctctggtctcatttaagttcaaatggcttgccaatttgctctcaaggttgatagactcgttgttgtatgagggtagcttctccaaggcatggtctatcggcagctaaataaggtcaaaattaatgaagttaatataaagagtaaatttcataaaaccctacctattatggtccaagtttcacaaaaccagatgaactttggcacatggcacataacctcaggtgttatggtcttaacgtttcacaaaaccacattactaaccattttgactttgatctaccacacttttgagttctacaatcgcatctcaaaattatgagcattttatccatcatataaatgttacaaccgcctttactattttgatgtagcaatatgtcaaaatggtaaacggtatggttttgtgaaactttaggaccataattcctgtggttatatgccacgtgtcaaattttatgtggttttgtgaaatttagaccatattagatagagtttgatgaaatttactctaatagaaatgctacagtcggtgaataaatatgagttcaacatatatatgcatgttttcctttcagaaaaaaaatgcaaatacatgtttgcgatacctagctatgaaattgtacactcagcatgatatgaagcaggtttgatggtagaaaactggaactggtcattacacgtttggtcccctagattgattactgtgataaaaatgcaattccaagacgcaggggaaatagtgaaacagaggatgttgatttgtggcaatccctaataaacaaggaatatactatgaaaatgagtgtaaactcatcccttgatacatcataattttttttgagtaaatcattatattatcaaatagatgatgaatacgatactgccgcatcgacgcaagtaaaattattccactgtattcgtttatgaaggacattgcactgttacctatttataaacaaaacacatgctagtaatgattaattacctcaccaattatatcttctttctcattaatttgattgatgatttccaatatattaggcctattttccctatcaatttccaggcatttcagtgctatctcagtgcatgtctttacttgctggcaatatgcttccagtaagggaccattccttcttgtctgtaacctgtttttccatttcccttgtacctgtgagattagaatatatataaagatgaagaactattcaaacgaaatagaatactcccttcgttttgaaatgtttggcattggatagttcatttttaactaaccagcgtcacaaaaaaaacagagagttgtttagttagaaataaacgttggttctgaactcctgattacttgattggtaaattctagggaaggcattttcgtgcttctgaagcgtcctgtaggtcctgcaattatatctagcattacagcgcccaagctgaatatgtctaacttgtttgatatttctttcctctctatgtattctcgtggcatgtatgggctgcaaagggacaaataatacaatgaatttcatataaatcacatttcttattgttagaaaaagattcattcaaatgagttatatattcagcttacagagtcccaacaagattttttgtgatcattgttttctcttcagtgatgaacctagacaaaccaaaatctgcaatttttggcaccatgttgttgtctagcaaaatattggcaggctttaggtccaaatggtaaataggtgggttcatttccacatggagatgttttaaaccctcgcatgtccctttaataattttgtaccgtatgggccagtcaagaccatcatcttcatctgcaaaggtaaagatatatcaacagaatgcaaatgcatatgactaattttcttccaagctgaagatgtactccctccagttccatagtacatgtcgttttggataataacgtagtcttagaaacacttttttttttctaaaccaaagtttttaagtttgatcaagtttatagaaaaaatatagcaatatctataacataaaacatactataaaatatatattcaatgttagatttaatgaaactaatttgatattgtaaatgttgttatattattctataaactttatcaaactcagaaaattttgacttagtcaaagtgacttataatatggaacggagaaagtacaataaatatatgatttcattacagtgtctttcaacattaatttatacatttagtttccatgcttctaaaataaacattttaaaattcattcatagtcaaagttcaaataatttaaacttagccttatccaaaacaacaaatattatggaattgggggagtactaggactgagagcaatgtcttaccagaaagatagttttcaaggctcccccgaggcatatactcaaagcaaagtgctctatctatggttgcaatcaaagctagtcttcctttagccagtccagttgtatattttatttcatagcagtatccaactaaccgtataatgtttgtatggttggccatcataaggttcccaaactcattattgaatttattatcgtcaaacccttccgtgtgaagaatcttcaccgcaattttatctccatttttatgctctccctgttaagtatctagggtcagtactcaaaacatcataaaagtggtgcagggttctgtttgctttgtcgttagacttttactagaagtaagttttatttgcaacaataaaaagtggtgcatggttgattgctcacctcagtgttatttgtgcaaaacatgcagtgcaggcttattcttatttagaaattagaacccactacattggtttcgcccattattacaataagttggtttacataccaaagttgactttaacttaccttataaactgttccatatccacctttaccaagctttcgctcctcagagaatccatctgtaatttcttttaacaattggtatggtacattagttggattcataggtgaatttgtaacttgtccgtgttaccaatctctcttctgtatgatgagaataaatagtaataagttttttagaataaagactaataattagacaagtttagcatccttgagaaggtatcaggaggtgccacattttatagtataaaacttgatacctacacctatgaggtatctcaaaataacaaaactttggtacttacagatagtttgtcaagtgctataaaatttccctaataatttactcgttctataagaaagactggagttaatagtagcactttaaatcttaactgaaatttctcaaatcctggattagggtatagactaaatgtgaatgaaattaatacagagagaaagttcaaaacaagccctcagatgtgcatcatttggagaaaaattgaatgagtttttacctagttttgttaccccaacaactttcatctgaactcatagccaaggccgtgtgtgaaaattcgagtgagtatactagtggagaaaatcttaggctttgtattaaaaggcaaaatgaaagggaaaaaaaacagtctctacagtgctctctatgggccaacggaagggttgtatgtgaatgtgccaatggagcaatgatggacgtatcatacgaggcttgcaaatgtgagatcgattcggttgtgatggactctgttttagaaaggagaaaaataactaatgaacgatgatatgggaagtactatcataccctcacaaattgacggtgtagatcgtttctactactatagtagagagcaccgtatataaagactcaaaaagaaaaagaaaagaccaatagatcaagcttgtctatccatcaattgagaataccatcagtaaccatgataattaatggccaagttcatcgatcgtgaagcatacgacttaacttaattaggctcctaaatctagataaaaaaacccaagctaggagcaattgaacaaattgcatgcctttcactggaagcagtaactaatcaattgatgattaattagcactaacctggtccacctggagatatatttgacgatcgcctagcttctcgagaggctagagaggaggagagatcaggctcaatctatcgcaggagacgagaggaggatgagatgattatataaaccgcactcaggccggcgccgtagacgacgaggaggagccagctgtaacgcagatttgctgcaggattgcttgactgagggtgggttcaattcgcgaaaagaaaaatttttaggtgtcatatcgaacatcggatgtttgatcagatgttgaaaggggttttagacaaaaataaaaaaactaattttataaatcactgaaaaccgctagacgaatcttttgagcctaattaagccatcattagtacatatgggttatggtagcatttatggctaatcatgaactaattaggctcagcccagaagattctcctcgcgatttccatctaaaatgtgcaattagtttttgtttttagctatattaaatacttcatacatatgttcaaagattcgatacgatgtttttagaaaaaaaaatttggaaaactaaaccaggcatgactgactgaaagtaccttgtgatcaagttgacacatttatggcacgcgtatacagtgcagttagcttgtctaaatatgcatgacagtctatctaagagtctcatcttttcacttatacttattagccaaaatttaaattttaaaccttaaatttgaagttgattttggagggttttcattgaagtttattttttaacctttatttttatatcactaagaacatgtatataaaagttttattcgtaaattatttttcatttgtaaatataccgttttgcttactaagggcctgcttgctacggaatagtagtactgatcaagaaaatccgaagtgccgaaggggatacagtaggcatgtgtgaccagatggctaggtgcatttatatatgttaaccatgttcattacggttgaaatcctagatttatcctgatatatatccaccaattttaagaaaaaacatatactccccagttctctttaatttatttattatcacttttaaccataaatttttaaccatcaatgtttcaactttggttattaataacttttagacgataaatttattattattgaaagtttatggttgtatctatacaccttttttttttccaatgtacgtccctatgttatagaaagcaagtcgatatagcatacgggtaaaacagctcatatccttgaactaaggtactagttgttgaaactgaaaagtatacgtatgcacatttgaaatattaaacataaattaataataaaataaattacagattacacctgtaaactgtaagtattaaacctaattaatccgttattaacaaatgtttaatgtagcatcatattgttaaatcatggcgtaattaggctcaaaatattcgtctcgcaatttacgtacaaactgtgcaattggtttttttcccacatttaataccccatgcatgcatccaaacatttaatgtgatgtttttggccaaatttttttagatctagataagcctatatattgtttaggattatacacgccgcatgcactcttgaccctctaaggatccattatttggtgccaccgacaattctagcatgtgtatagaaaatcacaattctccactggacggtccaagaagacggctgacctaacatatagcatggcgagcaagcatgcacactgtattaattggatgggtctaacttagttggaagcatcacagttgacttccagcttgtaaatatgattctcagaaaaaaaaatacttgtaatatttgatcacttttgtatttgagcatcgtacatatgtactatcttcattctatttttgtcatcacctagacaaagagcgcagggaccaaggacaactaaaaattcatcattccgtaattaattctcatcggttaaagtaacacgttgcttcgtatttcatgggttgcatcaaattttaaatatattaggtagttgtactaatacgaattaaattagggcaattttttttctaccccactttaatgtccaatattgattttactcttactttttagggttttcgtttttgcccatacttttttgaaccgaacaatatttttacccctgttttgttttgaatagagaagttcacggtattaactacatggcaaaaagatatttataccctctcctatctctattcatgaattgtgtttttctctattttatgcatggctttgaaaatttatttttgtgaatatgtttaaaattaaatgacctatattgactaacataacaatttggacagattctaaatttgatggaattttgacaaaatttcagcagcattttgatagaaattgaacaaactttgaaaaaatttcaagaacattttacacaatctcggccacctcctccaagccccctgccagtcgccgcctagacccctcaacgccgtcgcctacccctctcctcgccgccgcctagcgcacgcctcctgctcgccggcgggaggggctgcacctggtcgcggcttgctcgccgacggaaggggttgccactggtcggcacccgcttgccgactcccgctcaccgccgcctatccctctcctcgccacctagcccgcgcagagcgcgctctgctcgccgatgggaggagctgcgcctggccgccacctgctcgccgctgccgcctagccgatgcccacgtgctgtcgcctacccctctccccgccgcctagcccgcatacagcgctccctgctccccggcgggagaagctgcacctggctgccacctgctcgccgccaccaccaagccgatgcccgcgcgctgcggcctaccctctccccgctgcctagcctgcgtagagcgctccctgctcaccggtgggaggagctgcgcctggccaccgcccgctcgccgccgcctgtgcggctgtgacatcctgacccaattaggatgaggcccttgtgagcttgtgcgcatgtttagtaccacattgctagtttagcaagtgtggaaccgacttataaggccttgtctctccaaccatgccactctcgggttaactattttacacgaagcgaggacgaaaatgtaagtggagtggtatgtgtaagtggacccgtccgtcgaatgggctggctacatggttctggagggagggctgttacagccacctggatagtcttagatagacactcttagaccctttttctcgtaatgaaaaggtatacaaattcaaaaaacctttatttcctttatttatctatttctttactatcataaacccggttctttactaccataaaccccgtcccactcacttcagtctaaaccaggggtaaacgtctcttttggtaaaaaaaatagtggtaaaaataaaaaccctaaaaaataggggtaaaatcaatattggacatcaaagtatcagaaacaaaattgtcccaattattggacattcaataatgctcatttactctttacacagataaataaatagacatttgttagacgacaattgctttgggaagacctcaaaaccttatgtcataatcaaactgggataggagtactcggtaggtcagaatatacaataatgccgtagtaattggtccttcactacttctgttcagtcaactgtaaactgctctcggctggtttgcgtacgaagttcagttttgctttccggaagtcaaacggtagggacaagcgagaaaatcaacgcgtaaattgggggcaagggctatcgatatgcaatcgtgagaacctgaccggaaatggctggacaattgtttgaatttataagagtttatcaatatggaacagcgtgagccgacctagctcagtggtagagcgcgtggcttttaaccacgtggtcgtgggttcgatccccacggtcggcgactatgtttatttgaacttaaatatcttttttattcaaatttaaaatttaaatttccgagagcttcccaatatgatgatcttgtttcacatgacgaaccaatctcgcaaggatttgcgcgacgcctcgcctgatcacagatcagttggattatggatccttgcacgaacgaatcgtgtagcgcaatgagtaaagcatgactgcatgagcataggaaaaatagtcttaaaaaaagaataggaaaataaaagaaaaaatatgtattcgaaacctcattagcagaaataacaaaaaggaaaacgtacagtagtattactaccgatgaactgcattttgtttttaatccaaaagatcgtttttgtttttttagaacaaaagatcgttcttgttgtcgacatgtttttccaatggtatatcagtcaaattcttactgttctatacgctttaatatttgtgtgctttcatgggccagctagacatagcacacgggcctgcaggtgtcaagataagggaagatcagctgaaaggcctaaattactggatcagcgagagttctgggctgcatatacagttgggtacttgggttgccaaacttctacgatgttttagtatatctatcatcaattggtacgttacagtgagtatttacaatgttctttttattaacacagtaaaaacacagatgcccgcgcacactcacttttatgaatacacacacgcatattttatctatatgagcacctttcaaagactatgtcttgagattaatgaattcgccacaagcgactcgttgtcgatgaatatgtatgaatatgtacctcccactgaaaaaaattaactttgagtacttcctatgtttaataacatgaaagtttacattttacagtggatattttgataatattcattgttttttttaaattacatcatagcatatgaaatttaattcatttgtttcatgagcaaatagatgatgagcctcattgtttggcttatgcttatacatataaaccaaaatttaaattttaaaacctaatttgtagttttttattgtagtttattttatattatttgcttttaaatcattaaggatatgtatataaaagtttcattcataaattatttgttggttgctgataagcagtttcaataagcataaacataaatgaaaagatagggctaagcatatacgagattgatgactttttaaatccgttcgcgtattcatgttttttagaaatatttatgaaaatagataaacaatacaaggcgcacttaaacatactttagatgatagatatagtggtacctcttttcacttcacctaatccggtttaaaaataattatcattttgaacaagactgatatcaaaatttaaaactttaactataaatatttctaaaatatttgtgtagcaaacatggagagcatatacattaatcttaaaaagtactccaataaaatcatgcatatgttgatatttctatatattgtaaaaaaaatagtggtcgaagttatttttagacaatttcaagatgacaattatttttgacccggagggagtaattgaataaatgatgccggtcaataaaaatgagaaaatggtcaattgtgtcatataggaatatctaaaaaccagagggagtatttcctacttggctgtacgcctgtgccctgccgtattcttttgttatattgctcttctgccaaagtgccaagttgtttaatatcgtgttcttttgttaaaactgctcttctgccaagtcttttgtgtttaaagttcacaacatctcactagaggattttgtttcagatgatgaatcaattcgttttagatccttgaagatttgtgtgacacctggtcacatattaattaaatggatcgcgtggcgcaatgagcaaatgagcaagataaaagaaaatgactacatgtcatcaatgtaatcacaatcttcaattcgaaagattctgaagatgagcatggcgacctgtgtactgtgagctaactctgcactgatgttctgatgctaaagtcgtgtattgttaccatgaatctggttctaggaaaagcatagatcattcttgattgctggcatgctcctcgtgaacaaattaaaatgaagattatagaagctggtcgatctagagaccttgaaagctgaaacattccaggaccaatatctagagcaacatcctgcatcatgtaacacgatcctctaatataaagtcaaacactcaaaggagcatggttactgatatgtgagcccgatgttgatgggtcccacatgatagtgatcacttgggcatagtatgtcagaggattctcttcccatgcatcatatatgcatcatgctgtggggcaaggagagcaagagggcagggattgaaatttcggtaatttcaaacctccccccgccataacaatatcaaattttcgggttttctcaattttttgtgaatttagtcaaattcagttaaattgtgtcaaaatttcagaaaatttcgctccaaaaattaccaaaatttcggacatttcgattctactgaaagggctgaaattttagccaaaatcgaaattgaaaaccctgcaagcgggtagctcttttagctgaaacggttggtatctattctgactgccatagtggtaacactcataggattaactaggtaataccccgcgctttgctgcggaattcataaataagtatatattaaatattgttgaaatgatgaaagttgaaatgttgagaaaataatatgaggaagatgatttgacacatacttattaatctctataatataatattgtagatgatgtgccatgtttgcatggaatttaaaataggttagaatagtaattgctagtgagtgaagatgtggcatgcttacatgggatttaaaatgggctagaatagtaattgctagtgggtgatgatatggtatgcttacatgttgagctttaccttctaataattgttagtgggtaccaactatatagaaatatatagaaagatagatcagcatatggctcaaatatagtgcttctgaacattgcataagggaaattgtgaaaatcttctccaaggataactttttaagagttcctttcagccaactggaagggatggggtgaattcattcaaactagtcaatcatggttatgacgggaacatatcctatgcatataaatttcccgtgcacactccatacacactaattagcaaatgccacgaaacattctaaaaaaaaattggacatatactcctaatatttatgcatggttcccttcttggagtacagcatacctttgctggtttgtctctccataacgagttcaacacagcaaccaaaggaagctgtgcatagtgagtgtcactctccaaggtcacaaatgggttaatttgttgctgtgattgctatcaagcaaatctgtttgtttagtgtcgaaggaaacgaaaccgtcattagttttggagcaccgtgtatgagaatttgcctttaatttgcaccactcatgcggaagataaatggagcaccaaatgacccaaaccttgcgcacacgctggctctggcctatataaaggcattacacaacccatgaacaatttaccagtacgttcaccaccatggttagctcagctgcctgcttcttcttcttcttcttcttctcccggctcatcaccatctacttctgcttctctcccatcgcccacgcacggcatccggtgaacccgagcaccggatgccggcgatggctgcgtgtgcaaggagagggacgcgctgctggatttcatgcgtggcatcaacgacgccgacaacaccctcgcctcgtggcaatgggagaaagattgctgccggtggattggcgtcacctgcagcagcaaccgaatccgaatggccggcaatgtcatccggcttgaactctctgaggcttctttgggtggccaagttttgcaaggccggatgagtccttccttggcttctctcgagcatcttgagtacctcgacctcagtgctctcgtccttccgggcatcaacagcagtagcccaaagttcttgggttctatgacgaacctgagatatcttgatctctctgggtgttttctctctggtagtgtgtctccttggctcggcaacctttccaaattggagtaccttgatctctctttctcaaccttgtcaggtagggttccacctgagctcggtaacctgacaaggttgaaacatctggaccttggtaacatgcaacatatgtactcggcagatatctcatggattactcatctgcgatccttggagtatcttgacatgagcttggtgaatctgctgaacacaattccatctttggaggttctcaaccttgtgaaattcacacttcctagtacaccccaagcactcgcgcaactaaacctcacgaaactcgtgcagctcgatctctcgtcgaacagattgggccatccaatccaatcatgttggttttggaacctgacgagtatcgaatccctcgagctctctgaaacatttcttcatggtccgtttcctaccgcgctaggaagtttcacggcactccagtggcttgggtttagtgataacggtaatgcagcaacgttgctagcggacatgagaagtctctgttctatgaaaagcttgggtctaggtggtagtctatctcatgggaacatagaggatttggtagacaggttgccacatggtattactagagataaaccagcacaagaagggaattttacaagtttgtcttatcttgatctttctgacaaccatcttgctgggattataccatcagatattgcatataccatccctagcttatgtcaccttgacctttctaggaataatctgactggacctatacccataatagagaactctagcttaagtgagctcatcctccgttccaaccaactaacgggtcaaataccgaaattagatagaaaaattgaagtcatggatatctccataaacttgttgtcagggcctttgcccatagatattgggtctccaaaccttctagcactaattctgtcctctaattatcttatcggtcgaattccagaatcagtttgtgaatcacagtccatgattatcgtggatttgtccaacaattttcttgagggagcctttcccaagtgttttcagatgcaaaggttgattttcctcctcttaagtcacaatagcttctctgctaaactcccatcatttctccgcaactcaaatttgttaagctatgtggatctatcatggaacaaattcagtggaacattgccacaatggattggacatatggtgaacttgcattttctacaccttagccacaacatgttttacggtcatattccaatcaaaatcacaaatcttaaaaatctccactacttcagtttagcagcaaacaatatatctggtgcaataccacggtgtttgtcaaagttaacaatgatgataggaaaacaatcgacaataatagagatcgattggtttcatgcgtattttgacgttgtggatgggtctcttggaagaattttctctgttgtgatgaagcaccaagaacaacaatatggtgatagcattctcgatgtggtgggcatcgacttgtcactcaatagtttaactggtggaataccggatgagatcacttctcttaaaagattgctcagtttaaatttatcatggaatcaattgagcggagaaatcgtagagaagattggggcgatgaattcattggaatcacttgacctctcgcggaacaaattttctggtgaaattcctccaagtttggccaatctggcatatctaagctacttggacttgtcatacaataatcttacaggaagaattccacgaggaagccaactcgataccctctatgccgagaaccctcacatatatgatggaaacaacggtctctatggtcctcccctccaaaggaattgcttgggcagtgaactaccaaagaatagcagccaaatcatgagcaaaaatgtttctgatgagctaatgttctactttggacttgggtccgggtttacagttggtctctgggttgttttctgtgttgtattgttcaagaaaacttggagaattgccttgtttcgcctctttgataggatacacgacaaagtatatgtgtttgtcgccataacctgggccagtattggtagagaggctaccacagattaataggtactactacgaagcaacaaacagtgattttgctaccagggaaccacactaaaattgggttgggtggaacgaataaacaaagatagtatcatgcaatgaatgttattctttgtatttatatgaacacattaaaattttgtaataatttatagggattggatcttgtgtaatactatatggtttgggatcactaatacatttgtcgacagatgtaattatagtacaattgtgatgtaattacactgtaacattctatttcggtgacgaatcctctcacatgtgtgtgcggtgtgaatttttcccttcctcactttgtacaaatcttgaaacaaatctaacggtttaaaattatgtgaaagttacatacaagtgatattgtagttacatacaagttacagtgtactaacacttcaattgtattgtaattacatctatcaaatttttaggagaaaatttgtcgacaaatatatagcaaaattgtatggttttgatgcatgcactattcccaccagcaattccatatatcacaaacttcgggagtgagagttgataattgtggaatttggggattttactgtgtacaattgacttacggtaagaaccacatataatgtttacaagagatatgaaaagacacatataccctttaacatccccgctcaaatgcaatgtgtatgcaataacattgcatttgaaaggtatagcttaacctacactaaaaccaaagtcaatgcttgaagatgttgtcaaagcgtgcaaatcttggatgatgatgaagaagaaaagatagcatcccctccgcaatgaagtggacctcggagccttcacaaactgttcttcggccctcggaatcttgaagccttcacaacccgttctgcggctcttcaccgattcggagatgttggtgatgatgttgaagggcctttacaaattgttcttcggcccttgattggtgacgatggcctgctccgatatggagctagtgagatactagtatactgacattacttcgacgaattgaaaggatgtgatggactttagtggactcgataaagaacataggaaattgatttgtagatgatactatgctagcaaaaggcattgcaatagacaaatagcagatggcaacaaaaggggaaatagtgaccgtcaaattacttaaagatggaaggcggatctgaaacaatacggtgaaggccatgaccagtcactgctcaaataagatggtcctactattgcgagctgaggagcacataaggctgcaccggagatagtaccaacaacactcatactagatctagcagctatggagtcagagaaaccaggaacactagcagccacatgaggacgtgaagtgattgcacgcctcgcttgataatcaaccaacttctttgggtgaagatgaaagcaatcatggaaagtatgaccgaccttcttgcaataagagcaaataattgtaaccgaatctagggacactccccataggaactccaacacgatgagttgctgccaggacattatgagcaaccgaatgagtggaagtaatttctagggtgctaagacgcgtctcctcagcaatcagatctgcaagagcctctgtcatagttggaagtgtactacgcgcaagcaattgaacccgtttaggttcaaatttagggagaagtcgcatggcaaactgatatactcccttcgtcccaaaatataagcatttttgactttgatatagtcttcgagatgcatctttgaccaacaatatttataaaagtaatatgttttaaataaaaagagttgtatattgctccagtatgatagtttgtttaatgataaatctagtgacatcaaatttatatgattgatctttttttggctattaatagttaaaatttaaaaagtttaacttgcactattccaaaaatacttatattttaggatggagaaagtactaaattttcctgatcatgcttctctctcgccttgcattgtgcacatccttaaacaactttttgaatctgtacctcaaattgtccggttaaccgagtaaaaacattgtaaaactcttcaatggactgattttgttgctgctgtaagttgttcagattttgcaacaaggagaagcgtaaggctccactttcttgagtgtatctctgtttgagatagttccacatctccttagcacttgtgtgagccttaaaacctatccgaatagccacatcaacgctcataaatatgaatcccatcacacgatcatcagcaattttccaagcctttacctttgttgcatctgttttctcatcaggaggatcatctgtgaggtgtgatgcttgaccaattgaccgcaaaagcataagtgctgatagttcgataattttgaccatttaacttaatgtctgtacaaagcaaagccccacctcccaggaaaggatcagttgttctcatcaagatcagcgcaagaagtacatcaagatcagcacaagaagtacaggaagtagatggttgtacgatgttatctgaagttctgaacttggcactagcacacagcagcagagagcagcaatagtagtagagagcagagagtaccacagcttcaggaacattcaggagtagtaccaaacagtggaggagcagcttgttgatgagggccttatccatcaatagtccatatgcacagggttgcagcttcagcttattgatgacgagcttgataaaatggcagcctgatgaggtcgatcagcagcaacaggtacggccagtgcaaaatttctcatctttcggtaaaaccagtgcaaaatttctcatctttgggtaaaattcctcattttcaagttgttcaggtggtatattgtgttaaaatatgcttatgctcccaaacgtctcatctttgggtaaaatttcttatttgaggattaaggatcatcattttttttcaaaaaaatcaaacctgagccctcaattagatacatagaaataaaaataaaacatcaaatgaaatgaaattcaaaagacacaacaaaaacatgtccaaaagacaaaaaaaatttaaaatactttagacaaaaacgaaattcaattcgaaataaagaaaaaaacccttacagaattaacaaaaaaatattataagatttaaaaacttagattcgggatcagatggtaaaatattggagtgccctgttgtcgtaacaggcttggttggggcagacacccctctcgcaacattaattagcgagatgttaccactcatcatctccctttaactgcctgaaggatcatgccctcctcgtcccacccacccgcccttttatagcctctctccctctcgccatccgcctgcgccgccgaggtgggactaaaacccccctcacgcagcagactagcacgcactagcgctgatagttagtaagacgcttatttgggcctagctctcagcccaaaggtttagttgggccgggccgagttgggctttacggatggtaaaacatgtgacacgatgacgcagttgagcgaactgcttggttgggaatggcggcgcccgtggccggccgcctctccgggctcctccggcgatgcgcggcggccggggcggtccggccgggagagcaggcgcacgcgagggcggtggtgggcgggtggctccccgacgccaccctggagaccgacctcgtgctgatgtactgcaggtgcggcgagcgtcggcgcgcacgcagggtgttcgacggaatgcgtgcgccgtccatgcacgcgtacaacgtgctcctcgcggcgtcgcctccccgcgacgcgatggaggtgttctcccgcctcctcgcgtcggggctccgccctgacggttactctgtccccgccgtggtacgtgcctgcgctgagctccccgacgcggtgcttggcggggtgatccacggcttcgccgtccggctcggcttgatggggaacgttgttgtggccgctgcgcttctggatatgtatgccaaggctggtttcctggatgatgcggtgagggtgttcgacgagatgacggagagggatgctgtcgtctggaactgcatggttgcagggtatgcgagggctgggagggcagtagaaacctttgagattttcagcagagcgcaggttgaggcggtgaacatggtgaatggtctgcaggctgtgcccagcgtgttgaatatctgcgcgaaggaaggggagctgatgaagggtagggaaatccatggtaggatggtgaggtgccttgcatttgattcggatatcgcagtggggaacgctttgatcaacatgtatgcaaagtgcggccgggtcaatgtatcacaagcagtgttttctggcatgcagcagagggatgtggtgagctggtctacaatgattcatagctacagcattcatggcaagggggaacaggcattgaaggtttacatggaaatgttgtctgagggagtgaaaccaaattggatcacattcacatcagttctgtcaagttgcagccactccgggcttgtaaccgagggtcggaagatcttcgagtcgatgactaaggttcatggtgtccaccctgctgctgagcactatgcatgtatggttgacctcttagggcgtgctggagccattgaagaagctgttgggcttataaggaagatgcccatggaaccttgtgctagcgtgtggggagctttgctctctgcatgtgctatgcataataacgtcgatgttggagagattgcagcttttaggctatttgagttagaagaaggcagtgctagcaattatgttaccctctgtggaatttatgacgcagttggtcaatctgatggtgttgcagggttgagatcaaggatgagagaactcggcatggtgaagacgcctgggtgcagtcggatcgatgtgaagggaagagctcatgctttctaccaggggagcatcccacgttatttgaggagatgaatgctttgggtattagatcagttactagacgatatggcaaattcagattcagaagatgagcatgctgacttgtactttgagttaactctgcactgaagttctgatgctgaaagtcatgtattgctacaatcaattttgttcaaggaaaagcatggatcttccttgatggctgccatgctactcatgaacaaagttgaatgaagaccaacaaagaatcctaagaaattggtcaatctagatgtcttggaagctgaaacttttcaggaccagtatctggagcaacatcctgcatcatggtatggtgccaggatgagagcaagagggtggctcttctggtcgaaacgactggtatctagtctgaggtgactgcaatgacagtaatacatgtgtaatgttgtcagtctaatttatcggcatgtggctcaaatatagtgcttctgaaaatatgcgacaatattggatgcaggagaaactgtgaaaatctcctgcaagggtaattcttaagagttcccttcatccaactggaagggatgaggagtattcattcaaactagtcaatcatggcaatggccattctgggcttaaaggatcatcaagcactaaccaagtatccaatgatatttatggtttccttagcttaaagtacagcatcacctttgtctccatacgaatttcagtacagttacaaaaagaagctgtgtatcctgtcactctccaagatcaccaatgggttgttgcatctggtgctatggttgccagcatgcaaatctgtcttttgaggtcattttgcttggatccacatacccactcttttaaggtaaggaaaccgtcatttggaagctccatttatgagaatttgtctttgtcacgagatggttgaacaactgactcgttttctccgcatagctatccctgtatttgtctgtattccaacctgttacctggcaatactatcaaaacaggtatatgtaaaatagtgtattcttgtatcttttctaagcttcattacagcactgaaatgtggtccttatttgtatgccacacatcgcaatagatagtgcagcaactttggatgtggtccttatttgtatgtcatacatagcaatagatatcgcagcactgaaatctttgtgcaagttgggaacaattcatcatcttttcaaccaagccagggaggttacaaatacattttgtactggggatttttgtacttactacactatatatgagacagtgcaaatgagggtgaaactactcattgatttcgtcccaagcaagattggagagcacataatgacaatggcaaagttaagttgtttataaccatatagtataaaattgctgatgaaaaagttgtcaagttttatcaaatgcaagttgctaaacctggcacctcgatactatccaacatagctcccatccagaactcacttggtgacaacaatttggtactgcccaagaacaacaaaaaaaaaaatgtattttcaattgctgttgtcagcttttggcctttggggagcaaagagacgacatccagcttccaactggggtagcttctatgctgcgtgttctctccaggtcttaacctaccattacatttcattctttgtatcttccaaagcagataagcctgaatatttttacccttgatgcagtttatactcccttgaccttgtggtgttgcacactggtcaagcataaatttcttcaaaaaggactggttaaaggtatgatcctgtccctgccgactagcattgccggtagtttagttcacagcttggataatgtgacattagaagataaagtttgtcaccctatctcaactaaaaaaaaaacttatggatcaaggtgttacagttgttccattttttcagtaagatcccgagcatatgtaaatcacaatactccaattagatagactcaattagaacattcattctaaaatttaggcagcaacttcttcaatgagccaactttttccatcagtttgcactaatgaaattcctcagacatagataggtacagttgcaaaatgcagtgtgcccccaaaacccctaaaatgacatagttatacagattgctcaatgttccagacttccaggaatgcaatctgacaatccagatagagaacaataaagaatttaatctagtattatttccctgttctctctaatagataaaatattcgtatttgaccatctaatacacccttatgaactaatcttctgtagcaaaactgaaaatcctagactatttgtttgtatcttcagctcctttcgtaggtacacttagttaataggtgggtgggttgtattcgggagtctccgtccaagtgcgaatgattgaaaaagtccgagagctcggtctggctgcgcaaatggcaccatgtgagatgctcctcgcaccgtcgcaaaggtcagaatattaccatactctgttacccagcctccaaccttgaatgccaaagggtcacatatttcaactattagtaactttcacaaatttgcattatgttttcatagtgtatcagctaatttgtttaaaagggcgaaagtatacctgccctctgcggaaccagctgctgtatgggactgtgacatgcaagcccatgtcatgagctagctctcgtacaagagttcgggagcccaataggggcaccacagagtcttgatctccactgtagtgtcaattgatattgtcataacattcttcacattaaacagaaacaaattatctggaatataagtggaaatacacattacctgaacacccaaactggtattttgtgctctacaattctctgaagtaatggcaagatgttgatgttgccatccttattgctgtagttcagcacactggcacatgtaaatgttcaatatgagttagacttggaaactaaggcctgttcactaaatactatttggcattctatacatgataaatattttctaaaaaaatttcaaatcatcggtagtttcattagaaaaatatctatttgaaactttactagaagggcctacagttatactcattgagtccgtacttacagcatccgaagtacttagaagaaacagataatagacagaagttgacagataaatacttactcgctgcacatgctccagccatagggcaaatgtgttctgttagcatgaagagcttgctgcacttctggaaggttgaaatagaaatacctttcgtaagtcatacaaacatccacacctacactcattttagtcacctgcatagaacaacaattcagtcataccacaagggaccatatgttctcaagtagaagattgtatcaacaagagtaagcatacatatttccgcagccgtagctcctgcatcacaattgatgggtagcacacatcaagaataacatcgtaattgttcacataatccccaactatactgtttgcctctgcaatggcatcattgcatgacttgctctcattgtgggggttgctaaaggtatagtcctcaaaatcacaactgtggctgattgatagaaatatttcgtcagagatcatgccatgggaccagaaatactcatatgttgcggggacatctctgtcaagcttgagaagcggattcccgatctattcaaggtaatatcagagttacagaaaacatttagaagaacaaagttaacagatattgaccaatgtgcgatcaaattcttacagctactcccttgatgttgaatttgaacccatttgatttctcattatgtgtgagaagtacatcggtgagttgcggtatataatgccctgaattattcgccaatcagtcaaagtgcacgacagaatttaaacatttaaatgtgaaataagactcaggaatactctctgacctgcatagctctctccactaagaagtagccctcttgacctgtattcagggaacttcttgtaccatcccaacagaaatttgtacatgtcattagctgcatagttgagcaggcatacatacagtcaggccaacatattcaagtttaactggtccttttcatctgaagaaacatcattagaacttaccggtctgtgcatcgccagtattgtaatctgatgaagtgttggagtaggaccatccaactccagccggtgattcaacaaacagaagattggatactgcaaaatttgaggtaaggtaacacagttagagctaaagctacattttttatgcattctgaaaacatgtgctgggtggagattgcaactaaaagttcaacctttgttccaagacttcttgttcaatctcaggcctctgccatctcctctcggataaaatgggccgagctctgtgaacgcgccacctccaaccgaagaacatccaggacctgataacaacatggccagcggttataaatcagttaatcttacagcaaacattggcaatcagcaagtcacatttgattctgtagcattaaagttgttcacagttcattatgtgacaatgtattgttccatggaaaaaattcacccctaacttcattttgtgcatggaatgatggagatgaaaccaaatgatacctaaaactggtctaaaaatgctacctaaaactttaggtagtcttttgctacatggaaatcatttctttaggtagtcttttgctacatggaaatcaaatgatgcatcacttctttttaaatgctctaggaccacatcacacagacaccaatgaggcaagggtccaaggacacatggtgacctcaaagataccctattcctcctttgcaagttgcaaagtagtaggagtactagtgaaaaggatatcaacatgcaagttaaaattatttttgatttcttttttcttggaaggtgtagagcagatgtagttctttttatgtttccagttcaggaaacacctcctgccatcatagtcccctgatgaaaaaacatggagaatatatatgaacaaaatgaaaatagaaaaaaaatacatttttgcatctgagaagagatcagagaagatggtaaatggaagctcatttcctggcttcacaactcataaaatggccaaaaaaaaagttgtctccattaaaatattaatggaacagtagtacacagtaccattgacaatgacaactccaattccatctgttcatgaaaagaattcagaaatagttgcacaaacagtggagatccaaacggatacaaaaagaaaaccatactagaaggaatcaaccgaaagccatgcacataaagggagcaatctctatcaaacaacagtgagactctaccatctccacagtcagcatacctccataagaaaaattcagaagaaaacaatcagagaaagttcagagaaccgagtgagacactgacatgcagcaagagacaaaaacatcaaggaagaaatccacaccaatctccaagattaaaacaaaacaaaacaaaaaatccaaacctctcttcaagaatcacatctcattctcaacttgaaaaagatgagaaaaaaacacaatgcttcaagatcaaatccaataaacacaacacatcacatcacatcacacagtatgatccaagaactcagcagagagagtcagagagagagagaaaagcagagagactgacctccgttgagccagagggtgagcggcttggcggcggcgccctccgccgcctcggcgaagtagtagaagaggctcctcccggccttctcgtcgacgtcgacgtatccggcgaactgcctgaacccgacgacgggctgccccggcagccgcgccaccaaatcctcctccgggaacccccacacaccaccaagaagaacgcaaccaaccaccaccgccaccgccgccgccattgtcgccggcgagcgagctcgcagcaactgaattgcgcgcttgccgcagcggatggagaagaggaggagaagtgggtgggttcttgaagttgaagcttgggaagagatgaagaacagtgcttgactcttggggactttatactgggggcttctagcctttttgaattgggatgtgggaaaaataataattgaaaatattgtttttttaaatccggattattagctcataagttgttgcgagtttaggtttggattttctgttcgtttaatgttttttttgggatctcactaacagatagagtatttaatttggtgtgaggaaataattttgaattgaaaatattttgtggtgtggtacagtgaatgtagacgaggatgaaaatggatgaggagataactaatgtacctggacaatttttttccattatttttcttatgccagatttgctaattgttcatagcatgctgtaagtaattctcctcgcacttggcatattgttagttctgattattatgtcatgtttgtgttacttgtcaattttaggagaggtgtaaaacataataaaagaaatgcaaggaccttcactcctattcgaatatggctcatatgacatgctcataataatttttcaattacatgaaagataaaggagtgtttggctaatgggaatggaaaataattttccatccactaaaagacatctttaaatcctagctatttatccccctcttccatttaatcctaacccttcatttattttccaatcccaatcccactcctcattttctcattatccaaacacacccaaaggcgacactaacaccattatacatacactccacactcacatatagtacacaattgtaccctctaagagcaggtacaatagtgctattaggaaggctccaaaacctgttaattagcctaaaacgagattaaggaaagaaaatcacatattgagaaagaagccggcgcttgtactggcgccggcgcttgcacagcgccccacgctgtatcggccaggagataaaataaaaaatccgtttgtgacctaaaatgcttgttaatttgtttgaatcaaggcaacttatagctaacttgtagttagcttgttatatgaattgctctttaagttagctctacctgagacatgacaaaaggctggagcctactgctagctgcactattgaccttgctctaacagaaagaatcattttagtgggactaggaatttacaacaccactggtaggtggactcttgtacctggaactgtcattgtgctaatcagaatttcctcaaatatactcactatattattgcttctttctaaaatgctcaaatttttttattgacacccatagtttttgctttgagaattaccactttcttgctattgactttccatgttcatgagaaaaggaaaaaaatggtatagtagtttgccatttttggcatgaggaaaactggtgaaggctcaagtaggacctgagatgaataggtagccgttgggaagggtaaatggagataatgagacatttattacaggcatgccatggcagccatgccaatatgccattgattgacctggcacccttgcgtcaggcatagtacggcggtcgtctagctcgtgagccatcaataccaccggatctcctgaaacttgttcggattatacacctttctgcatatctgtttttcattattggggtgatatcttttctaaaggaatttatgtggaatatcattgggtttcctctattttggggtgcataattattttttcttaaatgttgtggtgttgcacattctaatttatatacaggggcggatccagcatagaggcggcggggtttcgaaccctattattggcgtgaagactttgagaatctctacgaaaaccccactaaatttttttaccatatgtagataggaggggggactgtaactcgatctactttgcttagaccctactgctatttctttctggatccgccactgatttatatatatatatgtactaagtcgattatctgtcatcagtacagtacttaagagattgtctatatgaacctagtcgcttgtcacacataagaggagagatagagaaggtgactggtcatcattttcattttcatagccgatagtccgacattgttagaaagatctggtcatatatatttttttctatgcgtccaactagcaaaaccaataataatgttatattttatgttttattgacagttgacacttgcccgatgacaaatagtagtaaatatctctccttttaagtgtgtgatggtgaaatctggttgctttggtagctgacatccattacagtcatcatttcacttatgctgattataagcaaatattttttgaataaaacttttatatgtgctcttagtatttaaaaaacaaattctggaaaataaaccatgataaaagatatctcaagttttaaaatttaaaatttggttgcagtttataatgtaaagggtactccctctgtcccataatataagtgattttggagatatgtgatacttcctaagactacgaatctgaacaggaaaagtatcgcatccctccaaaatcccttatattatgggactgatggagtaaatgatatgtgtgcatgttacattttgtttggtgcatagattaaacaccaccacaccatcttactataatacgttacatatgaaaatttacaaaataattactcttaactaaatatattgcaccatgaagctctcatttgttcaatcatttataacatgttcatgtgatatgctacacattagtatattactatccatgatactcccttcgttttatactataagttgttttaatttttttaagtttgatcaagtttataaacaaatattgtaatatttcatactatgctatttgccatgatctctaacaatcttactcctgtgattccttatcatggtactgtactagaaatactaaatgtcaataaaggtaagtagaaattaaaaggtttgttaataatttgtttgaagcaatccttgggagtatatattctgaaccacaaggcagtgcccgtagaagatccggacggagtcaggccgagcgtgtggctctatgcaatcttacttgtcagtatatgtggagtctcagaacaattatgacacacaaattcagctcaaatatcagtattttttaaatctgtttttccttaaatcagtaaactgcagtatactccgtattttcttttaaaaaaaacatcttcctcattgtaagttgaacttgcgcataatctgcatttttttagaaaagaacttttatgctgtaaagatcacgtgcgaataccaatcatagagctctttttgtcccacgggccagctagtattattgcataaaggatttcagtttttttttttgtttggtcagcttgaggaccatattttggtatgtggagtttaagatttaaaaaaacggtttggtagtcagcttttaaaaatacggagaagttggtaattttttagattctacaactatattttagcataatctgagtaaaaaacctgtcaaaactccccaaataaacccttagggcccctttgaatcaaaggatttatgtaggaatttcataggattcaaatcctataggaaattttcctatttgaccctttgattcaaaggattgaagctttccaaatcctatgaaattcctatggaatgacacattgcatgtagattttggaggaaatttagcaagagctccaatctcttggaaaatttcctttgagtctatctctctcatccgattcctgcgtttttcctgcgctccaatcaaacgaccattcctgtgtttttcctgtgttttgcaatcctctgttttacacttcaattcctgtcagaatcctatgtttttcctattcctccgttttttctaccctgcgattcaaaggggcccttagtatgctagtggagtactactgtagtagtactagtcgtctccagctcactcgtccatgatataacatgggctcactattcactaacatgatactagtaatgtagcacatgcatatttaaaaacattattagtttcactcaatacaatttaactcctccgctcgcggaaaactgacgttgtattgttgaggacagctatcacgatttgaccacaaattagtacattttgatgattatattttggcactgtttagattaaaaaaattttgaccaaaaacgtcacgtcaaattgtttagacacatgcatgggacattaaatatagagaaaaaaaccaattgcacagtttgtatgtaaattgcgagacgaattttttgagcctaattacgcgatgatttgacaatgtgatgctacagtaaacatttactaataatagattaattaggtttaataaattcgtctcgcagtttacaggtggaatttgtaatttgttttgttattagtctatatttaatacttcaaacgtgcgtctgtatacttcaaaaactttacacgcaaaaaactaaacacaccctttgatgattgaaagttgtatggttgtatttatgatgttgcacactttcataatataaaatattttcaagtatttgtaaattttctaagaaaaaaagactaggagtgaaagtttgaacttgaatagtgctaatatcaattcaagaacggagaaagtcataattttgttcttttgaagataaaatataatgtatatttaatcctatttgttaatatctaaatacaatccagttatacataaaaatgaatagaattattaataatctaacagaaagtatccatagtagtagtcgtccctccgttccaatatacaggaaattttgggtggctatgacatattttagtagtactatcttcgtcccatattacttgtctttttgagtttttgtttatcaatgtttgatcattcttcttattcaaaaaattttagaattattatttattttgtttgtcatttgctttattatcaaaagtactttacatatgacttatctttttttatatttgcactaatttttcaaataaaatgaatggtcaaacgttgtaaataaaaagtcaaaaacatcacctattatgggacggagggagtataaatctggattcatagtgtattaaaatatgttccatcccgctaaaataccgggagagtagtacagtggttatgagcagatttggctttgcttgttcagaaccagacaaggagcaagcttctgctcagtgcaggttgccaatgctaaccatgatattagcaaaatgcagattaattagtactactaatataatatccccaggcgtgggtacgtatgtctgcacctgattaattagtccaatgagagatgctctttggattagtgtttgtagcatatggtgtcagaatctcatatggtccaggtccagccaagtatatttccaaaccaaaaaaataaaaataaaattacatatgctccctcgagaagaacgagagatttggatataaaaacagatcgtatgctatgtatatatattaagcacttgcattagtcattggtcattagggctaattaatcgagttttccaatgcaatgagctgtaggaaaatgagagacatgacaaccttgtacctaggaaactcctatggcagaaatgactagcatt

SEQ ID NO: 7113 - DNA, 1140 bp, Oryza sativa
  unsure (1)..(1140): unsure at all n locations
caattattaagagcagaaaataaatttatctcatctctatgcttttgatttattccgaatagtacttagcaccttgcgttactcggtccatccaacgagcccccgggtgctaggaatcggcccaaaggcaaccatccattggcaaaccaaacggaaagcataggaagatagaactccataactcgataggtacttttgtactcagattatgtcgcaagcaatcaagataaatattatgaaaaatatgatataacatctgtagcccccgactcactactcaatggaagaccaattggtgtagtgaggcagaggaaaaggaaaaaatatcatataaagaataaaataaatgatgacttagctttgtaatattccccttggtgatggcagaagtggccaatgtgggaacaaagtcgtccatcaataacaatgaagacaccagttggcggcgacgaaggcggtcgacggtgaaagcgaagatgcccactaatggcggcatgataggtcagcncgtgtaagcggaaacaccagtcgacggcaacgaaggtgagccaacggtgaggatgtagacacccaacagcggcggcataataggccagccgtgtaggcggaggcaccactcggcggcgacggaggcaggccggtggtgaagtcatagacgcccaacagcggcggcataataggccagccgtgtaggcggaggcaccactcggcggcgacggaggcaagccggcggtgaagtcgtagacgcccaacagcggcggcataataggccagccgtgtaggcggaggcaccactcggcggcgacggaggcaggccggcggtgaagtcgtagacgcccaacagcggcggcataataataggccagctgtgtaggcggaggcaccactcggcggcgacggaggcaggccggtggtgaagtcgtagacgcctaacagcggcggcataataggccagccgtgtaggcggaggcaccactcggcggcgacggaggcaggccggcggtgaagtcgtagacgcccaacagcggcggcataataggccagccgtgtaggcagagacaccagtcggcggcggcggaggcaagccggtcggtgaagacgtagacgcccaacaacggcggcttgatatgccagctgtat

SEQ ID NO: 7114 - DNA, 1752 bp, Oryza sativa
acgtagacgcccaacaccggcggcataaaggccagccgtgcaggcgaggacatcggtcggcggcgacgaagggcaagccggtcggtgaagacgtaggcgcccaacaacggcggcataataggccagccgtgcaggcgaggacaccagtcggcggcggcgaaggcaagccggtcggtgaagacgtagacgcccaacaacggcggcataataggccagccgtgtaggcggaaacaccagtcggcggcggtcgaggcgagccggtggtgatgttctgactgatccattcctggagcgtaagagataagcttaaagccatgaatcccttttatgcatatctggatctggatcctgcagaacaaacatataggatgagtagtatctgatataaatataatactcgagaaaaaatcaagtattttaaaatatttataaatatgtatttctcctcttgtcaattttgatttccccgagcagatgactcattacgtttaaacactctgcccgactagtcatagccaccaagcactgggagtcggcctaagcacttcccaaacatgcatatgagtgacataagttcgtcattaatggaacaaagtttcacggatcggagtttactactcgggtacttttgcaattattaagagcagaaaataaattatcttatctctatgcttttgatttattccgaataatacttagcaccttgcgttactcggtccatccaacgagcccccgggtgctaggaatcggcccaaaggcaaccatccattggcaaaccaaacggaaagcataggaagatagaactccataactcgataggtacttttgtactcagattatgtcgcaagcaatcaagataaatattataaaaaatatgatataacatctgtagcccccgactcactactcaatggaagaccaattggtgtagtgaggcagaggaaaaggaaaaatatcatataaagaataaaataaatgatgacttagctttgtaatattccccttggtgatggcagaagtggccaatgtgggaacaaagtagtccatcaataacaatgaagacaccagtcggcggcgacgaaggcggtcgacggtgaaagcgaagatgcccactaatggcggcataataggtcagccgtgtaagcggaaacaccagtcgacggcaacgaaggtgagccaacggtgaggatgtagacatccaacaacggcggcataataggccagccgtgtaggcggaggcaccactcggcggcgacggaggcaggccggcggtgaagtcgtagacgcccaacagcggcggcataataggccagccgtgtaggcggaggcaccagtcggcggcgacggaggcaggccggtggtgaagacgtagacgcccaacaacggtggtgtgaccaaccaaccatataggcggaggcaccagtcggcggcgaagtcgtagacgcccaacagcagcggcataataggccagccgtgtaggcggaggcaccagtcggcggcgacggaggcaggccggtggtgaagacgtagacgcccaacaacggtggtgtgaccaaccaaccatataggcggaggcaccagtcggcggcgacggaggcaggccggcggtgaagacgtatacgcccaacagcagcggcataatacgcccaccgtgtaggcggaggcaccactcggcggcgacggaagcaagccggcggtgaagtcgtagacgcccaacagcagcggcataataggccacccgtgtaggcggag

SEQ ID NO: 7115 - DNA, 10476 bp, Oryza sativa
atgataaaaatcagattgagtttccccctgactgatttggatcaagtcagagaagaggagcttgaagaagtggtcgacggaaaggaagtgaaaactcccaaagcgaaagcgaagtcggcgactcatgaaattgattccatcgcgctcgttgataggaaactcgacgcaacccctacctggcgcgccaactgtcgaaacatgaattcggcaataataaaacggggtagcgcacgagacctaaaagtggatggatgtggagacaaaggatttagacaggttcaggccctctcaatgagaggtaataccctactcctgtttggggatttgaatccgccgagtgtgtattgatctgacgatcaggttgtctcatatatgccccctagagggcctcctgcccaccttatataggatggggggcaggattacaagatagaaaccttaaccaatacggtatcggtttcctaaatcaggactttaggccgttccgtaatatacaaggaaacgtaacacccaagtcatgatctgttacatattacatagatataagttatcccctataactagtcggataaccatgccgtgtgggtatggggtacccataatctccacagcgtgcatgctgataggcgatagctactactcgtactagtactctatttctgcctgaccggtacaacaatctcagtgtaaagtacacatgcatgcgtgcatgcggtggttcggttttagcctgcttagaatccaaactcggttttaaatatacagccatttacaattccacctttttttcgaatccagaatgactcacattgctcaaacctatccacattacactattttataattaagaatttaaatctccaactataactaccgctatagctaaagatacctacttaaaaaacaacagctaagatatgtactatacacattctatattgctattagctattgttagcgagggatagccactgccagggttacggatacgatataccctctacccttggatatatattgtataccgatacggtatacctgcgcgtatacgaatgtttcctgtatacgttaagggaatccatcacgtaatagaaaccgaatccacacatgagagaagtcctactcgaacaagactgggtcgttactgtatcataaggggtccgatatctccgagtcctacttggagatcaactgacccgcgatataaaagagacccccccgggaggacctaaggcatcgaatctcaccgccaacacatctaccacagcctacgaagccgtagcctgcagaagccaagtcgccgggtgatctagtcaaaccaactcgactacgatctcgtcggtattatcgagttctgttattccctttgtaatctgttatttccatcatataatcccagaccaactggattagggctattacctaccaaggagcctgaaccagtataatccctgtcttttgtttgcttgatgtcgtattacgtagatcctcgttccaacgtaccccaataccctctatatccggtctacgggtatccaccgtcgacagccaccaaatggatcttcaattagcgccagctaaactcgacgggctgaaattggtgaacgacccatataaccatacaacccataataaacttctaaactccaattctctccacctatcagtttcttagtctctcgccctctcctcttctctcctcaacagactatagcggcatctacagctgcgacctgcagcggcgatgagctgcaccaatccctccatccccactcttctctgtttctcccccgggtgctatggcggtggctgtggttgtggctgcggcctacaatgacaatggtggcggctgcgccctgaggtgacggtggttacgttactgctgtgtggcaccaatccatccccactcccccaagtggcagtggatgtgatattgtgagcctatgacgggtggcggtggctacatctggagatccacttctctcctccaagcggcaaccactacttttgtactagtttatttctccacatatctgcttttgtacacgtttaatattcacctttcaaattttatactagtttatttcctcaactattatcatttgtctgatcacttatacttttgctactcccctaatctttaaaataatatgtataatttattatattatgggacagagggagctttaaacttgctattagcagctactggctagccacgtacttctaattcgcatttactctttatataatgtaagcaattgttgtgacggacaatggcgtgacaatccgactactccaagctttcatcagtccgccgctctgagcccttcgcaccttcatttttgatgatgtgaagccacttgaccattggcatgtattcaagtaccgatttcgtctttcaaacttatatggactatgctatcaatagttacttttataatgattaaccaataagtggttgaaagatatacttgaaaaacaaaaggcatatacattaatacatatgtaattaaggaacgtattttagaaccccatgatgtcaaattcattctagggctcttcacagatatagagtcggtatggtgccgagagcaaattattagcatacaaaaatccataatttttttgtggccagaaaccgtaaaggataacatcgaaacttgacggctttcaccaccaataaaatcagctgaccgtcgagaaaatactactccctctattctataatataaagcacaactacttttaaaagttgtttcataatataagacgtgcatacatgcatgtcattaagtagcacatatttttcacttaaatattattatttaaatcctccaccatcaagatctctaattttattgggtgcatgcattctatttattagggtaatccaaactatgatgtgataataattatttcttggtctttgggttaagagtggttgtgccttatatctagaatggagggagtaggtttttgtagtttaggtccgttccccatttagggcccctttgaatcgcagggtaaaaaaaacagagaaataggaaaaacacatgactctgacaggaattgaagtgtaaaacagaggattgcaaaacacaagaaaagaatggtcgtttgattggagcgcaggaaaaacgcaggaatcggacgagagagattgactcaaaggaaattttccaagaggttggagctcttgctaaatttcctctaaaatccacatgcaatgtcccattccattggaatttcataggatttggacagcttcaatcctttgaatcaaagggccaaataagaaaatttcctatagaatttaaatactataaaatttttatataaattctttgattcaaatggacccttaaccagccgttcatcctccgaaacacggagcgctatcgcaagaaaggaaagttggtatcgtgcgcgggcgtgacacgcacgaacgacgtctggccgagatgcgccgccgcgcgcacgctccgtctgtctggtctcgatcgatccacaaaccacagcccgctgcacgcaggccaggggtctcaaaacgcacgcacgaacgcacgcacgtgatcgaccacctgatcagcgcgcgcacacacggcgcaccgcccgcctcctctctccagtggcacgcaccgcgcggtatgcacgtactcacgcatgtgcgagtgttaagtgagatttgcgagccgcatcgatcgatcgatcgatcctgcatggatggcgcatccagtgcccgggtcacatgccaaggcatatactcagtgcaggagtgtacagtatagtgattgggtagcgagcaaagctgaaagcttttgtgttctttttttttttcgtttagatttcgcagcaagtactgtagcaccttttcgtggccacgtaccctacacgcgcgcgactttacgtgcgtatatactgcgtacaacatgctgctgcgcctagacgtacgacatattttggtatagtaaaatactagtgtacgtacgaccagcacacaatattcataagagaccgacgaccaggtgaaacatgcttacctccgaagcaattaacagccgacacaaaagaaatacattatggattatgccattacgtattgctggtggcggtaatatataaatacgatgggtacattgcgcgctctctgtataatagtacttctgttggaacttttttaaaaagaaaaagactgaaattgtttgcttttcacacaactggatcatacacagcacaatttgacagtttgtgattagccggagggatcgactaaccttaccgttgatcattggtctcacaaaatttgcaaatgagccgttgtctcaagaacgcacgatatgccgaatgcatggccagccgtcgccgtcgtttccctgcaaatacatttgctgtcttccggactggttccatgcccgtaccacccccaaaattcgagccaagacacaaacactcttttttttttgtcaggcacgtgtatgtacagtaacgtaagcacacgtatcagcagctgctcacttagctagagagcttgtacttagagggtgtttggaaaagaggggctaaactctcaaaaccataaatcatgacttatggttttgagagactcctaaacatcccccttatatacgcctccatatggccgagaatcccctatttctctgtgcaatttcttaggatggtccctgctgatcagctacccgtctctcagcaatgcgaatcgtgggcattgggcaagccggctatatagccagcagagtagcagactgaccggggtcagggcagggtaggatgccattgattttcccaattcccagctgctgatgatgctaaattgctaagaacatgtacaatagcgggttataagccagctacaaatatattttaaggagataaataaggagagagaagagcagcgggctatagatttgtagctagctgtagcacggactttaagacacagtgtgtatatgacaggtgggaccagatattaatagtgtggtatgtaactattgtataaatgagttattagattggctatatataaattggagcaagtagttgggtatactattgtattgaacttttgatctaatgagtggcgattaggggctccacctcccaacacgcgtggctcgcgccgacgagtgctcgtcgtttgtttatcgcagccagaaccatgttacgcacgcgagtgaaaattggttgattctacataccaggctaccagcgccgcaaccacggtcactgacatgtgagccttgtaccgggcggttagcgtgggcccgtgttgtcagtagcagtatcatctcttgacgtgtgtgatagatcgtgagaatacaaccgttttttgctccatttttataaattatcaccggcccattcgggttctggcgttctgctactgttttggggcactctaatgctctaacactatagtatcatcgatggtttttcttttttttttttagaaattacacagtacaacacagacactcacaacacacgcgcactcattcttatgaacacacgcacataaaccctacccttatgaggatctttgaagactggaccggtaaatccctggagtttaatggtttttcttcttcttctttgagtgatcgatgttgagctttaggaaaagagaagaaaatggtcctgctcgtctgtacaggaccccggctttaactataattgcggtgtcgtctcccagggcactgtgcatgtactcctcaccgattagcagctgaaacgatgtcgagtggatgcatgcatcagtatcacgcggtcaaatttggaggtgaggccagtgttggatctcgtttcaaccccccggcattttggcagatttttgttttcttccgaaggatatatacaacttaggagtactaagctttaattgatctgagtgttttgtggagaactacttgttttttactccctgtcccaaaaaaaaatgttaactaagattagatatgacatattctattacaacgaatttgaaataaggtatgttcaaatttatagtactaagatgtgtcacattcaatattagatttgttttttatgggaaaaaaaaggtagatgagaagtagtagtacatggtgagtactgtaatgtgatgaactccctgttaaaacatgtgttaatactatcatcaattaatgtagggacccggatctgttgcacttaacactatagcactgcaacttaagcagtcgcactacagtagtccaatcaaaatctaaggatccaagcgtcacctagcacgataagcaacatagtatctgctcctcgtcctataatataccaatctagtatcagatggaacattagtcctacctatgttcattgtactatgtagtgtcccatctggtactaggttattatatttattatgggattgagaaagtcctccatacgatactatactataattctagtattgtacttctggtaaatctgaaccattcacctctgaaatggatggatgaaatggcacgcaaatgtgcaatcaataacttgtcgttacagggttaaactcttatacctctattgttatgaatttaaaattaattaaaggctaaagattacaatgaaatactcaagatcaattttaatattagattttaaaatttaagttttaactatggctaataagttaatgaatagacgatgaaaccactcgaaaaacatggtctattgttaccatggtgatgttagtcccgttccaacgggatcttgcgatcccggtaagactgtagctgctcgagcgctccatcttagagcttccccagcaactcatccaaattttatcctccatattctcattaggatggtcgtctaaaaagattctcactccatatttcttttcactctaatagatcatccatattacattcaccattttgtatcatcctatattttactaatatcttttaaccaccacacattttatattaatttctcactaactcttcctctcttctacttcgtatagacggcgaggatgaggagggctgatgggtgtttcgggggtggtgtggtgcggtcgttggtggagaagcagcacgacgggagggggaggtgcgatagaaggcgttggcggaggtggaagtcgcgggcgaaagggagcggcggcggaaggcgggagcaaagggggcggtggtggaagtcgtgggcggaggggaaatgcggcggtggaagttgcgagcagagggaaacggcgtcgaaggccggcacaacaccgggaagggaccgctttttctccaacgaactcccccaaatctggttggtgcctcctctctacctctctctccaactcttacaagtaatccagtcggagccacacctcattctccctttcttcccatgtctgccgctcctcatcctccctctccttctctgcctgtcactagcacagatgctgcgagagattgaatcggaacttcggatgggggcaggagctgcggcggttacgataggacgtgaggagagaggaaagctaaatttgacgttcccctctcttatttagtacacgcactatttttgacatagccaatggtgtatccgatgaaggctgattttttacccccctacgttatttttgggaaaagtacagacaaggtccctcaacttgttagccagatacaaaatcatccctcaaccgtaaaaccggacatccggcgtcccccaacttataaaaccggtcataataggtccctcggtggttttcatcctagttttgtcccacgtggcggctgacttagcgtgggacccacgtggaccccacatgtcagtaagccacatcagcaccctctctctctctttctctatttctctccttcctctcgctctctgctcttgcacaggaggtggcacgcgcggccgaagggtggtgcggccggcgacgacggctctcgggtggcggcgcgcgggctcagggcggtgcgagatcgccggcctccccatccccctcgtgcggtcggcgatggcggcgcgcggctgcggccatcataactgacgcggaaaggagggctgatgcggcggcggcggcggcggcgtcaccgacacggtggggaaaagggttggcacggccgacggggaaggagaaccggagaggaggaccggcgacggagctagaagccacacgcccggccgacggaggcgcggggaggccggtgagctcctcccaagtccaaatctggcggcgaggcgggaggaacccggtgacgacggcgggaaggcacagggaggccggcgtcggcgtcgaggcgggaggaatgcgtcggcgttggctcaaaggagcaaggcggcggtgaggggagcaaggtggcggcgtcagcttcctctccgtgctcgccaatgagaaggagcggcgggcgaccgtggcggccaagctagagccacacgcgcggccagcggaggcgcggggaggccagcgagctcgtcgactgggcggtggcgacgaggcaggaggaacgtgtcggcgtcagcttggcggtggcggggaggcgggaggaacgcggcgacgacggcgacgccatgacggcgctcgagaccgaagccgcgacgccctcgacggctgccacccgcgcccagctccttccccggtggctgaggctgggggagacgtcgacgccgtcttcctcggcttcgtctacaaccacgtgccgccaccgcccttcccgctgcccgtcccgtgcctgtttgttgggtgccgcgaccacgctgggctgccaccgcccttcccttttcccgtgttgccgccgccgcgtcgccggtcggcggtcgtcagacctcctctcccgcctcaccccggcgacctccccacccgccacccggcccgcccagcctgccgagaggagataagtgagagagagaggaagggagaggaaagattgagagaggtgatgacatggcttactgacatgttgggcccatgtgggtcccacgctgagtcagccgtcacgtgggataaaaccggggtcaaaaccgccgaaggatctattgtgaccggttttgtaagttgggggacgccggatgtccggttttgtggttgaggaatgattttgtatctagctaacaagttgagggaccttgcatgtatttttcccgttatttttcatatggatgatactccctccgtcccacaaaacatgacgttttaaggttagcagccaaaattagctgttgtgcaaaatgaccaaattgtccccatgatttgattaagctgtcatttacagcatttgtacatgcatccagattattctagagaagtttcctgaaaccacagctcagtgccacgtgttaacgaattggcgccttagccacacggttgatacagggcaaaaccatcattaacatattcaaaaatttgaatcaaccatgaagcttgctttgccgcccaggagtgcctcttcatttgctagttctggcgcccaagagtgcctcttcatatgctagaggtcatgaaagagccatccatttcattccatttcatcaacctacatatccaaccaaacactacacacatccaatccaaatgatcagagatctaaatttgctactggaagaggaaggagaggaaggagatcaaggggctttacctgatctcaatgaagaaattgatatggaagaagatggaagacatgttgttatccttggagataaccttcttggagttgatggccaggaacatggaggttttcttgatctcaacttgcatccttttgatctcaacatggtggctacagaagaagaagaaatgcagcaaggtaagatttcaatacttttggagaagcactggtgctatggttttataaaaccaataagatttcaataactgaagatctaccttggcttattagctggataaaattagagcaccagtccatcataacctgcagctgtgaacagatggtgttagctttgaggttaagtgatttacataaaccactttcaaacaaataacagcaaaacttgatcagatcaatctttttcaacataaggaaacataattcattgaacactcgcagcaaaaataattcattgagcaatgaactcatttgatcagtaatatctctaggaatctaagaggccatttgtgatatacagcagctacaccatgcttcacttaatcatttatatagcaagaatatatatagtaggtggacagcagtaccatgctttactcttattattgacttcagtactagactctaaggcctgttggattgcctacaagttgtagtagaactacatgtcaacagacttgtctatccttatggctgtattattaaaataacaatgtgtgcagtgtcaaaaataaatttacacagctaagccttggaaaagcattctctgattgcacatatatttaaagtgtgtaggtatagtgtgcatgcagatttaaaagtatactaaccaacaagtatttggatagacaacgtgatgcaccatgtggcgcacatcgtg

SEQ ID NO: 7116 - DNA, 11520 bp, Oryza sativa
gacatggatcttttttaaatagctatagataaccattgcgggtgcccttagagggtgtttgggtttgcccttcccaaacaccctcttaacctcaaagaaaatgtgaccttctagcgtaacaaatcttgataaagagcagtctagatttataatcatagaagaggtcatatttctttctggattagattttttttagacagaaggatggattagattgtttttagacagaaggaggaatattatagtggttcatggtcgccttcagaattttctttttaaaattttataccaaattttaaaattaaatatcccaacattcttaccgtgttgaaaataccgttatacgatagtaatatttagacagtaacaacgattatcccatgtaatgatcacatacattaccacaatatcttagattgttttattttgaaaatatactggaaaatggtttttcatgctttatcactccaaagaatcccttcgtgatcactgcagctgggtaccgctgtttgactaatattttctacacggaacttgaaaaaatgtattctgtgtcctacatagccccatccccttgtcagctttcagtttagccgattttaaagtacttcttgaagcacaacagttccgagatgaatatattaatctctttagtcttcttttcacgcggagctttatattagttaattatacataaaagatccttattgtgtggttaattaagtgttttcatggaatatactcgtaaacaaatgttatagctagtactagcttacaaccatggggcacaaaaactaaggaaagatcatgtaaaattacaaaggatgaaatataatttgtttttttgaatgaatttgctttggtccacttctgttaccaaagatttagtccggatcacatttatcaaactttttcactttgaacaatgtaatattatccctttcttattgctttggatcatcctaaccccctttatctcttgatatcaggcgcatcccatatataaaggtgtggcctacatatagcttgacaagtttactggtatgcaagactgatgtaattaaggcagagttaggagcggtctatgtacaacaaaagtatttttttatttaattatctaaagtgaaaacattaataataaagcgtgtggttcaaagcggaacttttataacaaaagaaaatccaaaccataatttactcattcttttaattgcatttttgggcttcaagcacgtgtaagagcaaatttaatagtatagctaactactagctctaatttatttatagcaaatctaatactccatccgtcctgtaatataagggattttagggcgatgtgcctgtccagatttgtagtcctagaaagtatcacatccccaaaatcccttgtattatgggacggaggaagtagctcattcatacaatagttacatataaacatatactatagtattaatatattgtcacacctctcatactcacacaacgtattagagtccgtattgcagctggctacaaatctgtagcccgcttttcttctctctcttgtcttctctcctccacatgtgtttacagcagacttgtatatgctactgtactcgctctaattgtaacatgctgttgatgtgctttatgttttcagaccaattgttcacccttgtcgcactttccaatctaaaaaaagcttggcctgtgctcgatctatcattaaagttgtcatgtgtctaattttgaattttagaactagttttttttaaagaaacatttaaccactttggctctagaaccttgagtagaaatttgttttcatttaatttattttcgatggatgacatactactataggcaaaatttgctacaggacacataaaatttgtataattagctgagggacaccgtaaaaacgtgacattgctctaggacactaaaaaactgtgaaatttaccgaccggacgcattattttattattttccagctaaaagtgatgagatttttttcgaaatgcccagattgcccccgcatgtcaccacacaccaaaaaaaaatctccatcgtccggaggggtgtggcgagcggcagcggcacacccgtgcggcggggcgcgacctggcggcggcagcgccggtgcgacgggggcgcggccgggcgtcggcactaggcgtgacggaccgaggatggcgcgacgtagcggcggggctaggatagtgcggcgcggcgatgccagcggctgggcggaggtagcgcggcgtttgcgggatgtgtggctatggaggcggcgtggtggccctacggcggccggcgacctggccagacaagatgccggtgtcgctggggagctcttacgatgcgtcatgcctagctgtcgtggcaccctcgctggccggcagctcagcgcggcacatcccgcaccacaagaagacgcaaccggcgtggtaccacttcccgccgggccgaagcagctccctcgcagctgcagctgccccaacatcgggctgagcaagctcccaccttcttcgtgagccccagccaaggtggtggtcgcgtcgctgccagacgagctcgcggagttctgtgggggcttcaatagcacgagcgttgcagcatgaggaggtctagcatcagcgcgtccgacgtgatgcggataaccccgttgagctccgccttacctgcgcgccgccgacgcccaaccgcgccggtaccacctcccatcctgttctagcgccacctccaccgcgtcgagccaaccccaacccctgcgcatgaccgcgcagcgcctccccgtccgaggcgccacactggcccacgcctcgctgtgcagccgtcctcggttgaagaaagagcagggagaaagagagaaagaatgagagagaagataaggaagaataaagaaaaaaaattgaaggtaaaactatagttatacatgtgtttatctctccaatttattcggatataataaaataatctgacaagtgtccagcagctaattaccgattttctgtggtgtccttcaacaaattcatgtttttactgtgtctcttagctaattacacgtttttttatgtcccatagtaaatattgtctactatatatacacaccctctatcctcaagtgaatcagcttctgggggtaaatcagaagatgattcattttgtggagaagggagtaggtacgattttttcgacaacacgtaattagttttacttgtaacccccaaaagttagtgtatttaatccttttagagcccctgtgagaattaggcataggtgatctttgatcagcgtagggacatgcatatcttcctggttggtagctcgtttccaatcctagattctttagcaagttccaacaaaagcacatcattctaagcaaactcgtcgcgattcaaactactactactggttgtcaatattaatatatatgtgcgcgcccttaaaagtttatttatgttttctggttagacaaagaaataccgcgattcatgttattcgtacgagttatagtactttgctactcctatatccttttgaaagaaaaacgagaggctgtatattgtgtaattgaagagacgatgatgattagatgtgcatgatgacgaagagcgtgtgcagagtacggagtggagtacttctagtaggagtacagtacgtgagagtagtatatactgtagtgtacgtgagagcaggtacactagcaggctataagccagctataaatatattttaaaaagataaagaaagaaagaagagcagcgagctacagatctgtagccagctacaacacggacttcaagatgtaatgtgtatgacaggtagaaccatatattaatagtatagttagtaactattgtatgaattaactattacattagctataaataattttaatctagtagtggactgtactattgaccttgctatgagagtactcctactaggagtagtatactgatcgtatttcagcagagcggaatcaaatcaatatgaatccaaagttcagaatagattttgtcggggagaaaagacagcgcaacatgagattcatgacaccgcggttcgcagctgtcttcattttctttgttgatatgataacctcctagctagagcatcaattttcacgacgttcatctcagtcactgtcgtttgaccgatcatatattctgttacaagtaatggatgcatttctattactccttccgtaccataatataagatattttaagtttttatttgcaatgtttaaccactcgtcttatttaattttttttaaaattattatttattttatttgtgacttattttattatccacagtactttaagcacaacttttcgttttttatatttgcaaaaaaaatttaaataggaagagtagttaaacattgtaaacaaaaactcaaaatacattatattgtgaaacagagggagtataaggtaagatacattataaaaatggtataaactactactatcaggtattagcatttttatatatggtgggtctcatctatcattttaattgtggtatgattcatgtttgaaagaaaattttagatgaatcccaacttattatctaacataaatacattatggtacgtgtctctctaaactactattactacttaatcaacaaggcttcgttttactatatgctacctccgtcttaagttagtggtcgctttaactttttcttacaacatttgaccattcattttatttagaaattagtgcaaatataaaaaagataagacatacttaaagtattttttaataataaagtaagtcaaaaaaaataattccatatttttgaataagacgaatggctaaaagttacaaataaaaactcaaaggacggagttagtagttttgtaataaatattaaagatactctgagattccaaagtccctgagggctgaaatggttcgatcttgacgggatatgggacctgaaatcaaacatgtgatcgtgatggacaggatttgcaatcgtaccagatcgaacagattgttcaagaaaaacaagagagagagagaaagagagaaagaaaagggagtacgaagtattccagtgacaataatattgctcagaagtacagtactactgtagaaattactcctctcttcattccaaaaatataaagaattgttggatgaatgtgacacattctaatatgtgtttagttcacgtcaaaattagaagtttgtttgaaattaaaacgatgtaacgaaaaaatgaaagtttatgtgtgtaggaaagttttgatgtgacagaaaagttaaaagtttgaagaaaaactttggacctaaactaggcctaagtttgattcggttagagggagtagtactcctaaatggcaacagcattataagttaccgtgatatgtaatgtccctgtcgctgataagattcgagcacttgacaatcaatttgtcccctaacctttctctgtaaaactgatggaccaccaaccattttgacaagcgcagcaagaaagaagaaaagctggtggaaatcataccaaacacgtactccagcttttcgcctttgtagcagttcaaagctttaaaatacaccaagctactccacattgctgcagctaggcgctttgcaacgagcctatctcgctgcaaacaagttccatgcaatgcaagttcccatgcagccacatgcacgtccatctacaggcaaagttcattgcatcggtagtgggctgtccccgtgaaaccctcaggcaacactacagctggttttgtccctagtctctacccttattttttttatctttccaaactttgattagctagagtagctctctactccttgccgacaacttcttcgaaatggtggcaatgcaatcacctgagcctgacatccgggacctttctttggacgatgcatggtccttgcaactatcggctactgtatgaccggattaagttttttcatgcgtgtatatggctgcattttgcacagagcccgcaactgctttcggagagatgatctagggcgttcacgtggaatatattcggcctttgttcggcaggataattatgtcatcaggatatagaatggcccaactggggtagtagtagagatgatgagaagatctgtctagggccttttcaacagcggagcatgtatatatggttgagttcagttacaaactttttcttcaaaattctaatttttttatcgcatcaaaactttcgtacaacataaactttcaatattttcatcacatcattttaatttcaaccaaacttttaattttgacgtgaactaaacacaccctacatcaaacactataaaaaaaaaagaaaatcgagacatcccatgcacgcaattgtctcaaattaccaggctattttcttcgcatattccggctcgcttcagaccttcagttaccacgaatctaaacagatgagcagaaccgcagatgctctgcactctgtagtacatatagtactatggatgcttagcggagaggcctgaactttggagcatttcttgtacacttggatcagttggggaagttactgaatcatataagcttgaacacacatgttcgacgtgttcaacaactggtgaccggttctattttatactgtactattattatattgcagaagtaacaggagtatgttttcttcccattcctagtagcttccttccctgataacacaaggactccacagttcacaccatgcgaacatgttccatgctgtcgactgcaacatcaaatcccacgatctgtttccaatactgtctacttactgtaagcaggtcatggcagtagacagccattgttggctctgtggtgcacaatagttgatggctacaaaacggctgcaatagtctcttgcgggaagtaaataaaatcccagctagctgtgacttgtaacactgcggtggatgatacaaaccagaggcatcaaggtaaagttatcacaagccacaacggtcaacatagcagcagaactgatggaattagatgaggatataaacgtagcactgaacccttcaaataaacgtatagcactgaagaggggagcgcatgcagccacatgtgatgtacttgagtttgttccaaggcatttcaatggacaggcagtgtattatttggtagtatagttggttttgaacttggcatcgccaatgtttacataaatggaacttcctctatacagtgtgtactgtgcaagatttttgcatttcctgtaatgaaaaatatatttcaactccgacctttgcacatatatagctagggcacccagctaaatttccagatcaaataaaaggattgttgcatatgtgcacgaacgccaacattctcgactatcacacacagaagaaatggcatatgtaaagtaactctaaacatgagaggtagaccaaagattaattaacatggtgcctaagataagtaatcgtggcctctgtaccgtaatataaaagattttctttcttttatttattttataatataaataattttggtgtactatttgtcacatccataaacactaattcaaatttctacctattttaaccaccaatatattatccaatcacccataaccaaatctcatttaatgtgtatattctagttttttcttgctatcattagtattataaaaaaagagaataatctcttatattatgggacaaaacgagtaataaaaaaccacatccaagcctaaaaattagtaaatctaagagaactatgtcatctagagagaaagtgaaacaaaaaaaaatcctaattaacacattccattacacataaatcttttcccttcagtcgtagcatcatataccagaaaagaaaccaatgggaacacacatagataatctgtaatgaattagaaaactacccattatcaaacaatatcattttggcaacgtcataccgaccaacaatcctctctaatctccacaatatcgttgttccgccaaatcatggttcaataaggtgctatatatctagacagtaaggtaggccacaacctggcccggtggcccctatctagcgcactactaacccctccgtcaattcatggttagtcttattgcccaactgtagcacccctctcaaactatgcccctccttcctccgtcactttagcctgatttaacttcttctccttatctgttatttccccttctcataggtgcccctacattgttcttcttctatcaccgccgaacggcccttaactgaggttttcttgattcccctattgcccgccattgggccgtcattgcactgacctccctctaaccacccccacgtcctacactagctttacctgtaaaatcttattgtcatgtttcgttgttgaaggaatcacgagagttaaaggagaagatgggtccagcgcataaatctgcaaagtccatcggatatatcactataagatttcttcatcagttttctcaattttctatcacaaagtagttaccaaattggtatgatattaacttatatcatgatatatattcggcggggatgtgtgaacccatctcccacatgcataggttgaaaaaatatccttgaatttactctcttttggaatacaagattctagaacaacgaaaataggaaaaactttagaacagaatgtgacactgtgaaatcctatggtattctaaaacatgtgaatactaaagtttgttcctatagatagttgtcaagaaataaatatatgaatttcaaaggaacttgcttgtgatagagacggaaactaaagaggtaaaggaagagagttcacgaaggaaaataaaacatgaagtttgactcatgtgtatttttctatggaattgggttgggttggggttggggggggggcaaaggagggcaatttataggaattccaacatcctattcctttgcaataaagggttcaacaaaaaaattcccaaggatttgaatcctccataaagtccattaaaattccttcaatccaaaagagccccgcacgtcatatcactacagcatgcatgtttcctacattagtatgtactccctttgtttcatattaactgttatttcagcattatttttttgaaaaaatatttatcgttctcacatcccaaatcatttataggttgtgtaggttaccaacatctcctccctcgtttttcgcacgcacatttttaaaattgctaaatgttaacctttttttggcaaaaaaaaaacttctataggaaagttctcctaaaaatcatattaatatatctttcaagttttttagctaataattaattaatcattcgctaaaccacggctctattttgcatgctgtgagggaggggttcgcaatccctgcaatcgaacactgtctcagggaattcccaaccctatacctcatctagtttccatagctttaagtacattgtcatataagccaaaaggttgagttggcaatagagttaactaggagagagagagagagagaaaaaaaaaagatgaataaactatttcttatgcaggaaactagctctacacataaacaagaataaaaacaatgtgataaatagataaaaggagagaggagaggtgaacggatgaaaaattgttttgaagaaaccatccgttgagtatatagtttctacacgtagcgactatatgacatagcagatatagaaattacttgcagtttataggttggaattatctttcctacccatctttcatcaattaatacaatcatatattaataatcacacaactctcattcacttgtgtctcacgaaaaaataattatggtttacttatgaagttaacaatgtaatttaccatttcttcatggtttatgtagaaattttactgtaatgacaaggaatttgaattagaggaagtactaatagtaggttgtagtagtattaatttactcacgactcgtaatgacattttatttaggctaagttcgagcctgtttggtagagttttaactcttaaatttagctctaggagttgggtctgaagatgagttgtagagctgcctaaacccagcttcacctccttagtttattttgtgagagagttccacctaaatccactctcattttagatggaggtaaaactgtttggttgagctccaacttcagtagagatggagctggagttgtgcaaaacaggcccttcgttgcaatgtcctactacaccttaagcatgcagggagagattcctgtaggctacccgctaccatgtcaagaaacacgtcacgtgtggtaacgcgaaatctgccgctcgtacgtacttgagcccctgtagcctggcgcagcaggttagatggagtactacccgcgaacacgtcgacgtattctgccacaagcaatacacatgtacacacctgcacgcgcgaggacgtgcggtacagtaaacgcgcactgttcggcacgggccggtcgtacgcgtacgttgatcagtacgacgcgcgacggcctgcctctgactgatgatgaggtgacgggagccaaagcagcgtgcggtgcctgcggggcgcagcgctggcctcgccgcactggcaaatcaaaagggagcagcagtggcacgcgacgcagcgtgtcggccgatcgcctgcgtagtcccgggtggaaacgggtgttcgatctcccggtgcatcggccgtgaaggccgtggggggtggtatggtgggggaagaggaggaggagttgtcgactccagcggacaggggcgtgcaggtgcagatccgtagggtggcgatgggacgttggaagggacgggagctggcgctcgtgccgtgtggcgtgttgagtggctgggcagcgggcgggctcagctcacacgtcccatcgggtcgacgggtcgtgccgtgccgcggtaggctgcagcggatcgcaagccttggtgcatctcaatggatacgggacgccaggaggtggtaaatccgtgaaggagcagtgatagtgtttgagagatatttaactatttatcactcttacaactgatagttaagaatttattattggacccatatattatagattatgttgtaattcttaattttcacatcttaaaaataacaaacagttaaatgtctcagtatttgatttagttagttggaaattataataattaacctcagcgtacctcatatcttttggaaaaggtcaaatgggaaaacctttgcatgagaaaaccttttagcagtcttacccgagactcctgcttccggaaaagacggccaaaacataggatccgtctgctgaaatttttcactgtttgtgcaaagcactctgctagtaccaatgcgaggaacacgaacaccttgagaaaaagtaacgacattatgtaactagtctgcgttacaagtgaacagcactagagcagcatgccacctcccacttccagtaaaagttcgtcttgggacttggaggtcggggagatgcagccgttgaattttttttatttataattttttttattaaaagttttacaaaaataattttccattttgaaaattgacggaaatagtcgcctaccgccctctgggagggc

SEQ ID NO: 7117 - DNA, 19398 bp, Oryza sativa
tacctaacaaatagtgaaaccgggaaaatcggcgttccaattactcaactctcaccttttcccataaataatttcatttctgtttgaaataacgaaaaatatactagtagtaaacttaagaaacgtgtacacgcttcctacgtgtggccataggattcgcttttaaacccaacaggaagcaaaagaaagccgaaccaatgcatttgaatcactgctactacgacagttttgtttttttttttggaggtgaattgctactacgacgacagtagaagtatgataatatactcgctacaagatcgaacagaggatcttccggagtccggacgaaacgcgttaaaatttcagggacgaacgagggagggcttgggcttcctggctcctgctctccgctactacaaaccttcaccctcgcggcgaagtgctaaaacgaaagagaagacgaaccaggggccgggcattgcgcgtgaacacggagagggaggcagagatcggccgcgccgcgcgtaccttggatggatcgacgcccgcgtacggtgcagatcggtgcggcggcgcaggagcacgaagccgacggcgcgagcgtggaggtggtgggtactgaggctgaggcgcgcttcctttctcgtctgcgtgcggcggggtgctttgatttgacgggagggagaaggccttgcggggaaggggatgagtggggaggcggcgcggaaggaaagggtaccacgtcaggagacacgtgtcggctcgtgatacacggggtaggcccgagcgcgggctgtttcgctacgaggcacccggttcgtgtacccacagagttgggtgcagtttcgttaacaaaatctgttattatacaggtaaacagattcacagatatgcgtcgatttagcaaatacttttttagtcgctatctctaaattgtaactgtgagaccttaataaaaaaatcacgcattctctcatatgtctatatttctttattcacttttaataattgtaatagttattatcatcgtcatcatcattattctccgagaaaaataaaatatcattgttagagtacatgaggatgacatgtgggccatcctatgaataatggcgttcgttgggtcccttgcggaagcgccggtgtagagtgggtgggtgagccgggcaacgtggcggatagtttaatttcttgagtcacgctgtcacccgttgcttccggcacacgtgtctctaccggagcggctctacgcgtccacccgcgcctcccacgagggccagctgggtagcctagtcatgtgggtgacgtggtttgctgctccgccccctcctgggccccaccaacccgggggccgaaggttctcccctgcgtacacgcacgcaggaaagggttcggcgccgtggcatctcggtgatcagctgcatgcggatttggcttaactaaagtcagcagatctgctttatcagcacatagagtatagaattagtttttttttctatcgtttcattagcaatggttatagtatatttgataaaaattcacgggccggttcgtgacatagtcgtgggcggcaatttgcaaaaagtgtgctcttctagtgacaaatacgaactagtactcgtgttctgtgtgtagctaaaaatattactaactctagctactacgtgttccttagttttgatacacgtagatcgctagcacgagtggctggttgatcccgtgcttgatttcggtggcacacgctgcaaccaagctggaagtgcaacagatttcgagatcaccatctaacgtgcaattggagctcggagatgccgtgcacggcgcgccacgttgcacggtagctaggccctagctcgcgcgtgcgcgcagctgcagctgcgtcgcgatcgggttgccttctggccacgtagcccgctattcgcgtgcctgcgtgcgtgttgcccgtggggcccagaggtagcgtgcaaaaagattagagaagagccaacgacaaggcgccagatcgcggggcctccacattatcagcttatcctgtgccgtgcccgtctcaggatgggaatgggtaggacatggatcgagtctaaaccgttttaaataaaataagtttattgtactatggtttaatacggtcaatccattataagttcattagatcaatagattatctatgaatatataaatagatcatctacgctcctaatagataaaaaaagaagctcttattgcatgcttgtaaaacttgggcctgaaatttttagactcacattcacattataaaaacatatcaaatttagttgaattttatagagatgatttattatatggagaagcaactttgttcaaattttaagtcatttagacatacggggcccacgagcattactaagatttaaaaattctagttacatgcgtgtaaaactcgaacacaaaatttttaaactcacgttcacactataaaaacttgttaaatttagttgaattttataggaatgatttattatatagagaagcaactttgtacaaatttttaaaatatttatacatgtgaagttattttgggtcgaacctcttaaaccttaggttctaatgctttgagccatttgatccatttatattttttggaccgaccttaaaatccgttaggacaaatttacgaatagatttaatggataaatggatcgactctacccattcccatcctgatgcccgtctgaccggctatcatcgccggcgacacctaatcacctgccctgaaacggcggtatatactaattggtgaaggagacgtgatgctgcgccactccacggtggcacacttgaagattccgtaagaaggcagaggcaagatgcgatctgggctctttcatacttttatgtagactccctcctttccctttttatcagcgcctaaacaagatgaaactattctcatttagaaaagtaagaattaacctcgcgaactatcgcggtcgatcgaattaacctcttaacccgaaaaaccagacattgctcatcttgaactttcaataccggacgaattaccccctcaacccaatccagaatggttttgttctacgtagcctatgcgtggcaatctagttagccgttctcttttaaaaaaaataatgggacccacttatcatacctcctcttcacctattcctaatctctctctccctctctctctccccccttctctctctctctcggaagcacgtgcgcaagacgaggagggggaaccggtcagcgggctccggtcggtggcaagtagcggcgagcggtagggcacgagcggcggcagcgttttcgggaagaaaatggtcgacgatgggcggcgcttggcagtgcgataggcaacgatggcgtgcggcctagaggtggtggtatttgtggtcaacgacgagcgcttcagttctgtcgcgacaatggagccagcactggcgaccccgggggcaccctccttgagttcctccgctcccgcacctaattcaccaacgccaagcttcacgggtgtgctgctatcggtgtcggtcgcccgacgacatcttcactacctcccacctcctcctcgcctctccgccagatctggatgagacggtggatgccctccatgagctagcagagacgtcccccgagcaaactcgagctcctacgcacgggatcgacgagcccccgcctcaagcccacctcaccgttgctctgctgtcttcaacgccctcctcgccaatggcccaccatctccaacccctaccacgccatccccgtcgcgccccaccatatcctcccagctatcggccgtcgaccgcctactcgccatgctagggataggcgagctcgtgcagcccccttcctccccttccattcggactggacctcgccgccgacgctatgtcctcctctcgccgagaagcaaagaagggggacaatggggatatagaaaaaacaacgctgacaagcgggttccactggtttttatttatttttgctgaccgtatcgccacgtgtctgccacgtaggctgaaaaccactttgatttttgttagggggataattaacctggattcaaaagtttatggtgtcaaatatcccgtattgcagttatgggggtaattcaatcgacctccataattgagggggtaattcgttcttttttttttctttcatcaatgtataagcttgatggctgttcggttcatacactgattgtttgatctgcatgcagtaattgctttcacatgcatggtttggtagctctccagtttacatggccaattggttcgtatgcaaaggaacacagggacagtctttgcgccctggagtaaaatgggttacggggttatgcctcttttttttttatcttgttgtcagaactcaaaacaaaaatactgattatcagaagaaaatagagggagtatatagtttgtttttcaccgggacagccaataatacgttgtataatttttattagacatgtacaatgggatgtgaatgggatgtgagtgttgtaaataaaacaagacatgtttaattttcgctaaggtatatgagagagatcgaagagagagaatgaaactacttcctccattttaaaataagtatactcatctatatcatattggttttaaattaagtgtactattttgatacgaatagagcatataaggcatgttttttcagaaaaaagatttttttttagaaatgtaaatggttttttctggaatgtgggaccggtaagaacgggaggaggatatgactctcttttcatagtactagtaggagagagatttcaagaattaatgccatacaaaggataaaaatgggttattcgttggctcgaatagctatccaaacgacacccaggctaagcgttccaacatgtgcacaggaagtcagaaactactctaaaaaccaaccaccatacatgcattaggctgtgttcgcatgagctggataggaacttattccctccgcacggaaaacggagcggtccattagcgtgtgattaatgagagcagtccattagcgtgtgattaatactattaactcattaatcacatgctaatagaccgctctatttttcgtgcgggaaggattagttcccatccgttgaatccgaacacagccttagtttggatgcctgaagacctccatgccgccctcttctcatagaacacctccagtttagtgatgaagtttagtgatgttcatagagatagggtgtgcgtctatacattcacaggcgcgctatgagcacctacgtgtattctgtgattttttagaaaaatggttatgatagttgatgataataagtgaaattgggtttatgataattattcaatagtataaacgagatatataaatattataaagttgataagttgattttaaaaggttttgtagtaaataccgatgaagagtcctttctttcaaagtaattcacatcatttagaagtttataaaatatatccacgataatttataatctataaagaaattgaacaagcccattatcatggttggtaggttgtggaagctctgggtaaaagccttgctcaacctctagctattgcttgcatcgccgatgcctgcatgcgccagatccctatttggaggtgtcgtttagaagataatactctatattttggtgctcactgacttgtggtggtgcatgtttcgtttcttgtgggttttatgacttttgtcggttcccttataaataatcatgatgtcgtaaggtttttacccggtttaaaaataaaaaccatgctaactcccttggtctgaattttttaaaaaagaactcatgccttgcctaaaagtaaaaagaagaggatgcccaattaatcaacgatttcaacaaaaaaattatatttaattgaccgagaggatcttgcattttggtatagtacgaagctaacatctgtagtatcatttcttgttttaacatatagtaaaggccgtatttctttaaaaaatacttatcatccattcccacacacagcactaaagatgtatactagagtcaaaatggttaaatctagtaagaaatgattgtccggttttatgtactctagtcaagtcaaggggaaaaaaaaaggggagtgtttattttgccttgcctaataagcaattgcaacaataagacaaccgagaaaataggtacacgactcatccattttgcatggtgaatgcgagctacaaatagatagacactatgacctagttcatttcttgtaaagataaagattttaccttagtttttattatcacgctttttaaactattaaacgacttgttttgagtgaaaactttttatattaaagttgcttcaaaatattaaatgtatccatttttcaagtttgtaataattaaaacttaattaatcatatgctaatagctttttttttgcatgcccatatttaatctgaatctttataagattcgaacacaatctatgtttacaatgaatatggaaaggtacctgttcaaattcgtttggactaaactccatattatataacatccccaactatgctgtttttttaaaaagagggaatacctttttaccaatattttttctttttattatttaaataatcatgtccagattcgttaaactattgtgtctcatttttaactaggttgagttttttcttttacaaaaggagtacccttttacgaaccatatatatattttttctgtctcccttaatagagccttttattatctaaaggttatatccatgtacaacccatctcattatgaataaacataaatatgtatacacccttttgcagctcagtataacctgctattaataccaaagttgccaaacggaaatacttattctgcgaaattctttactaaaccacacctatcaaagatgttgtaacagtggcgctcaacttaacgaaaaaacagctgtcgacaaagccacagcgccacagacagcgaccgaaaacgagagagaaaagatcacggacccatggaccgcgtccacggaatgatcgacagggcagcggcaaccaagggcggcacgttgccccgcgcggctagaccgctagtagactagtcccacgactccccatccctcctccctctctcgaccactcccgtggactcctctctcctccccttccctcccctcccccgcgcgcggtggtggttcgccggagcgcagcagcagcagcagcaaaaggccgcgagggccgccgtcgggatccccgccgccgccaagatgaacgacgccgatgtcgccaagcagatccagcagatggtgcggttcatccgccaggaggccgaggagaaggccagcgagatctccgtctccgccgaggaggtcagtacttacccctcccctcgcctcgcctctcccccgcgcgtcgaagcttcgggaagcctctcgatccgcgcctccgaagcttttcacccgcccgatctgcctggtgcccccccgtgatctcgaagcgtcgagagctagaagttgatacttgatcctaccttgtttccgaggatccgagcggtttgactgttaggtttcggtttctgggacgagaattttgtagtcgaagcgtctaggcaataggctccctggttccgaggtagatcgagaggaatcgggatccggggtgtgtcgcttgagcagatctcggtgcgtggatctagaagcttccagatcacgagtttctagtccaataaagctcgttttcttactttggactaggaagtactgccacactggatggtcaattgttccgtttccgcccttctctgctactggttagtccgtacctgaatccagttgtggcttgaattgcgataagagaggctagtctaatccaaaggtctctagatcattctagaagcgagatttgggcttaagatgaactgaaacttgaatagggtatgcttgatctgttcactctcccatttcgcttctagattgtgctagaagcacaattggaggataaggttaacaatgagaagacggaaagaggtactaatacatggttaaaggaaatccttgcaacaactggtcaccaccctccatcacctgccaacttatgagctgtagttatccattaccattaaccagccataaacttttttattccttttttttatgtcaatgcaatcataatggagataggatgcatgaacacctctattgcttgttggcatgatgggttggccatgatgaatgtcaagcaacatacttgctgagtgggctgctactgttatgatcatttttacttgctctagcttgtcatttcagctgaatacaactgatccacctgcatggtttgatcgatcaccccttggtgtgcatgattggcaatcatgtttgctaccaacaagcatcatcaattgtgcaatcatgtatcacgccttttactatcataaggtccagcggacatgaacatgtttaatatgctttctgactacaactgtgctggaagtatgatttattcttgaagcaacaggggcatcctcatgtttgtaataaaagaaagtttcattacaatgagttattaatcttctggaaatacatgcttgttttgtttgcgtgtccattcttttcaaccccaccttttatcaataccaatgactgacaacaggtacttgtttgacgagtcagttgttcagattttagtaggctgtttggctttagaaaccaaaccatccagtatgtcttgataaatcatgggatgatcccatgaattttcgtgggatgatcctttcctcacttctccactaagtgtgtttttgagggataggtgatgatggtcaaacccattccgttcctcaaagtaaacaagtcatataggactgagttgtcaattagctccttagttggctgtgtgcatccttatttgatgcaaggcagagttatacttccatcatccgaaaaaaaaggctcaattaaccatctcattcctcaaaccagataaaccactatgcctttatcattgctgacagttggttaaccattctgatttccttccatatgttaacttatttgtataatgtgtttgcaggagttcaatattgagaagcttcaacttgttgaagctgagaaaaagaagatcaggcaagaatatgaacggaaagagaagcaagtcgaagttagaaagaaaatgtgagacttcgattcctcaaattatttatgttttcctgtgttctccgtatggtcccattaacagcatttcatgttgaggatttctgcagcatacagtacattacatcaatgcctcaatacattttagatacagctggaatgctggattctcatttgtgtgcaacattagtagtaaaagctagctacaaactacttcagccacatggttaaattggcagtaatcgtaatttgactgcactggttgttgagacacttaaaaatcaaattcggatgtgtagttcagtgcagtaaacttcactgatgagtcgactgtattttattttttagacaaaattgtgtgaactgctgcttgcagttcaatgtctgttgaagtgagagtatgtatcaatcatgatctggatgtaataaaagttgtacattaacaatcttacgatggaaaaagttagagaactatttgacaaaatggtaatacaaagtacaaactgacataacatgcatactcaaacattgtttaccttccttgcgtattacatttaatatggtactgattgcttgttagcataggtttcatagaatccacctgtatcactatttctgggtttatccatttgttaactgatgaggccttgttttctcctttatcagtgagtactctatgcagctgaatgcttctcgcatcaaagtgcttcaagctcaggatgatttggttaattccatgaaagaggatgctacaaagcaactcctgcgtgtcagccacaaccaccatgaatacaagaaccttttgaaagaactcgtcgttcaggtttgtatgaaatgttgaatacatcatctgctagattcttatccattaagcctttttgagcgatccttctgataattgtggaccccaagagggtttcacctatatagttaagttcgatacgcagaactgaattattggatattgaagtgttaaatcacattgtagttttgcaactctaactgcatgcacaaaagagctagtgctaaaagaacatctgtttatgattcacctttaaacttctcttatggacgtgtcaatttaattgatggaattaagtttgaaatgccatctccttgtttgttcactactgttattaacaaaataatcattcatcatattgactggaaatacagggtttgcttcggttgaaagagccagcggtacttctccgttgccgcaaagaagaccatcatcatgtggaatctgtactgcattcagcaaagaatgaatatgcgtcaaaagcagaagttcatcacccagagatacttgttgaccacgatgtgtacctaccgccttctccaagctctcatgattcccatgagaggttttggtaataaatagtttcttacccttgcagcctgccaatttgctactgtatatctgtactactagtaacagtctagcaaatatactaaaagaaagaaagctatcttttggactaacagataatctgctcagtaactctacaaacatgtataatttggaaaataacatcaatatgagtatacaggtcggtcttgggcctgttaatcagaagtttagtgctgaagactttaactctaccctgacctggacaatcagctcttatctggctattgctttggcatacattatgacatttattgaacagttgatatgctgaatagtgtaatactgcactaggttaagccacaaatacatccgtctaccttaaaactgattgaatatgggaagagagcactacagctcctgatatagcataatgaagtgatcattggcctgttgcagctctctctctctctctctctctctctctctctctctctgcatgttctagtataggacagcagttgggatttgaaatccatagcttcgtttcaatttcaatacttttactgtagttcttaatcctgatatggatcctgctgtttatgctaatataatgtgtttatgcagctctggaggtgttgtgctggcttctcgagatggaaagattgtgtgtgagaacacacttgatgccaggctggaagttgtcttccgcaagaaattaccggaggtgccttcgtttagctcgattttaatattcattttgttccaccaattccaaagtttcaaccatgtatacaagtagttcagtaccactagaacatttaaacatgatttgcatgttcttatttgtcaatttaacaatgaccctgataggctacagcacatgcagagcaaatggttataccttcatattttcattcttcttcccgtttccttgcagatccggaagcttctttttggtcaggtgacggcataatctgtgcatgtaatttcagctgcggtatagctgcttccatgtaattagctgcaggttcgaacctgcagctgcaaggaatttcacctgtttgtgccaaattgattgtttaaagtattcatccgctatgtaaaacactacctatttgttcattattatcgccgagcaccaactattcgcacgcttgtttgctcagaggtataataataataataaaggacggtcaaacgttccattgctgtgtaaacctatttgcctgttgtccctggcctgttggtctgtaattccgtatagtttgtgtaactctggtgtgggcctatttgattctctaccctacctatttattggtagtgctaaaatctaggcatattgtggcactaccaattttttggtagggtaaagttaattagcctacttttagtttgataccaatatggagccaaattttagtactatgatgaagaatatggccaaattgagtatcggccttatcaattgtttggcttcaaaccaaactaacatatttactatttaaattaccaaaattttggtagggcaccgttttagctttaatccaaaacggcctatagttcttaactgtactatccgccgccgccagttatacattgctgctgctgttcagctgcaaatactcaccagccccagaagttctacagaactcttgaggcttcagatttcagaagagtccagtaactatgggtggttattgttttctacaccccaacactagcgcttagtactactcaagggctgaagtcctggaagtgcattgagcaaatacactagcagtccacctgcgacatgactggcggaagccacggtcctcgccgctcagcacgaaacaagccggcgggtcgggccggatgacggtaaggccactctggcgaccagcgatgcgaaagggcggccggcggcagacgagacgagtgaatcgagcggcgcaatgctatcgatctaaagaaaggaaaacgaaccatgtggtctctcgttgtccttggttgggcaaacgctcctaccagcacaccaggccttcttgcttctggtccttgtctaataggccgatggacaagaacgtataggccacgtatatgggcctagggagcttggaaaacggggccctgcgagagcgcgcaggctgcacgccccggggacgggcctgagggtagggtgctacgtacaccttccattaaaaaaatcaactttgaagatgaatatggatatatgtttatccaattttgtccttagaaattggctctctattaaaaaaaataaatctaagattgaatgtggtgtaagtgttccgatttattatactaatttatatcacatttaattttagacatgtttttcaagggacggaaggagtacagtgcactggtgtacccaccaatctggcctccattgttaattcgctatgctgtggcaaatatggagttcatccatgacgcaagaatatggaatcttgtagtaacagcacctccacggctctactattgcctgacacagcgattggtggtttgttttgcgcgtatctgaacaggattagcatttggattaacagaaactaatctgaagctaggaacgctccacctgagctcctcgatctcgaccaatatcaaagtcttttcagtctgatggtcgtctctctctccatccctctctcttgactgattgatgctggttagattaatcgaagtgagacctgagagcgagcactattttattgttagaaaactatgggacaaattacttattttcagaccacggttcttcctctgcaagatttctattttattactgtttttgtgggcgtctgacattagttaattagtttcaagttgatacagattgcgtttgaccatctgcctatctaaagatacgaataaaacagaatcgatgaagatttgttgcgttcaacagttaaatatgcaataacatggattcagcaggttggttctgaccgattctattcatgtaggtgtgcgcatcttccgtgcagtgacttaaaaaaaaaacgtctactaatcgtggacgttgattgagagaaggatgatctagatcttttacgacaaacctagccgttgaaacgggaaatacatatgatacgaatccgtatcggaagtatgaccagggtataaaaacagtttggtcaggtttttcttttgttttctttagaacaagtttaatagtataggtcactactaactccaaatcatctataattaatgtaatagctaattcatataatatttgcttactatactattaatatctggtcccacctgtcatacacacattacgtcttggagtccgtgttgcagctggctacagatctgtagcccgttgctcatcgctcttcctttatctctttataatatgtttatagctggtttatagtatgctattgtacttgttcttatgcgacctactacttcgaacggttgatatcaaaatctcaatggtgtgctgcccacctgcaacagttagcgggtaaagtcactattcttaacaaacggaaagcgatctcagcgccgccatgatcttactaaagtacaacagtaagcaacagctgcaagctcgctactccgagtaataaagcagagtttgtgcggcacacgtgatcacttcgctcgccgtcgctccacacatccaccgacgtgcatgcagagcatggaatgcatcagagagcgccatggcagcttttgaacaaggcaattgttgcctactggagtactattagctagaatacgacccaccccacgcagcacctgcgctgcgatggttggatggagcgaatctggccgcccaccatgcaacccccccgtgcatggctggaagcgcgccatgtcacgcccagcttttctttaatctctcatcactggtctgctcaccatcacccttggcagcttgcttgctcatggttccgaacaaatttatggtgttgtaaacaagtttaatggcgtacacttgttcgaactcctcgggaaagcatgcatggtggcggtgtgtgaggaggagagagagagagaggcaacaacaacgtacaacaacgggggcatcgaaccgtggagagcatggcatggggaggagtaaacaatctcgtgggggcagcatatataggaattgaaaagaggcagcatacataggaaaagaccaccaccacacggtccacacaccatacgtacccctcgtgcagcggtggaggaattttagccgagcgagagcatcgatccaactcgcgtggcgcagcatctgggcgcgcggggggagcgggagcggagggagattcgccttggcgctggcttaatttggcgctagctggcggtggtggtggcgccgcgcgcgcgggtggccatgggcggcggcgcgcggcaacggcagatgcgcgtcgggatcggcgcggcaacggccgcggggcggcacgtgttacaaaaccggccgtgcgcccgcggatcattggcacctgccaccccccctatcgaccgcgcgcgcgcaagatcggtcgatctatcggctgctttattagggttttctccgatcaggccgggagctatgcacgtgggacgccgtacttttccgcggtggcggtgttagaaatttttttaagtacagtcaaacctagctataacttttatttgctacaaaaatttcatcaccaatttattcaaaaatattaaaatctaatagagttttcgccggtgagactgggctaaccggagcggtggctctgcacatgcttttccgcttctacggtatagcggggacagacaggcgagttttttttttctcttttagaaaagctgaattgatgtcgatagttttataggggaaattttcgattaatagacaattatattggctctaagatcagtgcaaacagggatgaaaaaaaatcaaaacttacttgcgcttatgatggatcaaaaccgtgaccttgccttcctgctaggagtgcgctaacactgcactacgtgatttttgtgatggaaatatgccatacatgcaagttacaatattattacatctaattaattacactataattacatttaaaaagttttcaaccacccccccccccccccaaaaaaatgttttcaaccaaaaatttgttgaatgttttctagatactccctttccttttttttttctaataactagctgaatgtccatgctttatgatggataaaagaaattataatattatctaaagcttgtatataaaatatattttaaatgtgttactcgtgtttttccgtcttaatttgattttatacacgactatccattcatatatttaattgaggagtaaagataaagattcacaataatcacatgatgtttctgcagaatgtggaaaggcttatatgaaataagagaacgaagcacgcccatctacaggactatagatttggcagctgcggaaatggtatatgatttatgacagaagttgtacagctattgtctctgttcagctcattacgtttgttgaattctacgtttcaatgttgtgctaataaatttaagaccagatacatgtagatgcttgatttatttctcacactatacatatatacataagaggtttcttcatcctcgcatatgtatatattttcacactatttgcaagctagtaaaaaaattaagggtgtgtttagttcatgctaaaattgaaagtttggttgaaattggaacgatgtgaaggaaaagttggaagtttatgtgtgtagaaaagttttgatgtgataacaaaagttgaaagtttgaagaaaaaatttggaactaaactcggcctaaaccttgaggaaccgattaattagatgaagaaagtcgacaatgtcatctcaggacttctctaatacattgaaggaactaattaatagagagggatgcatacatacatacactaaatatctattcctgttttatatatatatatatatatatatatatatatatatatatatatatatatatatatatatatatatatatatatatatatatataacaagaacaagtgtaaaagtgactttccgattatgttctcacttgtgatattagtttgtttacctttctttatgaagtgatatcgcttaaataacaaggatgtgcactctcaaaactggtttatacaattacagtacattccaagtatgctaatctcataatttgggatggagaggacggtagcgaagcttattgctgaagtcccaccctacaaggcttttgcagatgttgcacgtacggctctgtaatttttccttcttttttcccagccgtaacaggccgtacacatttcttttccttcatttataaaaagcctggataagatggttcgtcccacacacacacacacacacacacacacacacacaacaaaaaataattccacaccagcagaaactgggtcttctcgtggacaggcaaacagcaactacagctagcagtacatcttggactgtgttgaacacaatgtatgccctgcgacggtttacaatattgccataacgtaatcaccccgctctaaaaaaataataatcacgtaatcacttggtacttcgaatattaactaaaacacatgcgcttgaaatatgtatacttattatcatgaaaaaggatttaagtctcccattccagtaatttctgttcatacgttgtatcagctggtaatctggaatctcacattccagcgttacaggaatttcagttcatacgttatattcaaacgtttccaaattccaacacagaccggtagtcgtccttgactcctctcgccatttttcgagtatgcctttgagtcataactgcagcatactgatacgagaggatacattgacaaaatgaatttgtcagatgcctgatacacagagaatataattgtgatggagatgcaaaagaaaaatactacatgattgctaatttgatatatatgttccgggaaagccatccttaaccatatagtactagtatatgtcctctgggtttacatcctcctctgatgatgtatacaacagatcaatctcaatgtgtccaatgtgcatgcatgcatgtaagcaccactaatccttgaagttgcgtttaattccctacaacagatcctagagatagtagatccaatcactctttacacaaatataactcatcgatctctacccaaatagtaaattaaatataggtcttaatttatacaatagctagctagttacagaatgccgtaagagaattcattaacaaactgccaacttctgaattaactgacctgaagaatctgagtaacagaaagtcaatgtttagctggctagctgcccctgaaagtggatttcggcaatgatctcagtaaaaccttctaggcctcgtggtaatctgagcacttatgcaatatgtacgggccgcaggatgtgaataaagagatttccatgcatagacacatttacaataatgttaacgttgacatttttaactaataatgctttacatgcctgtagttttgaactgaggccgagtttactttcaaactttttcttcaaacttccaacttttctatcacattaaaactttcttacacacaaactttcaacttttccatcacatcgttccaattttaactaaactttaagttttagcgtgaactaaacacaccctgaatattgtatgtacaataacagcatacagttggggacatatattccttcctcaccagtatagtaaaaacacaaaccgaatcaaatcatacttcagtagatacagcttaagaatgatgataaagcactgttgatgacaagccatatccagacaggcttggatagtctagtcaatgcttcagtagatttctgtctgtagatttcccaggtcattgaccactgatataaaaaaaaagtccaaatcttgaaactgaacacactggacataaaactcatatagaaatctgaagattattattaacattagggcatgattttatgcacgagtgcttgagcaagggagcacccttcagtccaaccacaaacggcgcagagctaaattttagctcccgcgtcatccagtccgctaccaagagatacactcctgcaactttcttggtaggtgaatggatgattcggcagctaataaaaccctacagccatctgagagtggactgaagagagctctcttcttacacatgtagtcaaagccacaatcttggagcaccaaatgaattgcaaaacaagaaatacaatggaaatcttaaacaacgcggcaaagaaaaggaaacctggtaaatctgcatctgctaatccaatggagacgagaatagtgagggtgttcataaagaacttgtttacttcagattattatcgcaaagaacaccaattaagaaactaactaggtcacgaagatgacaggaataaaacataaatggaatgaggggggcaaagcattgagagaagctacgctgtaaccgggcaaaagaaagagcagatgtatatttgggtttaactggctatcggcctggaactgaaggagaagctggaaggaggcaaggagcaatgccatggctcaggaatctgcacacaagagctgccttaaatagtccgaaaggatggctgaatcattacggtcagtacagcctgtagagctactagcctatagatgactatggcctatactgtactcccatggtcctaaaaatacttagagaacccgcaatagtaaagtaaggtgttctctataaaacatatacatcttagcaatagactagattaacagtaaaccacctcaatagtatgtctacatgggtatctatagctctctaatacattgcctcgtttttctctataaattatcaccaggttagtagatagttttgctctctcacttcatttaatctcttccaaatagaaaaatatgctgacatggatcttttttaaatagctatagataaccattgcgggtgcccttagagggtgtttggg

SEQ ID NO: 7118 - DNA, 30315 bp, Oryza sativa
taagcaatatagaaaaaatgcacgtgcgttgcaacaggtaaagacggttttttcagtgatatatcaagagaataagtggtaagcaataaataaattaaaatattaggatcactatacattataattgaaaatgttaatgaaaattctaacattgggatcgctatatatagattataattaaaaaaggtaatgaattttttttcttggtttttggccgaaagcatttctttcttttcaaacgtaggctagtccactacctccttcgacccacaaatggagctgtaagcccagctcgcaccgtatcgtccactatcatcttcaaccttccaaacatagtcacgtgctagtacggttgcctgtcacccaaaattggttgcggacttttaatctactcaatactctttctgtttttccaaaaatcagagcgtaaaacctgggataaaaatgaccggggaagatggccgtcatcatcggtaacggttaaacgaagattagatctggcaaattaaagccgaatcgaaagggaaaatcataaagaaaatgatgagggaggagtagggaatcgatttttgcaatcaaattggaggagaaaacgcactattgatatggcggcggtgggaggcatgcggcgaacggatcggattaaaaatccggatgagtaaaacaaaaggcacacgggataaaaaatggcgacaaaaaaatgacgaaaaaactgagtaaattgcacccacattgcaacaacttggtaggtggggtgcaatttggtgcaataacttgagaaatgagcattatagtgcaacaacttagcagaaatatgcaatttagtataataactttagaccatataaataaagtaggtacgattttgatacaataaattaagaagttatgtgacaacttaattatttggagcattttttatataaatttaattttttaagtatttattttgacaatatagtagcgtggatttgtataagcatatttatatttttatcctaataactaataactaaaagttaataaaactggatgtaggaattattacattttggttgatatttgagaaggtgaagaaaacaaaaaattcttaaaggtaattggatgcaaattttatgtgcactataattcttaaagattaagttcaatattataaggtaatatctgattgatatttgagaaggtgaagaaaacaaaaaattcttaaaggtaattggatgcaaattttatgtgcagtataattcttaaagattaagttcaatattataaggtaatatccgtaggaatactgtgtaatggcatattaacatcgtgaaaaaaactcacctagcatatgcttcgccaagttgatgcaccaaaatactaaattgttaagttcttgtactagaatgcacccacttgtcaagttgttgtactcggacgtccaattctcaagttcttgcactatatcgttgttataccgtgggtgcaatttactaaaaaaacaaaagcgcccgggaggcgcgcagtgaacacatcggaataaaaaaaagacgaaaataaccaaaagccttagcgtgtgggcaaaaaaaaaagtctttcgcgtgcaaaacaaagtcgggaaaaaaccggtgaaaaaaaccaaacggacttttttcttttttttttactggcaagattttttttctttttttttcgagagacaaacaatttttattacgacgacatatgtttttaccgactagagaagctttttttatcactttttagttggactttttcttttcttttttcacctttttgagtcggatttttttatttctttttttacagtcggacttcttcttttcttttcttttttacctttttaagttggactttttatttctgttttactaacaaagaaaatttcttgttctttttaagtagagatagagattagtaccgaaacataaaattaaaaccgattcatacacgaatgtaccggtaaaaacatcttttttttataatagtagagatagagatgtactttcagtcaataaatagtagagacatagattgaaagaagagtccatataaaacccaatacaagattaatcaaaattcagaaaaaaataaaataaaatccgatattatatatatatatatataaagaagattccaagtaggaatacaatttaaaaataactgaaattcggaattaaaaataagaaatattgaaagagagtccttataataacccaatacgatattaattaaaatttagaataaaaataaaataaaatacaaaatcagaaaaaaaaagaacagttcatgtaggaatataatttgaaaataactaaattcgaaattaaagttaagcaatattgaaacaagagtccatataagaaacaaatatgatattaattaaaattcaaaataaaaaataaaataaaataaaaaaacagaaaaaaataaaaaacaagttcatgttggaataaaatttttaaacaatttaaattggaaataaaattaagaaatatcaaaagaatagtctatatagaacacaatacgatattaattaaaattcgaaataaaaaataaaataaattcagaaaatagaaaaataaacataagagctcaagtagaataaaatttataaataactaaaatttgtaataaaaaaataaatactattgaaataagagaatctagaacacatgacaagattaattgaagttcaaaaataacaaataaaataaattttaaaaatagaaaaataattataagagttcaagtaggaatataatttatgaattaaaaatatcggaatgaaagatatgcaattttcaaaaaaaaaagtcaatctagaacacaacgatgacaaatgacaataaagagggaagaagcaataagcctataaaggagtagagtactagtggttgatgggatatctaaaaactataatcaaaaccccaaatagaatcccaatgatgattaagaggagtgacaatgggtatgtcgttaagcagcttggtcacgacggttggcgggacttatcgagcgtaaaaataaaccccaatgataatcatgtttgatttttaaaatctcaataacaataaggaggggaggcagcaggcaggctgtagaggaatatagtggcgaagccactaacaatttggcgagacatatagaaagtaaaaaaacaaaaacaataattatgttcgatttttaaaatcgaatgacaataaagggaggtggcagcggacggtccatagagtagtaaattggcgatgtttgacgatacttctaaaaaattatgaaaacgaaacccaacaaaacaatgagctcgaaaaactataaggcctaatttttaaagttctaaagagaatgaatagaattagtggtagatcgagtaagaaaataaaaaggtgacaaatgagcaagggtagtgagtgacgtggcttttaaaaactataaaattatgggatgtttatgtgctctaaaaaaagttgcacgaaaattaaagatcatcagtagctgagattaaaaataggattagcacttaatcaagggtattttagtacaccgatattgggcctatatccagcccactccaactccatcgatagcacgatattcctccagagccgttccttctccaaccacgattcctctgccctcttcttccctggcaactccatcgccgccactacgaatatgaagtgatgatcgtagcttgttgtaaccatacgtgaatatatacatgtaggaagagctataaaaaataggatagttagttcatgttagttagatgtgcgttcaaaatttaagagattttgcaacaaccaaaacaattacacatgcagttctattgggataaaattctctgcggtgcgtccccgatccgatgtcctgctaccgccaagcccttcctttgcagctatagccaagcccttcctttggagccgagcccttcctttggagctacagccaagcccttcggagccgagccgatgtgttttttaaagtatgacagtaacaaagccattggtattatgaggaagaagagggcatatgattattttttaaaagttttagttttgacttatattttaatcgacgcggtgcaaacagacaagatgaataggagattgaaacaaaataggtaatcggtttgatgactgtctcgagattttttaagccacaactcaacgatacaaacttattaaagaaaacaattgagttttctaatccacatattaataaaaaaaaatatttgttttcatacataattaattgtatatataagcaattcagcttcttagtctaattatttcaattatttatatagtaatcaaaataaagatgttgttgagcataatagatcacatcattccagatgggtgcataaactgttaaaaatatctttttttaatcttatttaattagattgtgatgaattatatttaaaattaaacctaaaactaaaggttgctacaactagttcagtcgtatagaaaaaaatgaaacatatttagctgtcaaaattagatctaaagagtattatctaagacaaaagattgaatcgtataatataagtattcagacttttattaattgtagagatactatgtttaagctgctatataacattttgttcattacattgcaaatgttggactaaggtaatcttagagctgactttttgcaataatcggaaggtgggctaagttaattttagagctaactttttgtaatcatcgaggctatggaaaatgaaatttattgtttaaaaacacataagaaagtaacattaaggtaagcaactttgctataacccaatatttttggaccgacttgaagatttagaaaacttttgtactttttttcaaacaaatagtaatggcaaaataagtacttggatttgggatgaatctttggcaagcaaataccctataatttacatctctatgatcaaataagcttattagaagctctctcctagttacatatgcttctatgctcatttgggtatgtaagttcagttgatgaatctagagtgttttcttctgatcattgactgtaccgtttatatcatctatttatatattaaaagttcattaaacttcattcctacaaacactcttcaactgccaaatggcactcatacataagctcctaagttgtcaggtggcactctaataaattagaaaaaaatcctataaattctaaaaaaaaaaaagaaccgttggattttattaaatctcatggatccattatttacaaccattagacctatcttacgaaaaaaaatctagctctcaacccagccccaccctaagctgtaggggcagacgtacatatgtactttgtaccctcctattcacatcatcatctttttcctccgattcctccctgtggtaaaaacaccatctccccgaaggtagcatgacaaagacatgatctatactctatacttaacataagccaacagggaaaaaaaaaaggattgtgacatatgttagggggatgtcgatactccagcaaaatttttgtaaaagaaatttaagcaactacagcatctaaatcatataggaatttttttatccgtttatgttgtttagattatttatgactaaatttacaattagagacatatattaattataattaacctttcaaaggaaatatgtaactgttggggccatattttctaactttgcatgtcattcgagcaattataaaaattacgaaaaaaataactatatagattttgtcatcgtacttgacatcacaataattaattagatctacaatgataaaaatattcatgtttcttattgtaggaaaagataagtattaatcaatcaataatttttttattctatttgtagttaataagtgtaatagttattacaaccccttaaacatgtaaaaatcttacaattatatgcacacatactatctcccgttcgacaattcccttccctcctctccttgttaatttcttcctctcctaactttgaattaacagtctaataaaaaacaatatatcaataactataaagctaaatgattataattcttaagttatctccaagttttgtttgtttgaactgttgttttatgtataattaaataaataatttgagacctatattaccatgtttcactatataaaaataaaaatacatcatttcaaaacccctatcctttgcatggcaaccaaatagcaacaagaatgaaacatgaaaaacatagacgataactattacatcatcttaatcattctacatcctctatagagctctggtcatcacatgttacgtcttaaatttattttttaaaaaaattagaagctacaggccatcgatttccttttaaatcggtgaatccattattttcaaccattagatctacttttagaaaaatcttaagccgtcatgtgttacatcataaaaattagaaaaaatatattagaagttcagagaaaaacaatcaaaacatcggatcatcagtttttacttaaatcatttagaagagaatagaaaaacaaacttccctccaccttgccctcctcctcacatatgcacagctgatcaactttagttaccttgctgatcaactccaatcagaccgatcgacatcgattcgagaaacttttaattccgctaaaagttttgatttttaggtactacaactattcaccccccctcccgggttggcttagttcttgctgttcgatcctacagtttcagcctctcttcagatatgcttgagaattaactactccctctgtttcacaatgtaagtcattctagcatttctcatattcatattgatattaatgaatctaaacatatatatctatctagattcattaacatcaatatgaatataagaaatgctagaataacttacattgtgaaacggaggaagtagtcaataccttgatagacagacatctcctgtacattttggttgaccgggttgtgtttggtgaaacattttgccatagagagaacacaggctcaaagtttatgtgtagtacttatggctccatcgataggaagcatagcacttaaggccatgaacaaggagtgctagctccgtgttcttcctcctcactttgaacgtcaacatactggagtgggcttatactttcagaatcaatgcttgctcaagttgacatctgtgtaatttgaatgtagatgcgcaaactatcgtcagtgcgaggttatgtggctattccattggacatctgtgtaagctgtttagttattatcagtagcgtgttcaatccattcaacgtatgcaaaaagcaaaagggaacaagaaaaaaaagtcaatcgagctatgaacttggttatttgcatcttggagggccaagattcaaggaaccactgcatttggaagcactgacttgttggcaagttgcaaacattatctgaccgaaaaaaaccaccagtttgatactattcgaaatcactgcaatgagtgagtgacacaatggagcaacaccaagagtgcactgcaaagccggttttgatccttacaccacacaaggcgagagggagacacacccgttgataatgttgttacaacatcgacatgtccatcgatatctgaggtgctacatggcgtacctctgagtccaggtccttgctgtgttctcgtacttgtgcctatctgtcttgtacatgtgggcgatctcagggaccagaggatcatcagggttcggatcagtcagcagggaacagattgacagcaacacctgaaagcaagcagagagcacatgtttttgcgggattcgttcagcccaactgcgagagaccaagcaaccgcctcgcaaaaggaaaatagcgttaagcgagaaaggaaaccttggaaatggttagtgctgggctccattggtccttaaggatgtcaaggcaaatgctcccgttgctgttgatgtttggatggaaaaccttggtgcgaaacgccacctgcatattgcatatcatagacgtcacattcttcagtcagtctcggtgctgttgtaaagctatagaacttaatggatattcagactgaaaaccagaaaccataagaatttataattgaagtgatattctttcagaatgaagtaaaagaacaccttagtgataagtgagaagacaatcactaccaaaccattattcggttatatagcacagtccaggaaacaactttgttatatactacaaagattcgagaacactggcaacataactgaattagcattattagacagcagctatgctttcacttttgcatgactacagccgtaacttgcaatatttatccaccttgatttcccaaaatttgatcttcaagaatcaggttcataagtggctttgattttaagttcattctaaagtctaaacctgtatgttttcaacaagttagttactggcatgacatgccaccagttgctcttgtgcacaacttcagcatgaactttataatttataccacgttctcaatcccttgaatgctttagaatagaataaaaaatatgaataaagcaccaattcaatcaaccacaaattatagcatctgccagagttctatttttatatgtgaaatgagcagaggaatagggttacagttttacaaaacagcagtaagaagatatatatgactaggaatagtggacagataaaaagggagtgataagtcactgccaagtaccttgggtggtttgaagggataatcaggagggaagtggatggtaactaggaaaactccaccagcatatgggctatcagatggacccattatcgttgcctgccagtggaacatgtcttcaccaacaggacctgtcaaatagtaataaatcatcactgttaagaaatgtggctaggtgcagtcctaggctactatccattgcctgataaccatatcatattatgggcatatggtctagctctacagctttgattagagatgaaattgcatgataaataagggtattgaaacagggtcaaacaaaacagaagtaggctgaaggacaaaagacaagtatccattgttatgtgcacagttaagctcaggttggtttttcttgaccccaaggaaaattggaagacattcctttgacaaaataacagtatgttaccattttcgcttaatggtatacaactagacaacatgaaattgtcacttcttacaggtatggacagggtgagctccaagctcaaaggaccaaacttattctagccacactaaatagtacttatgtttccaatgtgtaagcgtggccgccatggcacatgcgatccaactagttgaacgaagtttaaagtgcaagagtgaaggccacctgtccataaggcgaagaaagttcatacaagtagtctaacaaattaagtttattctattgaatattttgggccctgctataaattttaaaaactagtagaaccactacaaaagataaaagcatatgaactgaccaatggacaggatgacaggtctgacagatcctgggttctagaaacaaagatgcagcatggatgcagttgttttggtataaaagttctcctggatcattggaaacaaagatgaagaataacaactagacaaccaactagttttctctcgaataaggcaagctaatcacttttctatactgaactacatttccattgttttatgctatattagtaaatgatgagctaaattagaaggaatagtccgatttgatactcatggtatttatagtaccacaccagcaactcctttgacaaagcacttgacaggtaacatttacatttcagaatacaaatcgcacagcaccctatatgcaatattcagctcagttaattgacacttcttgagcatacttggatggtgagatttagtttgtaaagtagactaaatcacaacaataacaacaacaccagcctatatccgccatggaaagggaagtaattctaccagaattcatcagggcaaatatagtatccctgtcaatcataatagcataaactaatccctgcatgagtacgttcagacaaactctgccgtattaatcttaatcgatatatatataaaacctccatccgtaatcttcataagatgaaaactctaatcatacagtgatctgtctttcccctcttttgctggggcaaagctgagtacagagagttactccagatactgctaagctaagcccctttgatgtatatgacaaattggagagcaattttccattgctattctacggcaaagcagcaagcacgtggacaaagaagtcattcagaagcacatgtacaaaaatctgactcctgtgcaagatgtatggcctagaactgcaaaatccacgcccaaaagaagcaagcaaaagaaagaaagcaagacctgcactgcatgatgtagggggatccttctgcagatccttgagctccttctgtatcctctttgacgccatccccaattcccccttgcttttcctcttcctatctccaacaacaagaagaacaatcaaaccacaaatcaagcatcatcaaagcttaatcagtgcaaattagagagcactcgcaggaaaacaaacctgtctaacggagagatttcacttcttttcttgcctcgcctctagctgctcttcctccttgcaagaatcaataatggagttgggggaaaggaaccaagaggaaggaggggtatatatgtcaaagaactccccccacttgctaccacaggtttgcgtgctggttttgtttattcctttcaccaaatcatcggttcctgggggcctttactttagtgatgccatggctgatcaacaacggcaggtgaaagcggaatggtatcgatcaaatcaaaatcaaatgccatccactaactccccctttcatattagtggctgctcatgaacagaacaattattctcctctttttctttttccttctcttcttaaataaaaaattcgatttgatttgagatggagatgcaggtagtagagatgtatgcattgtacctgactgtatagcattccgagcattgaaattgacgtcaaaaacggtagtggttgaccggttagccggccgcgtttttcatcgtggtgatcaaaaaaataaaagcgttgaaatggcttgctgtacccacagattctgttgatgggccttcgccgactgatgattgattcctcgtggtctacatgtcagtggcaggatcgagaggatcgaattcttgcgtgtttttgccacaaattggatttgtggatcccagtttctgtttggtagtgtgaaccgaaagatttaagaatttggttctcagaagtttctcgagttacggacttgtggtgctcaccaatacggagtgctttagttgggaaaatgaaagctccttggttgggtttgggttttcttttgcatcttcctgaagtgatcgtaatccataggtagtacagtacttagtactaggtactctccaataaaggtctgccaatgcttggctgttgctttctaaatagacctgattaaatagaaaatttatttgcatgagatgcaagacaagttcctagttttatcacacaacaacaggagggttttgtaggtatgcttgtggaaatgaattaagttctgattacagtgttttttcagtcaaagatggacaggccaacatggcatttaacagcagcagcagtgaacagtaaggcagataaatatgtttggggaggacgtgatcagcgtcctggttggcaagaattctcgtcattcaaagatgctggtcaggataattgatctgccacacaggccccagacactaagccgaaaattttacaccttcatcatcagctgaagtgcccttaaaaatcgctgctttgcccttctgttccagtaacttcaaagccctcatgagaacaccacggtcaattccggcaagttctgcaacagaggtcgtatcataaaactatccaagagcccaacggaaaataaattatgtttcaagcttattaagccaattaaggacatatttagttcaagtagtacttttatgattttccttattggacaagtaggtattttcgaaatttggagaaagccaacagtgaaagtagggtggagggtggtgtaatagtatagattgtgagagccaacgatgaagtagggtggagggtggtgtaatagtatagattgtgagagacaacagaggtgatgtggcagaacagacaccaccactagtagtatagatagatatagataaatcaatttaagcctcacacttttaacaggccacttttaacaggccagaaacatctttattggatgatgatgatgaagaagaagaagtacaaaaaccaattaatgtatatgggtgttctgaaaaacagccaattagttggtcacagaggctaaattgtgttgaatagcgttcgctggagtgtcctaacaatgtcggtcaacaaaacttataaataatgaaatgtttggcacacaactcatgcttgcttagtcacaatttatcaatctttttgacaaataccttattgattaattttcggtatgaacagtatttgagacgttagctgtccattaaacactgattaatcgtctgtcttaattaatggctttgcagtgtcccatccatccagagactacctttgttcaaaataccgacgtacaagtgaaacatcaagccaaaatacaaaaaccaactacaatattagtacccctaccataggttattaggtttccaccacaaaattgttttcaggatagaaaatatgctttgagacacacaatattgacagttggagaaaaggaaaatttagtgccatgattctgaggtttgcagattaccagtcccacgtgtttcaattcctgaacgtatttcttcaacagtcattacactatcttccagcccattatcctttacctacaaacacagggtagagagaaatattatgacacaatgaagacaatgccactatgtattgttcacaaataattaatagatagcgcctaaacaaatgccgaatataaaacaatcgtacaaaatttaatatgtagttagcccaatcttgtatccgcaaccaaagaatgaggcacttcttatgacctttgtccatccattctgcacgtcctgcatgcagtttcaacatagatttaagaaggtgcagagcatcaaacaaatgattttgtaatgcacagaattactatagctgtgataaaagataagagatttaatggtaaaatggaccttcataaacaagagcagcaaggaatacttcctttgcttcatggctaagagatcctgcagaagagaacaatttatgtgaattcagtgcaacaggtaagagtgtaacgagctaatcaagtacaattattttgttcttatgtactcaaagcctccatagccctttgagtgcattgcagtcatgcctcgttgctgagtttttttttttttaacgaaccaaacagtttgatgattagctactgcgacacatttttttttatgaataacagaagaaactagtatgtaagattaagataggtaaatcttactctcgatctttggattggagaacaatgggaaatcttcttctagggagattatatatagcttttgacttctacaataatcaagtatcagatctttccacagctgcacttgcttttcacgtgtttctcgcacaggctgcaatctgagagacacaaattgtcatgctaccaatctcagttgtgttgtttgaccgaattgttaaagaaagttttaacagaagtcagaggtttttctgtagaataatccaaaagattgtggttgtgaatatcataaaatgcaagaagatgaaagcaagaaaatggttcaactgatacaaacctgttgaaacacaagatataccaggtatccagatcttaacatatataatgaaatttaattataaagccaagacataagatatctacatctagtgccaacaagataagaacataagcatacacttgcaagatatcaaatccaattatcaagtactgccgttctaagtagaagtgttccatgcagtgtgacattgtgaacatacacttgggcaaaggcatacttagaatcaaaaggtgcatattgtgttcttcacttgcaacaagttagttgttaacttgttaagttctagaaattttcattacaccttattgataaggtggtctcaagaatcactataaaacgcgttcgcgaaaaagaatcactataaaacaggggacgatctgccctcagcagagatgaataaagctaacaaaatttagagttgctagctaagtagttaactcacaagatcatatcgtacggtaccctaaatactgatgttacgattccgtaagcaactctgggagccaaacaagccagtcacttgtaggccctaaaaactggaaattccggcgatgccaaggaccactagtaagcaaagatcctaaccaattaaccgaatcaacatcccacggtcacctcttcctcctaaagaccgcaaattcacagatcacactgtacaaacatctgtactgaacctattgtcaccacgggaagagctttgggtccctctgtaaaactgaaagctggggaggaaaagttacgggggagagcgagagcaacgagggggggggggggaggggggagggattacgtgaagtaaggcgggtagttgaagaagggcgggagcctgaaatcccccagcctctgcatctcctccggcacggcgccccgctgagcaaccccacggatcaggaggggggaacgcgagcgctgggcggctgcctcgcggctaaccggcgccttcgtccaaggcgagcgccggtcgagtgctccctgcgcgtgcggcgccgtcgggccggcggctcgccgagcgacgggcagcggccgaggtgaggaggaggaggaggaggaagaagaagaagtcgcgacgtcgccgtgtcgccgactcgccgtgcgagatctcctcgcgcggtgggccggcggctgggagggagttactacttgggcttttttctgtggactaagcccatctaaaacttacgttgggcccgcggctctcaggccggccgagctgttggtttgccgttgttcgcgtccaacggcgcgcgcgccggcgtcggttgaggtgcgtcagctgaattcgccgggcacgttacgacgtttggccggaggcgtgcaaccgtgccaccgcgtcaggtggttggctggtggccggcgcacctaaccgcgcgcaaagtagaaagacagtatgggttgcgaaagagcacgtaatctagtcattgcagtgacctaggtagcatcatgaaatattagagttcgaatcttcctacgagtgaattttaggttggtttatttgtggagctaagtttccaatttaaaagactgtatatatccggttgggtctctaggtcgggtaaaaaatacatttttctaaaataaaagaaagatagtatagatagaatggctggattgatgagaaaatgatctcaacagaacctagtagaaagatagtatggataaaatggctggattgatgagaaaatgatctcagcagaacctagtagagaagaaaaaggaagaaagaaagatggtgcctctggtaaccaataggcgaggatgatgacattgattagtgacatctgtgctgaagaaataagagcagtaatttttttttgagaccaaaataagagcagtaattgacaagctagtgtgagaagtggatggcagccatgtgtcttgcagttgcaggttggatttgatcaaatggaagtcaaacatatggcgatgcttacacacgacttttcaggcgatctgttgcatgcactcacactgccgaggagtaaatcaaacatcggactagtttgcatttgttctataaacaaaatagtatagtagcaggggcgtatatatcgttggggcttgtcagggctcaagccccagctctgccgccaaatctatcatcccttgcaacatagtacagtactgatagccaatgagaatggtgaaaacttaaaaagctgtgagtactaattagctagaatatatgccagattgcttcttactagtagtttgataattctatcacataatcgatcccaatttgttaacgttgagattaccagtttactaattttggttgatttttcattgtaatgttcaaaaacctctaaagtaatagataattcggaaatttggttatacggttaaacttttgatatggccatgcgcagcacaaatagttttaaatcatactttggttaaacaatgcatatttcttttgttttatttatgtattaattaattgagttagaaaagtgataagcatatgtatatttacttttgccgctaagataatttctattatgtgagcacacccttaatttgtatcctaaattcaccactgtacagtagaacacactagcctatatatctccctctcgagtgcagcgtgagttgacgcgccaaggcctactagcaacagagctgcaagcagagtggcagtgtgagtcgtaccgagagttgaagcacacatagccatctctctcgttgtttctccacgtaagctttttgtagcactagctttctagttgcaacgatggggttcatcagcggcgaggagctcgccgtgacgctggcgccggtggccgtgtactggctctactcggggatctacgaggcgttggggagcgtcagggctctggacaggtacaggctgcactcgaggagggacgaggagagcaataacatggcgtccaagaaggaggtggtgaagggcgtgctgctgcagcaggccatccaggtcgccatctcacttgccgtgctcaaggtttgtcgtctcacaaccctcgacgttcagctagctagcttttgattgttgagtgatctttgtttggaacctcctgctgtagatggaaaatattactgtgtttatccataatgcagagagcaagaaaaaaaaaaaagcaaatccgtcgcattatggacgtgacggcatactggtacaccactgagtacagtcgctagctctagcggtttctaccccacatcagtaggtgatacggctgcattgtttaagaagaaccccctgattcacccatatcggcatatctgcagactgcagtgcctagcttcttccggcaagaagatgaacaacaacagtgcaacactaacttcgcatcaccctgcactcctgcctgacaaaacgcattaatcgatcaagagtaaccttggcccttaaactacactacaggttctgtacacgcgtgcgcacggtggagcagagcacagctcgtgatacgtgatagttacaaggctgcctagttacaactggttgattgatcttgtctttcttttatcgatcttacgcagctgacaagtgagaaagacggtggcgccggcgacgtcaaggccggtcacgcgagcgccccggcagcggcgccatcgtcgtcgtcggcggcggcggcgctactggacgtggcggcgcggttcggggtggccatgttcgtgctggacgcgtggcagtacttcgcgcaccggctgatgcactcgagccggtacatgtaccgtcggttccactcgtggcaccaccgcgtcgtggccccctacgcgttcgcggcgcagtacggccaccccgtggacggcgtgctcacggaggcgctctccggcgccgccgcgtacctcgcctcgggcctgcccccccgcgccgcggccttcttcctcgcgttcgccaccgtcaaggggatcgacgaccactgcggcctcctggtgccctggaacccgctgcacgccgcgttcgccaacaacacggcctaccacgacgtgcaccaccagctcagcggcggccggcgcaacttctcgcagccgttcttcgtggtctgggaccgtctgctcggcacgcacgccggctacaccgtcaccgcgcgggagaggaacaacggcggcggcctcgaggccaagccgatctgcaacgatcgccacgttctcctgtaatgtcaacctgtttttgctgagactttgtttgtagctaccagccgtagtgtccgtcacgttgctgtgtacaaaagaaggtcttcacggcaaatactttttcagaaaactcaagtgaagtcttgtcacaacaactttgcatctgaatatatagtagtatctgacaaatgacacgggtagactgatcagcaacaggctgatcaagacgacggacctagctagcgcccccatgttgtacaatgaaaaacgtagtacacactcccatgtacaaggaaaaacgtagtacatgattttcgatttagggggggcaaaactaagcatctgaatatagctactggaacgcattataggaacactggagctagctacaagggtagtccagatggtcgctgcagttggtggaagcgacggcggacagctccagcttccccgtccactcctcgcctggcttcagcgtgatggctcgctcgactgcggcagcgtccacacacagcatctgcttgtactcctcgtcgccaaaatccgccatcgttttcgacttcttgtcccatgggttccaaacaactgatagccaagatagagagcatgaaacccattgtttatttatgattaccaggacagaaagtaatttttcatccatccggcttaacaatgctaaaactggtttggagtggtacatgaaggaaatcatcttaccgacgtcaggaagcccttctttccttacaatgaaggtgcgtttcttctcatggtcaagcacagcaattacgcttggggaaccaacgtagactctgtcaacctgtaaacatggttactttttatgaatcagtaaatctgttgtcatgcgcatcattttggtgcagaagttcacaacacacaactgaggatgaaaggactgaccaaattcagattcaagatcattagctatttagtgttcaaatgcaagcacgcggtataggcaggcttgctatagtataccgacaaaatgcaacacccatctctaccaaagaaatgtaagacctataaagttggagtaagtacacaaacatataaatagtgaaaatttacctcagactcaaatgttatagcatctccttgttctgtaaaacgttctctttggctaaggttgtcaagataatcaagtgtctccagaccttctattctcacctcactgcaatgagaaaggtgcagcacaccatcttatgcacattgttcatcagaaaatcacaaaaccccaaatgttctattgattgtgaaagcatgagatgtacagcttcaatggatgacaggaaatgttatgctacattatctaaaaaaaaggaaatgctaattgcttatggcataaatatgtactataccttaagctattattatattctactgagaaggaataatatttgtaactcgaaagagtgtatagcatcagcggtaagcacataacatgaaattcagtgagcaacaagatttatttgctcaaacaatgccttacctgatgtcagagactgaaagatatgtatggtaagcaaacgaaaaactgaatggcttcccattaacattcctgactcgtgatactaacgagagatctccatccgtcgaaagagaaactctgagacggaattcaaagctggaattcacattataataagtatatcagacaaatgacaaatcttccggaatgaatatgcagatatcaaaatgctcaatgaaactactaaagcattccatccactatacgcttgaaatagttcagatttacagtttcaaatctcatcaaacagaacatctgcctaaccctaaactcttttttattaatccttgaaagttcatctatcatatttataaaatatatcacagaattaatgtaatatagctcgaggttgaagtattgagcttattgcacacagaacatccctgtccacatcaataacaggtgtacactatttagacttaagatttccttggtaataaaaatatatatttggtataatatttactttggtactaaaaaacctttggtctgaagcaatataatatttagtttgtccaatgtttctgatccaaaaagtagtttctctcatttctacccagttgctatattcaacagaatcagtctattctgatgaatagtcatttagaaatttttataccgaaggcccatagaagtacttattactttatggcctgagctatttaaccaaccacctccctgacacactagctaaccagaattggacattttactcacctagctgtaacagacaaactactcaaggacagttaaatatatatgtccccagaataagttatcataccagtgtggccaacatttgagatcatcttcagatggctttaacagaaggtcaacagaaactttgccgttgttatcattatgatttagtggtggagcctcatcatctatggcccatagcctgttccttgcaaatccatgctgctccaatgttccacaatttccaaactgacaaagttttacagttaaaaacgttcattttttcaccagttcagaagtaaaattgcatcccctcaagggatgaaaatccatctcccaaactggtgcagatgtgcacttttcactgcaaacatatagggaatattgcagtacctgtggaaagcatatgggaattccacctcgcatcgcttttggtggcttgaagatagcctgtatgtacacacaatagctatcaaaaatcttaaaactaactgaaagcacgcaaattataatgtgttattatatctacttttctagcacacaaatatttcagaaacaaaggagaatccaaggccttaagcaggtaattcagaggtagagaaaaaagaaaaccaaatttgagcctgtaatttaccatcctaaattaataatagattagtctctcctttcaaaaaaaataaataaataatagattagtctcatactctcattatacagtatgccccaaagaaaggcttctactgttttaaaaaaaagtctacctttcttttacccaatcacaaacagacgaatttcagttcacatgcatgtctatcagagaaatttcagcacaaggacgttgctccagcataaattgcatcaactaagcgcaaaaaaaaaaaaggaacacgcacattccggctgcaattatgcaagtacttcgtatatccacaagagagaaacctgatgaaaccaaacccttccccaaccacatcgcacgaatccgatcatcagttgcagaaacaaccacattgccaggaaacagaggcaggatcggtacgcagaggcctcaccttgctgctggtgaagaggagctcctcgccgcggtcgttcctccaggagacgacctgcccgccgtgcaggctgacctacaaccaccgcatcaacccaagggacccgcatcagagtagcgcgtgcgcaggagataaaatgccggcgagctaatctaatcgccagccagaaacccgcaaaaagaagagtgaaaatttgcgcggcgactcaccaggacggacgccccccgcggcgaccggatcatgacctggtcggcgccgttccagtccttggtcacctcgaaccccggcctctgctcggagtaatgccccatgctcatcaaccaatggcaggagcgagagagcacacgaacccaccccacacgatcgtcgcaagaacttcgctggcgcgcacgaacgcacgcacgcaacccacaagactacgacgacgacaaccaccacttgtaccactactactaccccctcccctagtaccggcctcaccaatacatcgcgcaaagcaacgccaccgccaccgccccccagagggtcgccattagaacagttcggatgtctacggctcccccaacacttcccttgcgagcaaaagcaaaccaccccctgaatctcgtgaccgcaaagcgccacggcttttctctcctctgtcctagcttagttagccttttttttttcccgctgctgctgctgctgcgcgttgcgcgcgcactcaccaaccacccgcgcccgcccgcgcgccgggctcccctactcctaccacgctacgacgacgcccgcaaggcaagaaagcaggatacggcgagctgcacccgggagggggagaaatggagaatgcggcgtggatctctacgtttttttctctctctccgtctctcggtctcgaaaaagcggcgtggcgcgcgggtcacatggcgaggcggcgagagcgcatcatgggagccacctcggcaacgccatgggtacgtggggcgggggagccgcgggccggggggcgggggaatccaagaaaggccacgggggaacagctggaatccgagaagaagcggatggagcgaatgcgaatcaggtggcgcgcgggcgggcgggcggcgtgcggggcggaaacccatatgcgtcgctcacccgcagcgccgacccggctcgctcgctcgcctccagacgaggagcgaagccagcgagaccagctgctggggacagcgtcgcaacggaatccgagaggcgcggacacgtgcaccggcgggcgccacctcgatcaagtgggaacaggcgtgtgcagacatcggccgaccgcttaacattttcgctctgtacacgcatatgacgatatgattagtactgttttttcctatatgatatactacaaatgaattgtttctttatattttagaaaaattagatctaagttcttacgttttgaaacggatagagtagtttacactactttaataggtttaaaagtatatatctgtattttactagttttttttttgaacacgtaaaaaaattacacgtcaatatattagaagaaaagaataattgttacacaatacattaagccagaccgacttatgctaagagaggagggaaatagaagaccaaagaaaaaaaagactcggatactacgacactaaacatcgggaagggggtgtattttactagttcatagccctctatatcatctgcatacaagatacaacttcaagaaacattggagcattttactcatgttgcatcaatcagtttatttaaaaagagtaccaattttatacttttcataatatgtacgatataattttattttaatttatttttcataaagcaatgcgagtgtcaacatgggctataaaggtgctagatttgaccagatcaccagagacggcaaggatagcaatttgtggtgaggatgcaatgctcaacaaggcgtgttttgtcagtggcaccaagcatgacctcgacggtggccaggggcaatatgcggccaaggacaacgaatgtgtcagaaacttgaaggatatgtagtaatctcatagggcatcgatggatcttcaagatggtccggaccacccaaaaatgtgtcggcccaagacatgcataggtaggtatggtaaaaagaaaactaaagttgaagtgacgtcaattcgtttctgctccttctttgtgaccgcggctccgcctcatgcccatctcgtacaattgagcgacgatctatcgtacccatgactagggttagggctcctacctcttggtttgctcggctactcctttcctggtttcctatttacacgttcccgccgcctagcctatagtgatcaagtgacgacagcaaggcagcaagggcgggacgcgagtgcgccggccggtgacggcacggtgtcacagtgtgcagggacacatcaagaaagaaaggcaagtggccaaggggtaagtgattattgattagctgaataggtcttctagacttgtactcttcttttcaattttttactttggattcttctcatctcaaaatgtacttattgtattacggattgttaagacgtgaagaaagatgaaaatattacatctttctttagtaatatggaacatagaagaatgcttcttgattgcctcccacagttatatcagaagaataaactcagaaataagatgatggggtaaccttcttcaaacttttgtagccgtataagcttcttcaagtcaaatttcttacttaacgttaattttaagatgtttgtaagatgatagtaatatatcatgatgcatttttggccaattctattagatatacatgtattgtatatgttggcatagttatatttgtgatgtttaatttttttctatcaatcggaccacccatgcccttctagatacacagctatcgcagggtcatacggagcagcaaataaagagaacaaccatgagaagatggagtgattaaaaatgcatataaatatccgctagtcaattttacctcgtatgtttttaaaagacagtggctagataatgtgaacaatgcaaaaggagattactggattttccgtcaccttaaatattcacatgtttcaacctatatgtttgggtttcgagggttaggaggtgatgaaggtagtaggaagtaacaagggtggctttagaggatggcctaggacgtggtggacacaagtagacaacaaagtgaagccatgagtttggagaagggtagtagcaggggcatcatatctacaaaaggttaggaggcagagacgtctccacggcatgaactttatgttgctaagacaacgaagaacaacaggggctagggcaccttgccacttattagcttcaagagaaaggcgcctgggggggaggggtaagtcgagatcggtttggtaggcctcgctggtgccatttgcaggctcttgcactagctaggcagaaggaggcgatgcatgtggggaagagacaatggattacaagggaaaatgtgattacgtcgatcgacaacaatataggaaaataaggagatacagttagagaaacatgtgttacatgaatcttaaaatatcttcctatctaaaattggatgaatttaaaataggtatataaacattggacattctctagatttaatcattctcaaatgttggactgccgttttctttttactaatggaaatggcctactgtggtgtttgaatcttctgaagatgaagataaagattaagtatttcacgcaaaacgaggtggtaataatatgtgattaattgagttttaattattacaaacttgaaaaatgggttaatatgatattttaaaacaattttcatatagaaagttttcgcacgaaacacaccgtttagtcgtttgaaaagcgtgccacgagtatacaaaatttaatcctttacttgcagaagaaatgaacatggcctttggccaagatacataatagtggtattgttgcgctccttatgccctatttaattcagcttaggattattataatctggattattaggagtaagctgaaacaaacaagtaaattattatgctagattattataatctataagtcagattattataatctaataatctcctctagagaagctttttctagattattgagtggctaaagacccagtacccttagatgcctctaataatccagagaaacaaacaactcgtagtttattttatatcagcttattataatccagcttagagtaatctgatttaataatctagattacaataattttaagctgaaacaaacatggctttaatcacttctgtattaagagatgaaagctgtattaacaattttccactcgtacgtggcgtgcgcctgcctgtttgcccattgccatgagcccttgaggccttgacaggtgaaaattggttagcatgttcggactctgggtcgtggtggtgagctagcggccgacccgtttgcagcaattggatgcatcgatattaccaattcagtcaagggtcacgcgggtgctagtcgagtcaaaagaaagccggcctaataccgtgcagggcccaagctaacagcacagcactggaccatgcgtcaatccaaccacgcagtcagatcagctcatcagcaccgtacaagtacgacctcaccaaaaccatcacgaaattcacgcacctctctctcgagcctgaatttgctggcacaaaccatggcacttgagtcactctgccatactgataccgttttaaacgtaggagtagttagaatgcccaagttgtttcaagcctgaatttgctgtcacagtgttgtctcacacatgcccatagtcatggcaacagcatggcggatgtttgggaggtgcaggagcagcaaccggagattcccttgcctctgttctcgctttcaacggagtacagcgcttccgtcgacaagacgaatggcataggacgccggcgagtaattgcccaccggccaccgcatagtgatcatcgctgatgcaaccgtgtgatcttatcgatcatcaatagagagccgtatcaacagaaagccgtaaagaacatgtcgtacgccaaggacagaagcgaacaaccaccggtgttgatcgcatcggctacaatgttatgtgtcgaactaaccaaagaaaaagacgacgtttacacccgtaggagagaaaaatggatcatccaaaagcaggtaaaggtaaaagatcaaagttagaaggctttctgtcagtgttacagtatttacagagatcagtttgatatgaacaacgcgagccagcactgatgttacagatctacgagagtagagtaaaaactcagggaagaactgacggccaggggggcattcatatcccggtggagcggttggaatgctcgtctaaaaggcagctactagtaatttacaagggcgaatacagtgacaaaatcgtacctaatacttcgatgttaatcgtgcgggcaggttgagcttataaaattcaccaggccacatgctgcgtttgagcacgaacggcgggagggtcaagtcgttaagattaccttgcggctacagcatcagtcgccagaccagagcccaggagttgacgaagcttgggcgtggcaatggcatgatccatgtgcccgctgcttctcggcgtgccagtcttgtctatcattgacaggaaattttcgacgcctcgagcttgctgtgcttttgttttgactggaggcacttcttgtgcttcatcaggcccggtttccgttagtttctcctgttaaacaaggcgcatttgagagaagaaaaaaaaggactagtgctcaatgaaaatagctccaatactccaatgatcatattgttagaaaagatgtttaccattagagcagaattctctaatctaagtttcttggagctttccgttagcctgcttatttcacgtctaagggatgtgttctccgcagtcaatagctcaacttttctagccagttcctcagtctcggcctgttagaatgaaagaatatcattattgtacaagtatggtttaaatttctactagagtatggaatactgaaggggataccacaaaacattacaagttaaaactagctaagcatcttattatacctgcttcctcaaccttgacctccgagcagactccctgtttgattgcttccttctctcgcgcttcgattccttatcatcctgacaatttattaaggattataggtctatagtttaattcaagaagaaacgatcccatgaatcgaaagctgaaaattcctgatctcaagagtgaatctcattttttattgagtatctaggtactttgcatttaggtgtcctgacagtggtgtttggtgaggtgttttgttgctatctcagggtgtccttctgggacgggtcttgttctgtttctctctggaatgaatgtgtagttcttttttaaaagaaaaagaatgcaaagagctccagcaatctatttagcaaaaccatactagcgactcgagaattaatcccaaaaaataacagcagtaataaataagggatgttgtattctcaaaaaaaaaaggatgttctactgaagtcgtggtagtggaaacattaagaaatttgattgcttcgtccaagtatggatcatggttcactccacgaagttagtggcgccttttctaaatgataatttgctggcactttaacaagaaaaaaaactgcaactggcataccttagttggcacttcagttactggggtggcaataactctgaagtcactagcagtgctcacgtctggtttgattgctgtaaccggaatgcatagatttggcaaagctgcttgttcgctaggtctatcattaggtgttaaagctccaccagtttccacgcctggagaaaaggaaaaacaaaaaccaaatcacctcttagtgttgcttagtgctcagaatatatggccttcttatcatctgaaaacttaaacagaggattatattatgtttcagttatcaattagagaaataacaagaaatgccgcaaaattcacgatgagtcattgaactggatattataaaaatcaagtaccagatgataccaagattgagtacctgatttaggcctatcatctatgctccttttcttgggagttccacttgcctgaataatgatgaaatatatcagcatgttaagtataagcttgctggctcagaacatcttcaatggcattaaataactacagaacaataccttctggttgtttccatcactggatccttctaagctgcaatctccactgcattggcagcatcagatgcacatgaaatcagtttgtcactcataatagttgtatataagttgaactatcaatctggttatcgttttcattttgtaaaatcctgtatcaccttgttttttcactgttgccactgccagttgacacagccgcaccatcaatttccttcattttcttatttgaacagctatccttgctgttgacagactttgctggctccatgctcaatgggctcaccatcttgataaaaaatataagataaacaatcaataacagaagcataattaagatactagcaaaacgattagcaattcagcacagaacgttcacacaagtgaagcaagaaagacattaaagaaaagaacaattgaacaaatgatttaaaaatacatatatacttccacagaagaaaaaaaaataaaaaatccagcttccttctacagaaaaaatggcaatatatgaatgaatttattttcatgtagagataattcgtctgcaaggataggttttccaagttccaactacatatcatgaatacttcgaacggcagaaatcattcgtgttagttctgctcatagagaagtttccatgttaacatggctttatgcaagcattttaacaaattggatatcgctttaattccaaagcgtgatagttgactcaaatccatggtgccttccatgtttagttaaatgcaatgttctgaaaaatagataggtgaacaaaatgaaatgcttactaggggcatgaacggatgtgaaaaagctccaccaggaggataaattgcggcatatggcttcccaaaagcggatggcaccagaggctgtagaggcacagggaaataacttagaactcttaaagataagaatgacacctgatacatggagagtaaagtcaaaaacctgaggacccaagataaatggaggaggggtatgaccagcggctattccagggctaaaaaatgttggtggcaagatccctgggccgtaatatgcctgtgttgattatgataccttaaatttagttactcagttcaaaggaaaatccaaacttcagttatcaggaaaatatagattgtcagacacctaacctgcatatttgaccaatcaaggtatggactaagggctggatgatcctgcaaagtaatacagttgctacttaggcacctttaaggattccaccccttgtcaataatgtggctaattgacaaaatcatgcttcgcagctgtttgatgcagccctagcacatctaaaacctcaaagcggatttatgttgtcaaataaaagaagaaatgccaataatcaatttgacatcttgctcgtgcaatgttgtctgtgcccatatttggccttggttatctacttatatgcgtttaccttagggggcgatggtgctttccccatcttctgagtaactacagcttcgtcatttcccatgactttttatgagttcctgcatattttcatcgtacagattggtcatatgctaaaccatatcataagtactgaaaatagtcacacaaaaaagtatgtttcagtaaaaaatataattcactaaatgcacagatatgaaactcttgcaggcccatagatatcgcacaatcatgtacaaaaaccactagacacacctagcttgtgcaggcattcctgtacagcaatccgacacttaaaattcctcctttccagtgagccatcacggcgtcactgcttcatcgtcttactcatctctagtctctcctacgccatcctccttcttcgcctctagcgggattgggtgacatagggtagacatgtcacaaggtgacatagggtgaatcttggccctccaaaacaaatccaacggctgagattcgtccacgtcatcacgagtaaaaattttactcg

SEQ ID NO: 7119 - DNA, 15038 bp, Oryza sativa
ttaatgacttggattattcacttcatctctcaaatataatggaaggtccggagagcctatggagagcctatgacaatagcgccgtccacggcgatcttgggctttcggttcggcgcaatcgccctgcgccggcaccgaagggcttgtgcggaatcagaaccagcctcgaaggggatggtgtggtaaaaccacctcgccatccaatggcggtcccacttcgacatggcggcgttcaccggctagagatcggaccgctcggggcgaacattaaagtttacgctcccgaacactgtcttcttcgttccaactggggtaatcaccgtcttcgaattcacggtggcgaagaatatggcgccgaagagttcgtcgcttggctcaaacccggaagtccggcacgcccagtcgaagatagcgatccggaccagcgccgacgggctcaactgcgggagctccacctggaaaaggcgaagaatctccggcaacgagttgcacggaaaccggagccccgcctcaaaaaacacggcgaagaccactgtccggttgtcgacgggcttcggtacaacggctttccccggggcgaaagcctgtccctcgactaacgccctagagctgaccaactttgccagctcactatcgtttatgagagaaattcctaaataggcggtggtgtcatcgtcaatccggccggggtcgggccccttcgccgaagaggggttaggcttgcggggagccatgacgaaggacgtatgaagtggcgaagtgtgtgtgcagtggcgaacaaggggagtgagtgagaaatctaaagggccaaggggtgccgtgagagcaagaacggagaaagagagtgcgagcggtgaaaatggcaagtctggcggtgaaaagataacggggaagcatatatagcccaacaaggcgacgattcgcctacccaccagtaataaagcgccacgtgtcgtgagggtaggcgaaacggtaaattcccatcgaccgagctacacagtaaaaagcccacaaagggaaggcccattactgttcctttcggtccggtaaaaataaaaaatatatatcaccgtccgcaggaggcgaagagcggcaagtcaataccagccgcacagacaacaaactttatttgcaggaacaatgtaggtttcggcaggagcatcggttgaaagggggcgccacataccataccacataccacatgggttgcatggtctcggccgaagctccaatctcacccttgcccatgaggggcttgttggcggtatggcatgaggcccttcgaccaaaatctgccgaaggttatgcgaggggtggggatccaagcccgaaacgtcaaagttagtcggggcgaagccccccccccccatggcggaaactatggaacaaggacggtgagaggcgaaggatcgtgcgggtactctactaagccggaggcctcttgggcgaaggatgtagggcgaagagtatatgtcaaagggagccgacttcgccaaagcaagcttgcccccgcgagggccgaagaagcctttcccggcccatcaagcctaggggccattgggccgacgatcgcctaacggcccatcaggagtccatgaacctctattacactatgtacccatgtaaatgtccctttcataagggtaaccatgtaaattcccctgtataaccaaaaccctagtagtaagaacctgtaataggggctataaatagtctcatagggccatgtaatagggggatccaagaaaaattctctaatcaatacactttactttcaaccactgttgagtaaccacgtctttcgacgtatgcagttgtcgtttcgaccacaagctgggccggccattgggaatttcgagcgaaacccatgaaaagcgaatgccctgaaaaaagttgtaaaaggagaaggttcaaaggcgaaagaaaagcgacgctggggcgaatatggccgctgaagagggagcagagccttgggcgcctgtcgccgaagatggaggagcaccatctacttccgcacctgcgccatcactaccgccttcggcccctgctacctctgtgcaggtgccgaacgcggctgacatggcgaaggcggctgcggcggcgagggcactccagaccagggcggagatcctttcgacaagtcaactgctggtgccccaagccgctccgtcgcagccggcagcggcccaaactgcgcttgccgctatgcaagcccaagtcaaccctgaccccgagacacaaaccgaagccgacatggaagccatgcgacagaacatgacacgactccaagacatgcttcgccaaatgcaagaacagcagcaagcgtacgaggcggcaaggcggtctaaggtcgcttcggcaccaatcctccagtattcggcaggctatgtcccaccccaagtctatccacaagtgccgacccagccccttccgccacaagtcacgcaagcgccaatgtacttcgtcgggcagccattgaccgcagcagcgcatccagcccctcatgtgcaactgcaagctcaaccggtcgctacccaagtacatcctcaaccgcctggccaagtgccacaaacaatggtagaaggggcttcggctctgcaggcgcagctccaagctttccttcagcagctcagccaacctcacaacatttcaagtacagccccttcggcctgcccggaggggaatacaagtcaaggtgcgcctagttagttgccttcgaatcagccaggtctgggggcttcgccgtggagtcaaggaccacagttcgactctatcaatgctgctcaggcgccaaccgttcggccgcaagcaccaacgccaggcttcggagcaaaccaagcaccaaaccagatcgccatgacatggtcacagccaactttcgacccattcatggcggctcatcaagcatcaccaatcggggccgggcagccgaatgccatggcccaacctcatgcgcaagccgtgatttcgcccttcgccacgccgtacccgcagcaaggtgccatgaacagggcagggggcgaaaaggggctaccgctgagtgggggaatcaagacccgtccaatcccaccccagttcaagttcccacccgtcccacgctactcaggcgaaactgacccaaaggaattcctctccatttatgaatccgcaatcgaagcggctcatggcgacgaaaataccaaggcaaaggtaatacatctcaccctagacggtatcgcccgctcttgttatttcaatttgacagccaatagcatttactcatgggagcaattgcacgatgtctttgtccttaactttcgaggaacctatgaggagccgaagacgcagcagcatctactcggcattcgctagaggccgggggagtcgataagggagtacatgcgtcgcttctcgcaagcccggtgccaagttcaagacataactgaggcatcagtcataaacgccgcttcggccggtttactcgagggcgaactcacaagaaaaattgccaacaaggagccgcagacgcttgaacacctacttcgcatcattgacgggttcacaaggggcgaagatgattccaagcgacggcaagcaatacaagctgagtacgataaggcttccgtcaccgctgcttaagcccaacaacaagttcaagttgccgaaccacctcctctcgttgttcgccagccccagccggcgatccaagcacaaccgccaaggcaaggtcaagcccccatgacctggagaaagttcagaaccgaccgtgcaggcaaggctgtgatggctgtcgaagaagtgcaagccctccgcaaggagttcgacgcttagcaagcaagcaaccatcagcagcctttccacaagaaggtccgaaaagacctctactgcgccttccacggacgctcttcgcacaccacggagcaatgccgaaacattcggcaacgtggcaacgcgcaagatccaaggacgcagcagggagcagcggccgaagcaactcgtgaagtagctcaagaacaagcaccccccggccgaacagcgccaagatgcgcaatgccagagtgatccaagtgattacaatggccgacccgccgatccaactgtcgaagcgacagaagaagatgcagctgtgaacggtccacaatatcacttcggcaggcgaaggggctccgcaatatctgaaccagcaaatcttttttgggccagaagatgccgaaggagtaatgttctcgcatcaagatcctctggtgatctcagccgagatagctggttttgaggtccggtgaatcctggtcgacggaggaagttcggccgatgtcatctttgccgaagcgtatgccaagatggggttgactacccaagcccttaccctagcaccgacatcgctccgaggattcggcggagaagcagttcaagttcttggccaagcacagttgatagtagccttcggcacgggggaaaacagacgcgaagagcaagtattgtttgacgttgtcgacatcccacacaactacaatgccatcttcggccatgcaaccttgaataagttcgaagccatttcccatcacaattatctcaagttcaagatgctcggcccggcaggagtgatcgtggtcaaggggcttcagccttcggctgtttcaaaaggcgatttggccataatcaacagagcagtgcacaatgttgaggccgaaccgcatgaccgggcgaagcacgcgccaaagcccgcccctcacggcaagatagtcaagatgcagattgatgatgccgaccccacaaagctcgtatcactaggggcgacatgggcgaagaagaagctaagaacatcctagaggtactaaaaaagaacattgatatctttgcctggggccctgatgaagtgggaggtgtttcggcagatctcatcatgcatcacctggcagtcaagccagatgccaagccaaggaaacagaagctacacaagatgtccgctaatcgccaggaggcagcaaaagccgaagtcaaaaaattgctcaaggcaggggtcattcaagagatcgatcatcctgagtggctggcgaatccagtgctggtgcgtaagtcaaatggcaaatggcgcatgtgtgtcgatttcacagacttaaacaaagcatgtccgaaggatgatttccccttgccacggatcgaccagctcgtggattcgacagtcggctgcgaactcatgagcttcttagatgcatattccggctatcatcagattcgcatgaacccggccgacatccccaagacagcattcatcacaccgttcggcaccttttgtcacctcaggatgcctttcggtctgaagaatgccggagcaaccttcgccaggctggtgtacaaggtcctttacaagcaattggggcgaaacgtggaagcttatgtcgatgacatcgtcgtaaaaagccgcaaggctttcgaccacgcgtccgacctacaggagacttttgacaacttgtgcgcagcgggtatgaaactgaatcctgagaagtgtgttttcggcgttcgcacaggcaagctgttgggtttccttgtttctgaaagaggcatcgaggcgaatcccgagaaaatcgatgccattcagcaaatgaagcctccgtcgagcgtacgtgaagtacaaaagctcacgggccgaattgcggtactcagtcgattcctctcaaaggcagccgaaagaggtttgcccttcttcaaaaccctccggggcgcgggaaaattcaactggactcccgaatgccaagcagtgtttgacgagctaaagcaatacctgcaaagcccgccagctctgatcagcccagcatcaggaagcgaactgctactatacctggcagcttcgccagtggcagtcagtgctgctctcgtccaagaaacggattcaggccaaaaaccggtctatttcgtctccgaagcattgcaaggagcgaagacaagatacattgaaatggaaaagctcgcttacgccctggtgatggcttcactcaagcttaagcattactttcaggcccacaaagtcatagtgccatcacagtaccctttgggcgaaatactccggggtaaagaagttactggccggcttagcaagtgggcagcagagctatcccctttcgacttacattttgttgcccgcactgctgtcaagtcctaagtgctagccgactttgtggccgaatggacaccggcattcgcccctgaacccgagcccattgaacagccctgggtgatgtactccgacggttcgtggtcgcacaagggggcgggcgttgcggcagtactcacttcgccaaatggtgtgccaatttggtatgctgcaaggttacagttcgacacaaccaacaatgcggcagaatacgaagccattattttgggcctaagaaaggcgaaagcattggggattcggcgcctgctaatccgaaccgactccaagctggtggtgggccatgtcgacaagtcttttgaggcaaaagaagaagggatgaaaaggtatttggatgccgttcggtctatagaaaagtgcttcagcggcataacggtcgaacatttacctagaggccagaacgaggaagcaaatgccctggcgaaatctgccgcttgtggtggtccacattcgcctggcatcctttttgaggtcctgtatgcaccaagcgtgcccatggacagcttggaggtcctggcaatcgaccaggtcaaattggtcgaagacccatacgactagtgaaccccgtttgtgaagcaccttgaaactggctggcttccgatagacgaagcagaggcaaagcgcttgcaattcagagccacgaagtataagatggtctcgggccagttctatcgctccgggatacttcaacccttgcttcgctgtatttctttcgccgaaggcgaggaaatggcgaaggaaatacagcaggggctatgtggcgcgcaccaagccgcaagaatagttgccttcaaagtatttagacaaggagtttactggcccactgtgttaaaagtatgtgttgagcaaatcaagaagtgcgaaagttgccagcatcatggccgaagccaaaccacgccccagtatgagttgcagcccatcacaccaatctggcccttcgccagatggggactggacattattaggccgttcctggcggcgcgaaacgggcacaagttcgcaattgtggccgttgaatacttctctcgatggattgaggccgaaccccttggtgtgatcacttcggcaacagtacagaagtttgtatggaaaagcattgttagtcgtttcggagtgccaaaagagttcatcactgacaacggcaagtagtttgactctgacaagttcagagaaatgtgcgaagggcttaacctggaaatcaggttcacatcggtcacgcacccgcactcaaacggagcggccgaatgtataaatggtaaaattctagaagcactaaagaaaaggcttgagggggcagcgaagggcgaatggccagaggaaatgctatctgttctctgggtccttcggacgacccccacaagaccaaccaagttcagcccgttcatgcttctctatggcgatgaggcaatgaccccaacagagctaggggctaactcaccaagggtgacgttctttaggggcgaagaggggcgcgagttgttgctcgaactcttggagggggtaagagtcgaagcactcgagcacatgcaaaagtatgccacaggcacttcggcaacttacaacaaaaaagttcgaccgacggagttgttgcctggtcatcttgtcctaaggaaaaaggcgaaccctatagccgttggcaagcttgaatcgaagtgggaaggaccgtacctcatcaagcacaaatccaggacgggatcctttcgactggcgacactggaaggctaagatttcgaccattcctggaacgctgcctctctcaagcgtttctatgtctagaacgggtggcacccaaatcgccaacttgtaaaaatgtatatatcgttatgtaagcccttcggcactatgtaagcctttcggcaagaaaaaaaagagaaaaaaaagaggaaaaaaaagggaaaaaaagaggaaaatggaaaaagacaaaaaaactagatgtagggctattatccaccacggaggcccgaacgagtataaaatctttgtgtcctctgccttctttttatttgtttgtgcgattgataatttgcggaaaaaccccaaggcaaatgcctgatcagtgaaaaaggccagggggcgaaacgaatcggccgaagcatcgctcgccgaacgattgaaaccgcaacagcttgtttcggagaacaattagccgaacaccgttacactcgatcgaaaggaaagcacgagtgcttcctataacgtagaacaaaacggatcgaaaacggaagccgaaagctgaaaagtcaaaacctatttcgctaatatatgcaaaggggccgacacgttccgacccaacaaaaagcacgtgaagtgacaatgcaaaaatagcgaaaaggaaataagacgcacctttatggattttaaataaaaatgtatcgaagaatacatcacaatggtacaaatgaagagaaaggagcaatggcgttacagcccggcttacagataaattacatcttcgccctcacgatctctctctctctaaggagtgatcgaacgaactaggttcgtcatcactactaatatcatacacaaccctaagaggagaagggggtgaaatacagactagactgtaacgacgttgagagatcgcctcctgccgatcagtcttctgatggtttcgccaaaagcgagccatgtcctccaaacgtcttgaatgaacaagatcgtagtcttctaaggttcgcccagggtgcgcccgaagccacccggcaaccttaaaaaccttatagctgcgtccgtttatcaccatttcacgataaacaggccgaaatgggcatcacacctttggcaaatcctttaatgccacaaatttcttgttttggtttcgccaactcccagaagggggccgaatgcacaactttcggcgaacaccctggtagacaatgcaaaaagggcaaaaggcgaattgcatagtaagaataggcgaaaaaagaaaaaaatattgcataatgtgaaatgggcgtaatcataaatacgccaaagacatcgaccatcaaaaagtggctaagagtgagtcatatatattcaaaatatccaagggcccctttttcggctacaataagaagggttagcggcagcccgccgaatacacatcgtttgccactcctggcgaacacaaaaagaagaaggaaaactacaaaaatctaaggaaagggcggagggcctcacacctgtgggtaatcctgggcatcgcctcgacccccttcagccgtcgcgtcctcttcttcgcaaaggtctgccgcctctgccttcgctagttgctccaaaaggcgctccttggcggtggaccggccgtccttctgccagaactgtttccgccacgcacgaagtgcgggcgaaatgtcctgcgcgctaatctcccagtcccccttcgcatagttagggaactcggcgacgtgctcgcagccgaactgttgcaggagacccatagtaaaggccgctgatacacgcgcacaacaatcgccgtacgcagttgggcagtccgaaaccgaaccaccagctttctgggtccactcggagaagtcgaaggccgaggcatcttcggcagggacccctcgcacttttgcacccatgtcagtaagggtgaggcgaagcgtttggcacgccgttcttgcagattcggtagttttcgccatctcccgcgaaaaccgctgcgactcctccgcggcgctcgcttcggccttgctgacctctaggtgaagagcctccatcttcggctcagtaaggttataataatccatcagcacggcggaatgggccttttctttccttaattcggcctggaggcgatcaacctcagctatggcttctctcgctttctccagatcagccttgaggcgatcgacctcggccctagcctctctttctttctccaacttggattggagccgcttgttttcggctttcgcctctttcagggtgttggcgagggcctccatctccaagttcttgcggcctatttcgtcatcttggcccgaagacggttcttaaacccgtcaagacgagcccgcacggttcgctctgtcgaacagtgagctgcaagaatctggatgcaaaataggaacggcgaagatagcaaatgttaattatgggacatgtaaaaaagaagaggaaaactaggaatagataaaaagcatacccgaaccgtcaagcttttaatagcagaacacccctcatcgaactcattcagttcggtgaacaggctcggggtgctggcatgtaagacaagattgcttactccctccacaaagggaataaggtctgcccgggtctcgaaatcgccatgggcgaaatgaggcgccacaagggaatactccgaagcagatgtttcgacggccgcacccttccccttcgccttgactagcggcgaaacaaccggctgacgcagagggctaccgaagaccctcgccccagctgtcaggacccgttccgcggaggctgaagccccggcggcggcgctacctcctgctccatcagcaccaagtaaaagaacgggggcagtcgaaaggtccaggctgcggccagcgggtgaagtcagagtctcgtcagaagactcgtcgtcgctgaagacgcgagcgacatcgacgagtcctttcttcttggatatctttttgaccggacctcccttcgccgccttgcctgccgaaaacgcaattagcgccttcgccccatccaactcctttcgacgaaggggggagctgtttgattccaccccggtctcattgtgacccgggccatggaggtgacgaccatcgccatctccgtttgagtcaaggtcacctctatctttttcgcgtttccatctctccacacaatgccgaaccacttctctgttgaccacctcccgttttgtgcatcacagccaccggaacgtgaccacgccaacgacgccctggagcacgcaccggagcgccgccgcttcaaccatcgtcatcgtccgaccattctcgtccacctcggagcaagccgctgcgccatcatcatcgcctcaacctcctcttcaatacgcctcaagaaccccagccggagatgtgaaggacttggagaacgcaacttttcttcaccggcaccgatctagaatcgcctccgccgtcatcatcgattactgctgcctcggtgagccattgttcgattcctcgcgcatacaccatctccttgacctcacaaccctcgtgcatgcttgcttgtagcagctcatcgtcccatttgagccgtcgtcgttcacccaaggaggagcgccgtcgccgagccgttccacaagtcatcgctgccgccaagacctcgacaaccttaactcgacccacggtaagcatcctgaaggctagaagaccacatgcatgcatccttttcgttcggaatcgacttccatgcacacatgcactttcaccccatgaaccaccgccgctcacaccactgtcacgattgtttccgacaacctctgaccttgagttaaccatgggtagatgcgcgaggagcttaggaatgttttctcttttggtggcaccgcaagaacggccgctgtccattgccggcaccgacgagaagctcgtcgagtcgccgctgctctgctgctgcccttgccctcttgctgagagcctgagacactgaccagcggaccccacatcattaggcgctgagaattccgcttagagagagtttaaatcttgcaaggtctaaattgtaaaatatgttagaatgacatgtggaaccaaggactaattagtaatgaatgaaaagaatctgaggactcttaatgattttggttcatcacatactttggactgcgggttgattcctagaaatctcaagggcctttctgcatattggtccctcactgacacgtggaccccatccttaaaaaatctgaagaataattaataaaatgcccaaacaaatatatgtttagcagaaaaatgcacaaagttgtaaaatccatataaaatcaaatgaaactcattttgagatgattccagttgctgtagattcttaaagttatgaactctattttagaaatataaaacttgacactcactgtacaaataatgtctctaaaatttatctaagataggtcatacataaaacatgtacaagcttataaaatacatagaaaattcatctcaactcattttgaaacaaaatcaaattctacagattcatcatcatgcactctctgattaggtgaaataaaagtaattacttactttgcatcaaatgcctctaaaactattatctctagaatgattagttttagataagctaaactttagaaattcatgtagaacacaatttagcttcaatttgagtaaacttaagttctgtaggatcaccaaaacatgtatttccatgttatgatataagattatatacttactgtgtagtaaaagtctctaaatattcatataaggatttactaacatagagcagccattaatttgtaaaacttgtagaaaattcatttttaatccaaatgaaatgaacaaagtttctatagaaccagcaaatagttatcttcaacatagtaaaataaaatttggcaccttttgtagagaacatagatcaaaaccttaacttagtgaaataagaatttaaacacatagtgttgtttaagtaatacataaacatgtatcagtatatatacactttaggtctaattaaacctaaataaaaacttgattgaccagtgaagccatagttccatcctcatccactaaaacttagaagaacttagctcatatacaatttctaggttaatataatatattgctagtctagattagagcatatctagtttataaaatatgaaccatagtagtaaagatcataaacatgtgaactaaaaatgttttagttaaccaaattattccttttattcaacttaaacatgaagtagcaagttctgaacctacaacttgagagtcatgcacatataaaacactatatgcctaaaacacgttgtaacttgtaaaatctataagaaaatcattataactccaaaaattgtgaaaccaaatgtattagtcttagaaaacacacctctacacctctgtgaagtctaatataataaaaatcactttacaaaagtatttcataacactacctaagactatactactataaaccgataaaacttctaaaattcataactcccaaatccaaatggaataagataaaataggaattatttcactaaattcattttagaccagtacctaatcactgtgcataaatcatgcattttagagcattttggatttttagctctttcggtgtttaattgcatatcgtgtcctttatctagataattgcataattggtgaagaagtggattaggtgctaacatttctctgatcaaggcaagttttctcctcccatcctttgaacacatttaatcccataatttgaggaatgaaaatatttgtttgcaaagttgcatgtgaatttagactatatcggtatttaaaattgggttaaggtagttatgacctatttgctgcataccccaccttgaataattgatcctcttactgtttgaacccttagaaatggttagagtacactctttgtgctcaaatgggtttatatatgctctatgtgcaactacttgcttagccatgcttagaaatatgcaaatgctcattccatctgtaattaaaatgtgaattttgatacatgaacccttgctggaataaaattaatatgatgggtatttggaactaaaatgtataaaatgtgattttatacttgggcggcaagtggtgcgcatatggtgctagttgcataccgatagggggagtgtttgcccaagtccataaggaccgaacttgtgtcacccatttaaagtattcggtatatccccatggctaagtatggaatggcctaagctaattaatgtatttaggaccagccttccattctagtagcccggtgtgtatgagttagtcgaaaattctaaggaattagtcgataattcagagaaactttctatttgccccaacgtggtagtttaggtgactaagtctatccaatacaacggtattgtgccacgtgggtgggttcccgttgtgtccgccaccacggcgttaagtttaaggcgtgggcccgccacttaacggttctaggcatattccaagtatgcctaggatggaggaacacgtatcgtgttggtgcaaggctaggttctaagttgtgtaaaggcttcgttatgacctctagatcacattcgacatgaagagtgtgatggagtcttgcaaactcaaaacaaactagagagttcatatcatgtgggtaaagctgtacaaactctgcagagttctttaaactaatcgattagccgtactcacggtcatgaacgctttggtgatgtgtcatgagtatagactttatgttttaaaatgtgatcatgtgacattggtttgaaattgataaatgtgttgagttgtgtgtgtgaggtgatatattatgatttgttgtcaaaggatgacaaccagagattgattacgatggaattatgatgaacttaatattgtaacttaaaattttgttttgttaattgaagcatcaactcctttacaaaagaattgcgaaacaaaacttgctttatgctgaaattgaactacatattgccttcctttgaatatttgccttcctttgaatatatgccttacatgtagtatggtaggattgacttgtgcttgccagtacattaacttgtttaatgtacggactcttgctgttgatataaccttttgtctgcaggtttagatttagtctttgagtgatgcgggttccgattgctgttgatataacccctagtcggtgtgcttgtgatcgggtatcaagcttctgctgttctctgataagtttatttggccggtcagcctatgtaattattaag

SEQ ID NO: 7120 - DNA, 2787 bp, Oryza sativa
gtgcgttgactaccgcgcactcaatgaggtcaccatcaagaacaagtatcctttgccaaggattgatgatctgtttgatcagttgaaaggagctactgtgttctctaagatagacctgcgatcaggctatcaccagttgaggatccgcgaagaggatattccaaagacagcattcatcactcggtacgggttgttcgaatgcacagttatgtctttcggactcactaatgcacctgccttcttcatgaatttgatgaacaaggtgtttatggaatttctagacaagtttgtcgtggttttcatcgatgacatactaatctactccaagtccgaggaagaacatgagcagcatcttcgactggtacttgaaaagttaaaagagcaccagctatatgccaagttcagcaagtgcgacttctggcttaaggaagttcagtttctcggtcacatcgtgaatgctcaaggagtagctgtggatccagcaaatgtggagtcagttaccaagtggaccccaccaaggacagtcactcaggttcggagtttcttaggacttgcgggttattaccgccggttcattgagaacttctctaaaattgctaagccaatgacacagctattgaagaaggaagaaaagtttatctggtctgctgaatgcaataggagttttgaagaactcaaacgacggttggtgtctgcaccagtcttaatcctgcctgatcagacgaaagatttccaggtctattgtgatgcatctcgccaggggctaggatgtgtgttgatgcaggatggcaaagtggtttcttatgcttcacggcagttgcgtcctcatgaaggcaactacccgacgcatgatctggaattagccgcagttgttcatgctttaaagatttggcggcactatctcatcggtaaccgttgtgaggtatatacagatcacaaaagtctaaagtacatcttcacccaacctgatctgaatctccgacaacgaagatggttggagctaatcaaagattatgatatgggaatacactatcatcccggcaaggccaatgtggtagcagatgccttgagcaggaagagttactgcaacgtcgcatgggtagaggaactatgctgtgaggttcaacatgatttggaacatttgaaccttggtatagttgagcacggattcgtggctgccctagaggcacagcccacactggtggagcaggttcgcatagctcaagcaagtgatcctgaaatagcagagctcaaaaagaacatgagggtcggaaaagcccgaggttttgttgaggatgaacaaggaacaatctggatgggagaaagattgtgtgtacccgaaaacaaggaattaaaagacctgatactaaccgaggctcatcaaactcaatattccattcatcccggtagtactaagatgtaccaagacctcaaagagaagttttggtgggtcagcatgagaagggaaatagctgaattcgtagcactctgtgacgtctgtcaacgagtaaaggcagaacaccaaaggccagcaggtttgctacagccacttcatattccagaatggaagtgggaagaaatcggaatggatttcatcaccggtttgcccaggacgtcatcggggcatgattctatttgggtagtcactgaccgactcaccaaagtggcccacttcattccggtgcacaccacctactcagggaagaaattagcagaactctatctggcaagaattatgtgtttacatggtgtacctaagaagatcgtgtctgatcggggaagccaattcactggaaagttctggcagaaattacaagaagaattgggaacccggttgaatttcagcaccgcttaccatccacaaacagatggccagaccgagcgagtcaatcaaatactagaggatatgttgagagcctgtgcgcttgattttggtggggcatgggacaaaagcttgccgtatgctgagttctcgtacaacaacagttaccaagctagtctgcagatggcaccatttgaagcactgtatggacggaggtgtcgtactccgctcttctgggatcagacaggggaacgccagttgtttggtacagaagttttaaatgaggcagaagagaaagtcagagctgttagggaaagattgagaatcgcgcagtctcggcagaaaagctatgcagacaaccgccgaagggagctcgctttcgaaacaggggattatgtgtatctccgtgtcactccgctcaggggagtacatcgcttccaaaccaaaggaaagttggcaccacgctttgtgggaccatatcgggttttggaacgtagaggtgaagttgcttaccagctcgagcttccctccaacatgctgggcatccataatgtgttccacgtctcccagttgaagaaatgtttgagagttcctgaggaacaggcaagtccggatcaaatcgaaatccaggaagacttgacgtatgtggagaagccaactcgtatccctcgaaaccagcgagagaaagaccagaaacaaagtaataagattctgcaaggttcagtggagccaccactcagaggaagaggccacttgggaaagagaagatgagttgaaggccacccacccgcacctgttcgccagctcttccgaatctcggggtcgagattccgtttaaggggggtaggtttgtcacgccctgaagttttccccctttttgcttgctttaaaaatttggctaaataaatcgtccgaagaaattatcttaattaacctagagctaattccctaattaataaatgcaa

SEQ ID NO: 7121 - DNA, 1313 bp, Oryza sativa
ggttttgcgggtcgcccccatggcagtaaaggaccggttcacgggaaaccctgggagacttaccgtgcttaccacaagcgggagtgggtaactgcttgatctgaagtatagctcgaccctttcctaggcaccggtggcgagggtgggcgtgatggagttgggtcggccggggtgtccggttgtccagctgccggattcaccgcggcgcaagaggggaccgcccactgccttttgaggggtgggggtgaaaccttagcgtggtgtggatggttaggggagggttatgtggagggtcttgtcacgatttccccctttgcagtatcatggtgatacttcggggcatggcgacatgtgtggaatcgtgtcttgtgggtacagttgtacacctctggccagagtaaaactattcgaatagccgtgcccgcggttatgggcgatcaaccagattcaccgtgattagtctcacccctagtttagcttaatgaactggtgtagttcaggtggttggttgggcctgttgcaacgtggtgtagcgttggacagttttggttaatattgattaattactacaactgttttactgctttcaactactgcttttaaatgctagctttatgcaaaagaacctctagcctcctttggttatatcctgcatcatacctcctcttccggtatgacttgctgagtacagtgggtagtactcagtcttgctctcttttcccccacaccagagctgaagatcttcctagttggagctgttttgtcaaatttggtttcgtcgctgccgtcaaggattgcctgtggagtggagtcgcccgctgctgaagtcaagcttcccggtttagctcgcttttatcttttccgctgcatttgtaatcttttctatttttgtaagacgtggatccgtatgtcaacaattgtcgtttgtgtaccctggctggtcctggacagggattcaatgcacattcagcttagaaattctggttcgagaatttctgggcgtgacatgtgccgtctacgtacttcttgttgttagtccaaaatacgaactcataattagtcaggtgcatagtggcatcctatcatgttatatattatgtggttctgtttggtgacatcttttggaatatatggttattcaacatcttattgaaatgtcatgcatctctatgaaatactagtgcttgtttttttattgtgcatatggacaatcaacttgttaatagaacctaggataaaacattcaaacaagcaaacatattatatatttagtttccacaattacatagacgacacatgtacatagatgacaa

SEQ ID NO: 7122 - DNA, 8914 bp, Oryza sativa
  unsure (1)..(8914): unsure at all n locations
caccccacaccatttccccattcccctcttcctcccctctttcctttccaccgcgccgccgccctcagtaccgccgcgccgcgccgtgtgccgcgccgtgtgtcgccgccgccgccgccaccgtcgccgccgccgccgtcggtaagccttccgccccctcccttcgttgccggtagccgcgacgcgccgctcggccgtgagagagagaggagaagacagagaaagggagagggagaaaagagaagagagggtagagtgggccccacctgtcatttgctcctataaattcctttaggaagaaaaataaaagaaaagaaaaagaaaataggaagaccccacctgtcagtcactatagcttgtggataaggttgtattataaataaatgaattaggaacagtgcctttttacaatttctcggatttattcaaatttgaatctttacactagcataacttattcattttagctccgatttgagtgaaacttgaacctaaattcatctaaattcataagctttccaatgatatataattcactatttgataaaatatatttataaatattaaataattaatatcaagatgatgcataatagtcaacttaaaaatatgttaataaataaaattagtattgtacggtagagtagatgtaataatatttgtctctaacatgtcttgccactgtaacaaccacacaaactaattttatgtgatgtctcaaatgaatggatgtattggaaaatactagtacttatttaatattcgatggccatataattaaatccatggcttataggttatttaaatcaagtgtagccttatgattatgtaactaaaatataaacacacatagatgaatctgtttaggagaataataatagagctaaatgtggaggaatcactaagtaaattaatcgatgcaataccatatagaatagcatatatatgcctaaattgattaccacttattagtaacccaatagaaccagtgcttaaacttgtcgcatcacatatacaatatcactcatagaaactagctaatgtataattaaactacaatatattcaggaatcacttggagcattgggtagtacactttctaaataagctcatgtacagtaggcgaccaaaacattatacgttgttgcacacatatattggacatcccattatagttatacaattaatttatctttttcatatattaaactggggagtatataacaaacatgcatagtagataagtactaattataaatcttgacctcatatgttcatagttcaattgtaactccggattgttcattaagagataatctgtaactataatattataaacctcccgaatttaacatatagagcatggataattattagcccttttataatttataatggcaagtaaaatatgttcataattaaagtaaagcttccatcaataaaataataatacaaatgattcactgtaattatttgattgatcctaaatccatctaacaacagaacctctgatatgtaaccgtgctatttagatatatgcatacgtagccataatccttccatagctatttgatagactaaaccaccgattagccaaatatatatgtatcccataaatgctatgttggttaactcctaaataggccacgatgacaatagaaagattaagaaactttagccttagcatgattgggatccattagcaaacacgaatagtacattttgttgcgcatatttgattgttgtttgaatattggtttttctcgcgtattatagaccttgtgtatcggttagtcgtgaggcaacgtctgcaacttccaggaggtgaaggttgatcaagattatatcaataataaggattatcctgagcaggcaagtcatcactattccttgaacatgttgatcccaattgcgaaattatttttatttacaaataagattgcatgcaatgatgaacatcctatttgtgaatatgccataccttgattattgtttaaccttattcccttgtaaccatgattacgtatgagtctctagtcaactatgacaaatgcttagagatgccactctagaatcatgtatactcatatttgtcaaatgctatatgcttgggcaattacctttgggaaggtaattgaaatgcggcatgtggagacatgagcgccacattgccatgatattgatgacatgatttgtgaaaggaaaataaagtgaaacaactgttttcgactggggcggctggaggatttgggtggtgtccggaaaaggctagtgccgtccctggtcaattaaggaccgagccatgaagttaagtatgaaacgaccccccgtacaaccgcacttctcgtatgggtatagacctagcggagtagatagctgagcggaggcagtatccatgcatagtggtttcttgatgtgtgaggcaggggctctacggtggggcagccattggtaggaccgcgaggcgggtgtctacagtggtgtcgccatcggtaggactgccatgtgagaatctaaacataattataacttaatgcatgtgtgagtcttcccttccaaggtgcgccagaactcctcttactgctagaaaccgtatacgcctagagtgcatgaggatgtaaaagttcatggagcgggtactgccaatgcgaggttatcgaaaagctttgccgtgacacatctcatgtgttgggacgaggctcatgtattgggcagttgcggagtgcgggtaaagtgtacatccactgcagtgtgagtaaaccaatctattcgaatagccgtgctcacggttattgagcaccgggacatgtattacacttcgctagactctaaattcttaacttgtgtgggatgggatattgcatgatgaattttatgctgatggagccacttcctgagaggagggaaggtggacgtcctcagaaaaccatgaccactcaatggcgggaagctatccttgggattacaatggatggtggacagaaccatcgttgtttaatgtgaacactggtattaaaacttgatcagtctatgctaggtcttaggcttgtgaaaagatttgtaaaacttgctttgcgcaaaggaacctgaagccattccttgaaataccctctatcatatgcatcgttgctgtggtggcttgctgagtatggttggtactcacccttgctgtttatatatcttttaggagagtgttgaagagaagcccttgtcggtacgcttgcgtatccaacaagatgatcggagtgcggtcttgttctaggtctcgttccccagtcgactgcctgtggcatgttaaccgggcccttatattattttgtcttccgctgatgttctctgatagttgttggcctacctggccctaatgtaagtatttaactcttttagcctgaattcattcgtgatatgttgtgatccaactatgtatgtgtgtaccaactactgatccagagattggtacggataaacacagaagatttccgatttccaaaatcgggggtctacaccctctaagctacatcttcacctttcagtaactatatagatagtatatatccatttgttttaatgtcctcaatgctccttccatccatccatcccagtttgaccatcctctaagcaaagcgtaccaagaccaaggacaccaacatatccatcattcttaaattaatgctaaggtgttccatcgcttcgtatcccgtgaactgctcttattttaaatattatgatattgcactaatagaaattaatcaattttagttacatgcaacacatgcaatgatgtacatttactcatttcataaataaacgaaaagacactagttaaatgatgatcattttaggaagatcttagaaaccttaggggatgatcaaattgagatggagagagtacttttcactgaaaatatcttgatactagaatataagtaaattttgtttgttgaactcaaacaccacaaacttgtcacaattacatgtgatgatctacatgccatcttttttttttggtggttgggcgatcgattgcaccacgtatatataaaatcaattattttttagcacctagggtgaaaaatgaactttgagccaaattcaaggaccgaaataaactttaccatgccattataactttgtaaagtttgagatatgttatcggtatctcaatgacatgtaagacccacatgagtcaatgacatgtggatcaggatggcatataacaaattttgcaaaattataatggcatggttccaattttcccactaaaaattgtagcatgttgttgatgttacttggccaacttgggacttggcaaatacaaccttcatatgttacattttataacaatagtaaaatagaactcctgttgggttaaatagctactccatccatttcatattgtaagactttttagcattgcctatatttatatagatgttagtgaatctaaatacatatatatgtctaaatttattaacatctatataaatataagtaatgctagatgagtcaatgacatgtggatcaggatggcatataacaaattttgcaaaattataatggcatggttccaattttcccactaaaaattgtagcatgttgttgatgttacttggccaacttgggacttggcaaatacaaccttcatatgttacattttataacaatagtaaaatagaactcctgttgggttaaatagctactccatccatttcatattgtaagactttttagcattgcctatatttatatagatgttagtgaatctaaatacatatatatgtctaaatttattaacatctatataaatataagtaatgctagatgagtcaatgacatgtggatcaggatggcatataacaaattttgcaaaattataatggcatggttccaattttcccactaaaaattgtagcatgttgttgatgttacttggccaacttgggacttggcaaatacaaccttcatatgttacattttataacaatagtaaaatagaactcctgttgggttaaatagctactccatccatttcatattgtaagactttttagcattgcctatatttatatagatgttagtgaatctaaatacatatatatgtctaaatttattaacatctatatgaatataagtaatgctagaaactcttacatcatgaaacggaggaagtatattcttcgtatagtatgaaatatcttccgcctttccacatcacgcttacgctttctatccaaagaaaaaatatcctgatggagcgatctctccattacagtcaaacggacagaaatggccactccatccggtcatccgtattccccaaaacacccttaaaaagcgtccgctgctgccataaatatctaaggnnnnnnnnnnnnnnnnnnnnnnncaaccgcatccgccataaaagccgtcgggtttagcgataagggttttaacatttggctaaaaaattttcgagccaaaaactttaccaaaatcctccgaaattcctgcgtctttcagctcggatcaggcattcaggcccttctccccgccaggatcggtggtaagctagttcatccctcaatctctagaacgtccaactcttcaatttggtggtttctgccaattcgctgtggtctcatttcgctaattggacctctcgttcggtgaaaatcgcatcgattcctttctccaagttgagttctgatgtttctgttgcctttgagttcgtttatgacggtttggtttatggtaaaaattcaaggatggagatcatcaacgggccggttctcccgcgctatgctgctccggcgaccggcgccctgacctccgacgcgaagatcagcgggcagctgcttaggcgcgtgcacctgaggagacgagcctgtgggttgcagggagaccactaccgggcggcgcgcaggttcttcggtttcccgtccgagcggcatgcgcgaagcggctgggtctggcctgttttgtgcagttacggctcgtcttccgacggggaccgcgccgctgccccggataacgacgccagcggcgaggagttcgtcaactcaagcgtgatggaggcttgtaattgcttacttctggtacactgtaacttgtaacttcatttgggttttgatgcatagtcgttcgagcaatgtccgggtccggcccactgtttgttgggagttgggaagttcgctgtgagcctttgaaacagttgctgttgtttgatcagctacataccgtttatgccaagctactgttgcagtattagttacatatcactagtatatcatttatgccgattgccaaacaaccattgtacatttctgagattaaacttgtggttttatctgtccttgcagttgagctcagaagtgtatctgatggatttgtgattaaaatgcgtgatggcaaaaaccttagatgtgtccaaaacaacccgcgggtattaagattgcgggattctgcacctcaccatgctattgttctgaagatggaagatggaagtgatcttttgcttccaattatcgtcagtacgtattaattcttgcttgggcatgctttccacttatgcagatgcttttctaattgtgtgatatactcacattacttttttccagtggaaacaccaagtattatgttgctggctgcccttcggaacattcgaattgtaagagttggatgtagctttaataaatatatgttagatgttaagcatccacatgattctggttttaaattgttttcatgtactatatctgatttgcatgactattctgtctttccagccaaggccaactatttataatgtggtaaaggagatgaccgaaaggatgggatatgcggtgagtttaagatgagatcttataagcagactttcttttgcaactttcgtgtggcttcatggtttaggttttctgtttagtgtttcatgggtgtgcttatgtgtgttactattttagttttattacttaatgtatgctggttatcatgcactcggacaatacatacatcttttctaaagtgtcctagtggaaagctgttttccagagttcacggtctgcagatctgttctcttaaatgtcatataatatgttcatttatcagttacttgattacttcagatctgttccctttaggtacgtttggtgcggattacagaaatggtccatgatgcatactattctcgattgtatcttgctaaggtaaaatgacttcacatgaactactccctccatactcgtaaaggaagtcgttttggacagcaacacggtctccaaaacacaactttgacttcttgtttctataaaaatatttattgaaaagtgatatatgtatacttttatgaaagtatttttcaagacaaatctattcatataatttttacattttcaaactcaacaacttgagagttattcatgatttatattcctaaggtttgacttaaacattgttctaaacgattttctttacgagtacggagggagtatctattttacttttgtctgaagtatggtgtcatgatatccagattggcaatgaagaggagactattagcttagatctcaagccatcagatgccatcaacattgctttccggtgtaaggtgtgcattcatctcctgtgcagctgtgcttctgattaattgctgagtgctggccatatttcctttaaggctgctaatcccagaatattggaagtgctgtgacttagttgcatgttggggattataacatgcatctatctgtttgagcgctagccacaaaactgtaaaaccagcaaacaggattcccttgtcctgtcagaaaagtgatctattttttggtgctgttgcttaaccttgttatttgtggatgatatgatttgcatgcaatacttctagaggtactcctttttatttccttttaaatcatttgaggaaattttcgtaaccaatgatttgagtacagcagtcaaagaatgtggaaaaatcctgatcttcttggtgttttgctgctaaatggatgtttatgatactcattccaatttattctaactttacataggttcctatacaagtgaataggcgtatagcgtataacaatggattgaaagttgtacaaccaacaccatctgagagctatgtaagctcagaccaattccaatacacaagacttgacaggtttgtaacaaaagtagcttcataggtttcagtaaagaaaggtttattttaaagcactgctaatgcatcccgtaccatttgaaggcctgacgatcaaccttgctttgaggcccaagagtttgatttggtccgcaatatgctggtcgctgctgttgaggaacgctacaaagatgctggtaagctcttgttggcttaaaatgcatatagtaaaatagtcatacattgtgacagtgttgcattgcattattttgcctcctctggaacagataaattttatagtttttcttttgtggaaattgcaactaattcgtacaaaattcctgcgttcaaaatgggccctaaatgggaagtctttgtttttttttatccgcctcccgactcacaaatatatgcagcagattgttcatggcggctaatatctggtatcatctgtttcagctcaatacagagatcagcttttcatgttccgggcaaagaaaaagaacatgatttaacaggtaacagtcgcccatgccattcttgaaatcttcatatagtcaatttctttgtcaactttcacgtacactagctcgatcaaactgacaggatgacaattcacttttcttgatcagttcctgaagggaggtgtacatactagtcccgcctgaagtgcataaagccaaacatcaagaagaactttgtaaatacttacagaagaacctatacatagatacatatacatactagaacatgattttgggtgctttcaattcgtggtggcgttggtagtaaaat

SEQ ID NO: 7123 - DNA, 1137 bp, Oryza sativa
ttgtggcagaggggacaccggtctccgagcccctctccatccccgaggccagctcgggcccttcgcagctgcctcacaccgcctattgggtgatgcagttcgacggctccctgtctcttcagggcgccggtgcgggggtcacgttgacctcgccgagcggagatgtcctcaaatacctggtccgccttgactttcgggcaaccaacaatatggcagagtacgagggactccttgcgggactcagagtggcggctggactggggatccgccgcctcctggtgtgaggtgactctcagttggttgttaaccaggtctccaaggagtaccagtgctctgacccgcagatggatgcttacgtgcgccaggtgcggcgtatggagcgccattttgacgggatagagcttcggcacgtgcccagacgggataacgcggtcgccgacgaactctcaaggctcgcttcctcgcgagcccagaccccaccgggcgcctttgaagaaaggcttgcccagccgtcggcgcgacccgaccccctaggggagacggacgagcctgaacggcccccgaggcccgtcggagtccaggcctcgggacccgaggggggcgctcccagctcccttagattgattgcttggatcgctgagatccaggcgtacctcgcagataagactctacccgaggaccgcgaagggagtgaacgcgtccagcgcatctccaagcgctacgtgctggtggaagggaccctctatcggcacgcggctaacggagtcctcctgaagtgcattcctcgggaacaaggcgtcgagcttcttgccgatatccatgaaggcgagtgcggagcccactctgcctcacgcaccttggttggcaaggcctttcgccagggtttctattggccgacggctctcaacgatgcgatcgacctggtctggcggtgcagggcgtgccagttccatgccaagcaaacccatcagccggcccaggccctgcagaccatacctctttcatggccgttgctgtctgggggctcgatatcctgggtcggtttagacgggccccgggcgggttcgagtatctgtatgtcgctttcgacaagttcactaagtggcccgaggcttatccggtcatcaagatcgataa

SEQ ID NO: 7124 - DNA, 6117 bp, Oryza sativa
cgatctttagctgcgtcacgaaccctgtcgcgctaaaaaaccgcccgcttcacgtaccctgctgcgccaaaaaaccgcaccgtcttgatcttgatacacaactctcatcatatttcattcgtcactatgtccctaaaatcggccgaatccccatcgattcagatctgacaatttccagtccctagtgtcttcgctcaccgacgctatccagtggagacagagaagaagcccctccaatatagttttgcactgaaagacctacttgggatacttctccaggctactagtttttacattttgtttatgaacgtttgactaatatatcataacatctcaatcgatcatgaaaacaagatatcaattctacatgttacaccctttatttctctgaactacacgccgcaccttgcaaaatttagaaatacacctaagcctattaagtcaaataggtggcaaagtgaccacccacctttctttctttctttaatattcagagatacacggctgaacaaaatattcacagttttaaaattggacaaagagtccaacttacaagtattcagttgacagaagaacacgaaaccttcgaggagaaaagcaagcaagccactctggtacttagaagcagaacctctttttctgcatataatggatgaacacatatgaattggctagctcagtgttatgagatattctttacattttttttcctaatactatatgatgttgttgacttttagatatatggttgaccattcatcttattaagaaaactatgcaagtattatttattttgttatgatttatttttttattaaagatacttcaagcataacttatattttttatatttacactttttttaataaaacgaatggttaacgtatgttaaacattaatggcgtcatatatttaaaaacagagggagtacgatagaacagggatgtgtgcgaaccaaatcatgaagttccctttgactcaatctagtttaacttaaaaaaacacacacttagcaacaaagaataaattcatttttatataaactagcgggtcaataggtacttctgggtgaactcactcacatccataactaaagagtagttggcatcaagaacaagcatttctcaaaaggaaagagtaattcataggaaaaatccacaacttacccgaaattgaatattcttttgctggtcggcgtatgcaagcagttcgtccagcctcatcaatgcatcataaagcatctgctcatgggagaaacaaaggtcaatatggaaaatcgcaattttttgttcagttcttagttcttactatagcgaacaatcaagaaattcggtgaactgccaattcttgggtgtaatagtataacatatagaaacattacctcagaacagtagttatatccttgataccactaagcaataagctatctaacgagagtacatcttccttgtcacacatgcacacccacagagtgcatatgatatgtcaagactcaacagtaccttctttgtagatattagctcggcttccaatgcatcaacacggtgaatggctccattgagcaattcctctctatccggtggcatttgagattgctttgcttcaagctcctgtaatttctcctccaattcaccaagacgtctcaatacagacgaatgtgtactgttttctgtgaatccgggagaagatggaggtcaaaactcttccaaaaactcaatttcttgagggaactcagcactatagttaccacgggaaatggcctggcttgatagacttgcagtcactctgcttgggacagaacgaagcacggcaacaaagctcacgattaagactatcaaccacgcagtaattcgatttcgaagtcctcccagttccatcgttatgtttctcaacgagaacgaatctgtgtaaaacatgcaacaaactcagtcaaaatcactccaataaactcttggtgggcttaccggtcaccactcactacatactataatgtaatggcatgtttggtttgaggaatgagatgaccacttgatcttatacaggtcgcttggtttgaggaatggaatggatttgtccatcatctctaaaaagtacatactaaatgagaaactgagaaatggagtcattccactagatttgagagatggtcccatgatggatcacccattctagatagtttgattcctcaaaccaaacggccaacaaaattcccagtatctcacatttccctagttgcatatgggggtacgaatgtttgaaatcagcaagtagacaacttctcaataagaggtacaagtatgaaggtgtcatataaagacctgaattaaaagccattgagctggttgatggaccggcgcatgtgtccacagccttgtcaacaacagggatgtcctctactctgggaggggcaccagatgtggaagtatttcccggcaatttggactgcagaaatataaaaagatgcatttatgatcatatttaccaacataaagattgattaaggaggaagaaaattaagaatgccacatcattgtttagagcgagtactaatcagtaatctgagctcagccttgtgcagttgaaaagaccaatagaacgagtactaatcattaatatcagcctcgtgcagttgaaaaaaccaaaaggtacaagatcttgcctcgtcaacgggtgtcaaatgagggtttatgatggggttaactgaagctataggagatgaaacatcttccatttcagaactagactcagcagaggcatcgctgcattttttctgcgaggggatagaatcaagcttctaacggatagttgttattttaagatgatgtatgagtaatctccattcaaagcatgcttacagttaagtgtctagggttaatataacatattttcttcccatcaacgcttgatatagcaagaattttccgtccatagtttgcttcaccattaaggaccctctgaaaatcatagacacattattttagtgtacaggatttcttttcaaaaaaaaaaaggtgtacaggatgaataagaagaagggtagggttcaggaagagtggaagacctttattatgtcaggatccttccaaggacctttatctgattttatgcaacctccatgttcttcacacctgcatttgccacccagaaaatctggaagttcactgaaaacatgaattaaacaaaattattaggataggaaccaaactacagtatttgtgacagtagaaaagacctaacctctcatcaatagtttcaagtagcttattttggtatttgcttccaaggacctaggtgaaaaaagacagataaggctattatcacatactagaagtaaatattattctgaataacaattttcaatacttacatgaatcttcgaagcagtttgtggatcaagaaatgattttattgtaccccataacatcttgaagccttggccagcatttataatgtacaatcggtgcaaggtctgcacgagcactagaaaggtattagataagtcctttgttatgaccccagataaaaacaagttctatagaaatgtatatagtgacaaaaaacgaagtgaaagggcaatagtgaaaaataacattaaaacataatggaatcacctacctctggatagttgtcattgttgatcttctgaagtcgcatgattagctctcttgcatcttttgagaagttcttcaaacccttcacataaaaaacaagttaactactaatctacccagaaattttggcgatagcaagattggctataaaataacataccactccttgcacatccaagatagtactgcacgaatctatgtgcctttttgcagcaatggagcaagctggaaacctcatctgcaagcacttctcggactccttgacatgatactttacatatctgtcaatagttgtgacttgtactaatttgttgggatcaacttttccaattagttctatgtagacaggccttccctctttatccacaccatggtaaaattgtggatagcactccagaacatcatctaattcgctatagtcaaattcctaaatgatccagatgtcaaacttccagaagttacatgaagaaagactatcactacctacgtactggagcatatggtccagtctctgctttacctctatgttgtcagccccgaactccttcctccatctaagcatttccgaccacatatgttttgctttatcaatatcaaattttcgcgctttcaggaacctacatgtgtaacatgtcataggcacatgaagaaattttaaatcaaataagcaacgctgaattttctgcaggagtaaggagaaatccaagtaactgtgactctgagatcagaaaaaaattgcacctcaacatcacgtgataatcatcatgacgttctggcaacaagccctcatcatgtaagcactggtgaaatctttggacagcttccagctccttgacatcccttatgtcctctatagaggctacatggtcgccgaccctccttcttctcttccttctcaaggaacgcctaaatttatttccagcactgatagctcggttcttgaaggagactgccttggcctttttgtcaccttctgagttgtcctcatcggatttccactctttcttatcatcatcatgcacaatgccttcaaaacctgcacctgctatatagtttcaacgaaatgcccctcctcctaatcaggttgaaatggtaacaactacattgaaaataatcaatacgagagcagagtacataggagttgcaattaactgaaagcagcgcaattacacgcacgttaaaaaaattagggaggtgtgattataatctctacaggtgctaaactactactattaaaatttcaatcccactcgaacatgaactatttgtctatttccgagtgatttgccatgttctccacttgccccaatgaaccccctcacagaatcaatctctctgcaaccgcaattttccggtgttcgcgaatgacaagcaggtaagcattgcataaacgagaacgggcaacgcatggcggcatggagaaacaacgaatcatcagggaacacgcagtcgaaggaagaagggaaacagttcgcactcacagggccgatcgatggaccccgccatcttcgccttccccacccgcggtccgacctcgattcctcgcagggtaatcgagtccccgagcctcgccgctcgccgatgaaccagggtttccggcggaggaatgcgcggagacaggaggggcacgagaatggagagagatggctcgtttgaaattgattgtttttcttttgatttaggaggaatattttgatgcttttgttttgggggagaggggaagagaagcttctgttttcttttcatcggtggaggaaggggacagggcaagaggggagggggtgttacacgtatcctctcgtggaccgggtccataggctcgcaacaaccgcgacgctgcatcagcctgcacgtaggcgtgccacgtgggcggctcacatcggctctggtccgtcgacctggcgagcgcgtgccacgcgtcgcgcatgggcgcacggtacgcccgtaatatgaggagatcgagccggtgtagagcggctagagcccactatggtgaaccagctccgtttgatctgcagatgccgatgcttatgagccgttgatttctccttggaggttctgattggcctgatcgggacacgctcgcaggctcgcagcagtggacggcgctggtgatttttttttccctttttttgagattcgctggtggggtttcacgtctatggagtatggacaaggttcaccgaaatttattctggacgtgacggttcgaggcttttgggccgggctggaacttgagagtacagttgttggttcgggccgaaacttagttcggagcaaaacaggtattcaccgcaaactaaataggcatacaaattcaaatcagaagcacgaggattcgtgaaagcaatttgcttaacgttttgctaaaatcaatcgtgagtgacaaacatgggcaccttttgagtcaattttactaccaacgccaccacgaatgaaagcacccaaaatcatgttctagtatgtatatgtatctatgtataggttcttctgtaagtatttacaa

SEQ ID NO: 7125 - DNA, 4774 bp, Oryza sativa
ggaaaaactgaatgctccaagttctcaaatttatattgatattaatgaaataatcagctaacaatgttttcatgtcataccagggttatgatactttagttggccagcgcggtactcagctctctggaggacaaaaacagagaattgcaattgcaagagccatcctcaaagatccaaaaatccttttgctcgatgaagcaacaagtgcacttgatgtggagtctgagaggatagttcaggaggcactaaatagaatgatggtagaaagaaccacactcgttgtcgctcatcgtttgagcactgtgaggaatgttgattgcatcacagtcgtccgcaaaggaaaaatagttgaacaaggttgaattaacttgaaatgcactgtttttctattatagaaaatttctgcggtcaaccttaaatgattcattataccaaaacatgtcctgcgtacacaggtcctcatgatgcactggtgaaggatcccgatggagcttactcccagctaattaggctacaagagactcatcgtgatgaaaggcataaactaccagattccagatcaaaaagtactagtttgtcattcagacgatcaagaactaaagattttctcagcaagagcaacaggtattccttcaagagccccttaggattgcctgttgatatacatgaggatggaatgacaagcgaacaacaaaaggttgaccactctgacagtaaggccattaaaaaaacaccatttggacggctttttaatcttaataagccagaagtgccagttcttttgttaggttctatagcagcatcagtgcatggagtcattttgccactatacggtataataatgccaggtgttctaaaatcattctatgaaccgccagatcagctgcgaaaagattctagattttgggcattgatgtctgttgttctgggggttgcttgtttgatttcaatcccagcagaatattttttgtttggaattgctgggggaaagcttatacagcgtgtccgtacactgtcatttcaaagaattatgcaccaagaggttgcttggtttgataagccctccaattccaggtgcgctactctaatgtacttttgctattttatcttttataaaaaaatatttacatttaaaccaatgctaagaggccatcttatttcttacagtggggcacttggtacaaggctctcagtcgatgcgttgaatgtccgccgtttagtaggagataacctggcccttatagtccaggctgtagctacactaatcactggctttgccatagcttttgcggcagattggaggcttgcactgatcatcacttgtgtaattcctttagtgggtgcacagggctatgctcaagttaagttcttgaaggggttcagtgaagaatctaaggtgacacattacagcttacaactgtaaaaattgcttgctgttttattgagaatgatctagacaagtgatctagaattaaattgattgccattataatgggatctcattatacaggagatgtatgaggatgcaaaccaagttgcggctgacgctgtaggcagcatcagaactgtagcatctttctgttcagagaaaagagtggtggcaatatacaacaagaaatgtgaagcctttaaaaaccagggattccaagccggattcgttgaaggaatggcctaaggttcttcaacctggaggtattatctgactaacggccttggcttctatgtgggtgcaaagttcgtaagtcagggaaaaactactttttcaaatgttttcaaagtaaaaaatcctaaagtatttcaagtaccaatggcctatatgaatattaattctagtatcattcacaaatgggctggatgcttttcaggttttctttgctttagttttggcagccgttggtgtttcgcagtcaagtgcattgtctactaatgcacaaaggcaagggattctgccatttccatttttagtattatcgatcggaagtctaggattgattcaagtagcgacgagggagcgataatggaaaacgtcactggcagcattgatttcaataatgtcagtttcaagtacccatcacgccctgatgttcaaatattcagtgactttaccttgcacattccttcccaaaaggtatacttccacattcacctatttgtcttcctttttcctatttcttgaaactagtgcatgcccaaaatttccatcagaaaattaacttgattattgaactatttacataatacaactagtaacatacttcaaaatagatgcgagtgtgacccatccacttccgtgacatcatatgtgttgatacacaactttacattttattttttgcatctcagcatttccatgcactgaaatagttatgactaaaccttttccttccttttctacagaccatagcacttgttggagaaagcggtagtgggaagtccacgataattgctttattagagcgtttctatgatcctgattctggtaatatctcactagatggagttgaaattagaagcttaaaagtcagctggttgagggatcagatggggcttgtaggccaggagccagtgcttttcaacgacacaatccgtgccaacataacatacgggaaacacagtgaggtaacagaggaagagatcactgctgtggccaaggcagcaaacgcccatgagttcgtatcaagcctgccacaaggatacgacacagtggtaggtgagaaaggggtgcaactatctggtgggcaaaaacagagggtagcaattgcaagggccatcctaaaggaccctaagatactgctacttgatgaggcaaccagtgctctagatgcagaatcagaacgtgttgttcaagatgcattggatcgagtcatggtcaacaggactaccattgtagtggcacaccgcctctccacaatcaaaggggctgatatgattgcagtcctcaaggaaggaaaaattgcagaaaaaggaaagcatgaagcactattgcggatcaaggatggtgcatatgcttcacttgtacaactccgctctaattccgagtaaaatgatgtatattttgatggtgtataacttatttagccataaattctagctacttgtgatttgagaagttgatgctaaactagagggtgttctttggtagtttgttactttgttgcatgaaagacctatggttctgaacgtatgatcttggtagccacagacagtaaattcaactgtgtctgtgtgtacgcactaactatgatggaataagccttgtggtctttggtctttgtggtccttctcttgcttttaggttgtttttccccttttaggacagcatcctttcagttttgcttttagcatctttcggttttgcttttagcatccctaggacagcatctagcatctcctttatgctttattcagtttggatgctctctaggacagcattgcgttcaaattttagactagtgtgggcagcaattagctagcagccatccagccagctatggctatatatatatgtatccaacctccctcgggaaggtatggcttttgtgtttagtgaatgaagaaaaccagaaaattgccccatctcgagtgccatcctcttctcaatgagagtaaccattgaaattctaacatctggtatcagagccacactttcctgtaggctaaacatctcttgttccaccccttcccaagctcggttgagctctcagccagcagcagcagcagcaccggttgctcctccttcccctttcccttccccctctccacgcagcagccccccggaggtgcgccatgtccgacgctcagtctcggcgttcggtcgcctcgagcactcggcgtcagcaggacgccgagctcgccgcagcagaagagcgcaggcgagcaacggctcagaccgctgcagcagcagcgagggcggccagactggcggcagcggagttggcagcaaccaaggcggaagcggaggcggaggcggcggaagatgcggcacgtgcggcggaggtagaggttgagaccttgcgcagcagcatcaacggctccatcgccggcgacatcaccgccgacagggagcttgaggagctggcaagaggaagggcacgggagcgagcagagcggtgggcagcagcccacctccacggcggcggcggcggcccaagggaccgcgcgcccgccgacgggaacccagacgggcgcaggcgtgccggcggcagcccggagctcgcacgcggccctcgcaggcagcacggctctctctcccctgaccggcgccatggtcaccacggtgtccagacggtggtcagggactttggtcccggcggtgggtggcctaccctcaccaaaaccaactacatcgagtgggccgcggtgatgagggtgaggctccaggtgcggcacatgtgggaggcagtccggtacggtgacgtcaactacgacgaggatcggcgggcactggatgccctcatcgctgcagtcccgcccgagatgcagttctcgctttcccagaagcggactgccaaggaggcctgggacgccatcgctgcggcacgcatcggcagcgaccgcgcccgcaagtccacactgcaggcactccgcaaggagtgggagaacctggccttcaagccaggtgaggatgttgatgactttgctctccgtctcaacactctcttgcagaaaatggtgcagtacggcgacgacacctacgacgaggagagagctgtcgagaagctcttccgctgcgtccctgagaagtcagacagatcgctcgctcgatcgaatctct

SEQ ID NO: 7126 - DNA, 5777 bp, Oryza sativa
  unsure (1)..(5777): unsure at all n locations
tgttttggacacatctaaggtttttgccatcacgcattttaatcacaaatccatcagatacacttctgagctcaactgcaaggacagataaaaccacaagtttaatctcagaaatgtacaatggttgtttggcaatcggcataaatgatatactagtgatatgtaactaatactgcaacagtagcttggcataaacggtatgtagctgatcaaacaacagcaactgtttcaaaggctcacagcgaacttcccaactcccaacaaacagtgggccggacccggacattgctcgaacgactatgcatcaaaacccaatgaagttacaagttacagtgtaacagaagtaagcaattaccagcctccatcacgctggagttgacgaactcctcgccgctggcgtcgtaatccgcggcagcggcgccgtccccgtcggaagacgagccgtaactgcaacaaacaggccagacccagccgcttcgcgcatgccgctcggacgggaaaccgaagaacctgcgcgccgcccggtagtggtctccctgcaacccacaggctcgtctcctcaggtgcacgcgcctaagcagctgcccgctgatcttcgcgtcggaggtcagggcgccggtcgccggagcagcatagcgcgggagaaccggcccgttgatgatctccatccttgaatttttaccataaaccaaaccgtcataaacgaactcaaaggcaacagaaacatcagaactcaacttggagaaaggaatcgatgcgattttcaccgaacgagaggtccaattagcgaaatgagaccacagcgaattggcagaaaccaccaaattgaagagttgacgttctagagattgagggatgaactagcttaccaccgatcctggcggggagaagggcctgaatgcctgatccgagctgaaagacgcaggaatttcggaggattttggtaaagtttttggctcgaaaattttttagccaaatgttaaaacccttatcgctaaacccgacggcttttatggcggatgcggttgnnnnnnnnnnnnnnnnnnnnnnnccttagatatttatggcagcagcggacgctttttaagggtgttttggggaatacggatgaccggatggagtggccatttctgtccgtttgactgtaatggagagatcgctccatcaggatattttttctttggatagaaagcgtaagcgtgatgtggaaaggcggaagatatttcatactatacgaagaatatacttcctccgtttcatgatgtaagagtttctagcattacttatattcatatagatgttaataaatttagacatatatatgtatttagattcactaacatctatataaatataggcaatgctaaaaagtcttacaatatgaaatggatggagtagctatttaacccaacaggagttctattttactattgttataaaatgtaacatatgaaggttgtatttgccaagtcccaagttggccaagtaacatcaacaacatgctacaatttttagtgggaaaattggaaccatgccattataattttgcaaaatttgttatatgccatcctgatccacatgtcattgactcatgtgggtcttacatgtcattgagataccgataacatatctcaaactttacaaagttataatggcatggtaaagtttatttcggtccttgaatttggctcaaagttcatttttcaccctaggtgctaaaaaataattgattttatatatacgtggtgcaatcgatcgcccacccaccaaaaaaaaaagatggcatgtagatcatcacatgtaattgtgacaagtttgtggtgtttgagttcaacaaacaaaatttacttatattctagtatcaagatattttcagtgaaaagtactctctccatctcaatttgatcatcccctaaggtttctaagatcttcctaaaatgatcatcatttaactagtgtcttttcgtttatttatgaaatgagtaaatgtacatcattgcatgtgttgcatgtaactaaaattgattaatttctattagtgcaatatcataatatttaaaataagagcagttcacgggatacgaagcgatggaacaccttagcattaatttaagaatgatggatatgttggtgtccttggtcttggtacgctttgcttagaggatggtcaaactgggatggatggatggaaggagcattgaggacattaaaacaaatggatatatactatctatatagttactgaaaggtgaagatgtagcttagagggtgtagacccccgattttggaaatcggaaatcttctgtgtttatccgtaccaatctctggatcagtagttggtacacacatacatagttggatcacaacatatcacgaatgaattcaggctaaaagagttaaatacttacattagggccaggtaggccaacaactatcagagaacatcagcggaagacaaaataatataagggcccggttaacatgccacaggcagtcgactggggaacgagacctagaacaagaccgcactccgatcatcttgttggatacgcaagcgtaccgacaagggcttctcttcaacactctcctaaaagatatataaacagcaagggtgagtaccaaccatactcagcaagccaccacagcaacgatgcatatgatagagggtatttcaaggaatggcttcaggttcctttgcgcaaagcaagttttacaaatcttttcacaagcctaaggcctagcatagactgatcaagttttaataccagtgttcacattaaacaacgatgggtctgtccaccatccattgtaatcccaaggatagcttcccgccattgagtcgtcatggttttctgaggacgtccaccttccctcctctcaggaagtggctccatcagcataaaattcatcatgcaatatcccatcccacacaagttaagaatttagagtctagcgaagtgtaatacatgtcccggtgctcaataaccgtgagcacggctattcgaatagattggtttactcacactgcagtggatgtacactttacccgcactccgcaactgcccaatacatgagcctcgtcccaacacatgagatgtgtcacggcaaagcttttcgataacctcgcattggcagtacccgctccatgaacttttacatcctcatgcactctaggcgtatacggtttctagcagtaagaggagttctggcgcaccttggaagggaagactcacacatgcattaagttataattatgtttagattctcacatggcagtcctaccgatggcgacaccactgtagacacccgcctcgcggtcctaccaatggctgccccaccgtagagcccctgcctcacacatcaagaaaccactatgcatggatactgcctccgctcagctatctactccgctaggtctatacccatacgagaagtgcggttgacggggggtcgttcatacttaacttcatggctcggtccttaattgaccagggacggcactagccttttccggacaccacccaatccttcagcggcccagtcgaaaacagttgtttcactttattttcgtttcacaaatcatgtcatcaatatcatggaaatgtggcgctcatgtctccacatgccgcatttcaattaccttcccaaaggtaattgcccaagcatatagcatttgacaaatatgagtatacatgattctagagtggcatctctaagcatttgtcatagttgactagagactcatacgtaatcatggttacaagggaataaggttaaacaataatcaaggtatggcatattcacaaataggatgttcatcattgcatgcaatcttatttgtaaataaaaataatttcgcaattgggatcaacatgttcaaggaatagtgatgacttgcctgctcaggataatccttattattgatataatcttgatcaaccttcacctcctggaagttgcagacgttgcctcacgactaaccgatacacaaggtctataatacgcgagaaaaaccaatattcaaacaacaatcaaatatgcgcaacaaaatgtactattcgtgtttgctaatggatcccaatcatgctaaggctaaagtttcttaatctttctattgtcatcgtggcctatttaggagttaaccaacatagcatttatgggatacatatatatttggctaatcggtggtttagtctatcaaatagctatggaaggattatggctacgtatgcatatatctaaatagcacggttacatatcagaggttctgttgttagatggatttaggatcaatcaaataattacagtgaatcatttgtattattattttattgatggaagctttactttaattatgaacatattttacttgccattataaattataaaagggctaataattatccatgctctatatgttaaattcgggaggtttataatattatagttacagattatctcttaatgaacaatccggagttacaattgaactatgaacatatgaggtcaagatttataattagtacttatctactatgcatgtttgttatatactccccagtttaatatatgaaaaagataaattaattgtataactataatgggatgtccaatatatgtgtgcaacaacgtataatgttttggtcgcctactgtacatgagcttatttagaaagtgtactacccaatgctccaagtgattcctgaatatattgtagtttaattatacattagctagtttctatgagtgatattgtatatgtgatgcgacaagtttaagcactggttctattgggttactaataagtggtaatcaatttaggcatatatatgctattctatatggtattgcatcgattaatttacttagtgattcctccacatttagctctattattattctcctaaacagattcatctatgtgtgtttatattttagttacataatcataaggctacacttgatttaaataacctataagccatggatttaattatatggccatcgaatattaaataagtactagtattttccaatacatccattcatttgagacatcacataaaattagtttgtgtggttgttacagtggcaagacatgttagagacaaatattattacatctactctaccgtacaatactaattttatttattaacatatttttaagttgactattatgcatcatcttgatattaattatttaatatttataaatatattttatcaaatagtgaattatatatcattggaaagcttatgaatttagatgaatttaggttcaagtttcactcaaatcggagctaaaatgaataagttatgctagtgtaaagattcaaatttgaataaatccgagaaattgtaaaaaggcactgttcctaattcatttatttataatacaaccttatccacaagctatagtgactgacagggggggtcttcctattttctttttcttttcttttagtggtcttcctaaaggaatttataggagcaaatgacaggtggggcccactctaccctgtcttctcttttctccctctacctttgtctgtcttctcctctctctctcacggccgagcggcgcgtcgcggctaccggcaacgaagggagggggcggaaggcttaccgacggcggcggcggcgacggtggcggcggcggcggcgacgcacggcgcggcacacggcgcggcgcggcggtactgagggcggcggcgcggtggagaggaaagaggggaggaagaggggaatggggaaatggtgtggggtggaaaggg

SEQ ID NO: 7127 - DNA, 4890 bp, Oryza sativa
tgccatggccgggggggggcttccctcttccgcgccagtggcccctctgatgcctcgttgtgagctagcctatggggcccaacctcttttgtcgccgcctcgtgccatgccgccgctgccaccctttcccttcccctcctccgcctcccccacctcgccggcgatgacgaccatctcctctttgccggtgccgatgcccatctcctctgcgctgccgccgacgccctcctccacggcgccgtcagttgctgccgcccgcgccctttgctgcgccctgggcctccccgccgcggcgccgctgtccccaccgctccgtccggtgtcatgtgaatactaggatggcatgtgggtcccacatggacccatcatttttttttattttctagtgtaactggtacatgggccccactatttttattttttttcgacttgaattaccacgtaagcgtcacgtcaatacccatggaataaaggcctagtcaaagaagccacgtagacgccacgtcacccaaatccaaagacaataccaccgaaggacctagtttgcactggttttgtaagttgggggataagttgtatccggttttgtagttcaaggatgattttgtaattgggtgacaagatgagtgaccttcgatgtatttttccataattaaatacttaagggtgagtttgaggagaaggagatacgcaaaacgaggtgagcaattagtgcatgattaattgagcattaactattttaaatttcaaaaatagattaatatgattttttaaatcaacttttcctatagaaaatttttgaaaaaaacaccgtttagtagtttgggaagcgtgcgcgcggaaaacgaggtgttttctcaccagccttagtatgtactgtattggaccaataatattttttctaggtcagccactgcatgcgggcttgacggagctcgtggctcctcaccgggagaccgcacaggcccccctttgccggttcggccgggggcttagggtgaaatctcaagctctctcggtatgtggaaagatcgccagctaggaagaaacgcgagacacgggcgatgtatacaggttcgggccgctgggaagcgtaataccctactcctgtgttttggtggatttgtgtatgaacaagtaataaagtgtcaaccagcccccaatcgctctgggatcggatctggagaaggccttgtgtccaaaagtccccccctatctaagtgggcaaggtcctccttttatatctcaaggggataccacatgcccctctccctctccaaactggactgttcttctcttcataaatggacggagatcggtacggttgctctccgggtgcccttctgacgggacggcccatatctacccccacttccgccggaaacaggtgcgacgtgggattatggctgtctgttgatgacgcgaccagtgtcagaccggtcacagatcagtcatccttgtccaccacgtgtcagcttagcaacgtgcatgtttgcccttcttcatgtagcatcttgcctgtaatggttgggatgaagcctggtataaatctaaccagggctaacgtgccatctctaagagattacacgctagctccggcttgagacgagtgcctagaggctttcgtcttgacgggatggggcaaggcgtgcgtcagaccgccagtcgccacctaacccgtgatctgaccggtctgtgactggtcacagaccggataaaggaacgcgctgcactacgctgcatgcagcgtgacacgttcgaccagaccgcaataaatgtggttaggtgaggcttaccgtgttcacccaacccattcacgtggcgctaactccacaaggggtcggggcgcctcggccctcggggccggggcaggagtcacccgaccccccctcggggaaatcaggaggagggcggacacctcaccctcgggcccgacgtccccgaaggtgccaggccacgtgggcgattgtgtctgcctcaagcctctggtcacgatactcccggtcccatatcaccgacagtagcccccggcgttatgccagggcgatcgcccttctcaagggaagcggtcgggcgtgacgccactcctaaagcctggtgacaggtgggaccggtctccatggttgggcagaaacccaacggtctcaaaccatgcacatcggtaatggtgacttggctgtccataatgggcggtctcttcgagactgccacattacttgagcggcgtacgaatctgggtgagccgatttgcttcgcctggagatatggtaacgtcgcttcggtcggcgagcgtaattaacgcgcgcacgatacgatctatctcgactgccacaaccgcatatccacctcatgcgccgcaagcgggcgaatgggattagtggaagcgtgggcacgagaaacgagggagcgagatagtgagaaacgagggagcgagatagtgggcgcgagaaacgaggagccaggcacagcgatggcaagggtataaagacaccgaggaaaggatttgctcccttcctttcgccattattccccttgccttcgctgcttgagccctaactctttctctgctgcgcctttccttcgccacacgcgctcgttctcaatcatcccttcctccggcgccatggcacggggttccgctctgctcgacggaagcgtacttccgccttctcgcatcgtgagcgagaggcatgccgggctgccgcgccgctttatgccggaatctgccaccggccgggagatagtgatgctgggcgagggacgcccggcaccagactacccggggcggtccgtcttcttcctccccttcgcaatggcagggctggttccgccattttcttctttctttatggatgttctggatttctacgatctccagatggcgcacctcacccccaatgcagtgatgacattggccatcttcgcgcacctatgcgagatgttcattggggtgcgcccatctcttcggctgttccggtggttcttcaccgtgcagtcggtgtcgccgccgtcggtggttggtggctgctacttccagccgcgggggccggtgttgaaccgctacatcccctgcgccctccgcaagaagtgggacgactggaagagcgactggttctacacccccctcgccaacgaagcgcgcctccgacttccaagtcagcccccggcgcaggtctccagctggcgggcaccggtagatctgggggatgactatgacgccgtcctcgaccgcctggcgggcctgcgatcccaggggctcacaggggccatggtgtacggcgactacctccgtcgccggattgcgccgctccaacggcgcgcccggggcgcctgggagtacaccgggtccgaagactacatgcggacccaccagggagtcagatgggattgggctcccgaggacttcaagatcgtggtccaacgggtgctgaatctcagctccgtggaggcgtctctcattcctcaaggaatcctccccctctgcagcgatcccgaccgcgcctccattctgaccattatgatgggggtcggggcctcagaggaggaaactcctaagggccacgacggcgcgggcgagagccgccggggggaacaatctaccccaggagggggtcgtgcttctgggccccgcgccgggggctcggggagcagccgccctgccgacgcccaggggaagaggaagctgggaggaacacctcccccatctcctccccgagggggcggggcggtgcgtgccagcagtcggcacccggagggggccgcgccgacatcgcagcccgagggggagcgcaagaagaagcggctccgcaagatgggggagacggaaccatcccggggaaacctgatttcccctccaaggtggtcatttaaccgaccccctcgcaggttcgtcccactctcattgcgaccgtctttcttttatcccaaaagcaagttttctcttacccatcttgttcgtcttctggttttttcttttgcttcaacgatgtcccgtcacgttcctcccgccatcccaagtccggccagtccgaggccgaagatccggcggccgcagaggaacggaggcgagaatctgaccggcgagaggccgcagatcgccttcgggaagctgaagaggccgcccgggaggccgctcgggctcgccatgcagaggataccgctcgggaagaggccgcccgggctcgccaagccgaagaggctgctaaggaggaggccgcccgggctcgtcaggctgaggcgatggcgtcttccgaggcagctcacgacaaagctgcgggcgcgtcgcttgggcccactccctcgggcgacgctcaggcgacagcctccagggcggctcgcgacgaggccgcgggcggatcgcctgggatcggatctggagaaggccttgtgtccaaaagtccccccctatctaagtgggcaaggtcctccttttatatctcaagggcataccacatgcccctttctcagaagggcacccggagagcaaccgtaccgatctccgtccatttatgaagagaagaacagtccagtttggagagggaggctggcgatctttccacataccgagagagcttgagatttcaccctaagcccccggccgaaccggcaaaggggggcctgtgcggtctcccggtgaggagccacgagctccgtcatctggcgcgccaggtagggggaaacgcgagacacgggcgatgtatacaggttcgggccgctgggaagcgtaataccctactcctgtgttttggtggatttgtgtatgaacaagtaataagtgtcaaccagcccccaatcgctctgggatcggatttggagaaggccttgtgtccaaaagtccccccctatttaagtgggcaaggtcctccttttatatttcaaggggataccaca

SEQ ID NO: 7128 - DNA, 5212 bp, Oryza sativa
aaaagctcgctccactaccccgcgctaacgcacgcggctccaccttaagcttatggtcctccgatttctacctgtccggccgcgatacgccaccacgtattcccacaaaacaaaaggggaaaaaaaaaaggggcacgagacgaatggatgcgccgtgacaccagctgcgtgcagcgtatcgcacccaacccgtccattccatatgcacgtatcgtatcatatgatataataacgatgacaatatcttactagcaaatcatcgtaagttcatagggacatataggcaatgcgagccagctgatatttatctctctctctctcccccgacctagcagccatgttcctcttatgtgtgtgcgtgcgtgcacagttcgtgcaagttgggaggagacgcttgccaatggctggagccacatgatcgagccagcgattctgattccgttggcctgcctataaataccccgaggagcgagcactgcagatgccaaggcagaggccaaggtttcttctctgctagctaactagtgggctgcttgggtggggagcccgggccggcagatatcctgtctgaaacccttaggtatgtattttccctcaaatggctggttaatttcggctccgaaatggcagttcgcatactatcatgcgaatggcattgtcttcttcgccatcacttgtataaagtcactagtgcacatgtagctttcaagaatcaagaggatgatcactgctagctagcttatgcgtctgtttagttaggccaagcagcagcctgtgttgtgttacctactcatttccaattgcacccattgcatcaggaaccttccatctttcacttgtaaaaatcttactgcatctgttttgcctgttcaaacatggattttccatgctctctcaagtgtgaagcagatcgtttgcaacttgcagttgtgtttaggagccatagtagacagggtatcaattaagcacaaaggtcatgttgcatgcatgactcaaagtttttttttccttcatttttttttgggtgggaagaaaaagtttggaccaatggttttacgccagcttttatctcctgtagcatttcacgcactttcacgttgtgttttttctccctcccgggagtcaatctttcgccgtacgtgatatgataatatcgaatccgagcccatatgtccttgaagagactgacagaattgtactttatctgaaacccggttgctcggtcggtcacaccaaactgagccaaaaaggagatccgagttagacaaatcgcgccttgtttgcataaagcggcctaaacttagatgcccatattactatcacattattctgaagaatttttgttcagaaaacaaacattattctgaagaatctcttttgcacatcgcgtgtagcaattgttcgtcagtagcttgctacgttctacagttctctgcacgagtggcctaggtagatactgtatttttttttaatatcttgtgcgaaatgggtgtacaaaagcagagtcctgaacatgtacgcactgcattgcgtgatcacagggacagggacttcgaattcttggaggcaatggcgtcctcgttgctccactgctccgacaagctgccgttcatgaacgtggagaccgtcctccacatgaaggaaggcctcggcgagaccagctacgcgcagaactcgtcgcttcaggcgagcaccttgcttccttgccgctcatggccattgattctttttgatccgtgcatgcatttttttccgagttctggctctgagccatggcgtggccattcttgcagaggaggggcatggacacgctgaagagcctcatcaccaactcggcggcggacgtgtacctgtcgcagatgccggagaggttcgccgtcgccgacctcgggtgctcgtcggggccgaacgcgctgtgcctggcggaggacatcatcgggagcatcggccgcatctgctgccggtcgtcgcggccgccgccggagttctcggtgctcctcaacgacctcccgaccaacgacttcaacaccatcttcttcagcctgccggagttcaccgaccgtctcaaggccgccgccaagtccgacgagtggggccgccccatggtgttcctctccggcgtcccgggctccttctacggcaggctcttcccggccaagagcgttcacttcgtctgctcctgctccagcctgcactggctctcccaggtacttaactcctctgacactgttgcattgtttgatctaacgattaaccggtgtttaagtgggaaattttctaaatacttcaggttccttctgggcttcttgacgagatgaacaggccgatcaacaagggaaagatgtacatatcaagcacgagccccctggccgtgccagtggcctacctgaggcagtttcagagagacttcagcctgttcctcaagtcgcgcgcggcggaggtcttctccggcggccggatggtcctcgccatgctcggcaggcaggccgacggctatatcgacaggcgtaccaccttcctctgggagctcctctcggagtcgttcgcctccctggtcgcacaggtgagcagatagcctgatactcatcagtattcagaactctgaactgataatctgaacctgacggcaatgcaatgggtgggtgcaggggctggtcgaggaggacaaggtggacgcgtacaacgtgccgttctacgcgccgtcgataggggagatcgaggaggaggtgaggcgggagggatcgttcaggatggactacgtgcagacgtacgagatcaacctgagcagcagcggcgacgcgaggagggacggcaggacggtgtcgatggcgatcagggccatccaggagtccatgctcagccaccacttcggcccggagatcgtcgacgcgctcttcgccaagtacaccgagctcgtcaccgcgtccatggagagggaggaggtgaagagcgtccagattggggtcgtcctcaccaggttgtgacacaaaccacaaagctgtgacgactgaccagagcgatttgtaccagtttatagtttgaccccatgtttctgaattctaatgtgtgaccatgtggtgtttagttgttgtattgagtaactgatgatattaacaaattccatgtgtacttaactggtaggatggaaagaaattaatggaaagtggattaacaagtgtgttgaaatgccataaatcgtccgctactcccctttatcatcagtaattcaatatccagcaatactactgattttgtggtttatagctagctacacattcatacgaacgctaataaagttttgcgacttttttttggtttcgtaaaaagaaaaaacatttttttctcgcaaattttttaacgctttttatactttccctcaaaattaatgtcacaaatgtgaaaacaactgaacatgaggccttgtaatgggctggcaagagcaaacaagggcaacaaatttcgaccatcgtgggatgagatgggcttaaggaggcattagggcttgttcagtttgttgctaaaatcaaccatactaaattttggcattgtcaaattttggccaaattttggtaaggcaataaactaaatgacactttaccatcacaaccttgccaatccctaccaacatttgggattctagaaacttctactcatataactatatcaaaaattgttgaggtgtcaaactaaaggcctgttcactttgatgccaaaaaaaaccctatcaaaatttgtcattaccaaaattttggtaactatgccaaaattttggcatgatttcttatatagttaccaaaatttggtagcaaactaaatgtagccacttttttagcaactttatcaaaatttggtaaggttgaaaatgacatcaaagtgaacaggccctaaactccatcttcacagcttgatctttgctaaaattttagcatcaccaaattttgccttttcaacaaatggtaaggtcttttttgcaatgaactgaacaaaccctttgtttttgtatgtgaggcccattaaggaataagtccatttatatccctcactttttgttgagttggaaatcttaacccctaacttacaaaaccgggttaaattaggtcctatagcagtattgagggctggtttcactggcatgacatactagtcagcgaaagaaagtcagtgaaaagaaaataaaaaaacatatagggcccacatgtaagtgagcttgcacttcttccccaactaccctctcttctcatccctcgacctcaacctctctctcccccaagagctcgccggtaaggagaggggcggtgggcggtggctggcgagagaggagcaagatggcggtggctcatatccttaccgacgagccctacgtgggaggttggaggaggagatggcgcagtggagaggggatggagcgagggggcgaccgccgtcaagggtggagctcggggagccgccatcggtgtggagagggtcactgcggctagaatatgtgtaacaaccctccctccagaaccgcgtagccagtccatccgacgggcgggcccacttacacataccactccacttatactttcgtcttcgttttgtgtaaaaaggttaacccgggagtgagatatggttggagggaagatgccttataagttggtttcacccttactaaactagcaaggtggtactaaacatgcacacacagctctcatgggtcatacatgcctcatcctaattgggccaggatgtcacaatatggctgacgctgtccttactcgcaaccgctgccgagggcgatggtggcagtgaacctgtggttgccgaagcaagagctgacgatcacatcatggcagtaggaggagcacaatcagtggactccatggtttcaccatgggcagggtgattgggaggcttcgggtggccttggcctctagctcgatcgtatcagtagtgagtgatgctttggcctcctgtttgggtggctttgctatagcgcctccctcatggccatcgtcgctgagatccatcaaggtatgagaatgggtcaccgcgccttccccatggcttggtgatcgcgttgcatcgtggagcacgaaatgaagcgctacgagagcggtgatccacaatgagtaagtgctctgtgtgttaggatagttgctcgcgcttcactggggaggcatggttgtgatgctgaagcaagcgtgccggtttaagaagctcgtgatcattg

SEQ ID NO: 7129 - DNA, 1853 bp, Oryza sativa
acatgaccatcaacagtacaaacagccaacagacaactgaatccatatagggaaaaaaaagtacagaggccagataagcaaatgaacctagtagtgctgaagaataaatctagagagagacaaaaatgatgtgatgaaacgacttaaaaaaagacatacccggagttaggagaaaacccttgttgagaccatgaaatagatcgagcgcataattcagtttcacgtgctaaggaagtgggcattatacatggttcaaagagatctgcaaaataagcaataaaaactgattcttggtgcgcaccttctatcgatgtccagtgttacttttcagtttgtcacaagagaagttgactgccaaaaatttcatgtaatcaagataattacatattaaaattacaattttatttttgtaggaactcaaatccacactgctgaattgatgtttaagaaagcgtaacttctggatgcatattgttgaattgcatcttcacatgcaattagcctaaggcattgcttaataatttttaaagaaagcaaagtgtacatattgatgatatttatcatcatttggagttgtccaccgtgatctcaagcacaacagccacccataacatttaagttgttgacagaactctaaagtaactgctaaactcaagctgtcccaatcattttttcttactatgcagtgctaacataaagaaacttaacaccgagcatctcttccactccacttcggcaatcatattatccgtctaaactgataacacgtgaaaagcaaaaggaatgcagcacaaattcatgtgtttcactggaaaccgtaccttctctgttaaccactcctatgggaaatgggtcgctaggacgaagaacaaccagttcccgaggcccctccagtgcagatgggttctagaatcaaaaacacaagatgaacagtcataactcctgaggaggacaacatggttcgaatacactaatgcaatgaaaccacacataccaggatagtgataaggtgaccagaggcaacagccaccaggttctcagtcgaccaagcgattgcatttgggtacgacggcgacgcgatcaaggtggcagcctggtaatgcgaagccatggcactcacaacaaaaccaggcggaaattaacgcgggacaagggggttcagttgagccactgactgcacctgcacctcgtctaagttctatcatcctatatgtaagtccacagcatgcttgtttgacacatgggggaaaatcctcactgcagatggatcgggtttaatcccccaccacccaattcctcttcgctacggagaaatttcagctaagccctaggaaaggaaaggaatgaatagtggcggagagctaaaactgcaggagtataagagggggatgctcaagagtcgacctgtaggcatgcggtggagcagccgttgcagtcgccggagtcgggaagagcgcggcagcgcttccccgaggccggccggactcgccgcgccggctcccaccccggtgctgcgacgcggagtggagcggacgagcggaggggcgcggcagcaaccggcagccgagcgaagggccgcggcgtgcggggggcgtggggcggcgggcgagcggagcgcgtgctgtcctcctccgccctatgtcgcctcagccctcaagccgccttccgcccattgttgtatgttcggaggcccaattggttttccgtgatttaggccggcccagttgccagctttcgaatgggagtctgggccaatcgttccatcgtttccttttccaatcgttccatagtttccatttcttcttaactcctaacaatccttccatcaagttcaaaaaaaaaaaaaaacaatc

SEQ ID NO: 7130 - DNA, 9245 bp, Oryza sativa
tccgtaaaataatgaagcatggtgctatttatgcgtgcgtgaactgcttgtgtcattaattttagtttttggcttttgctagcttcatttttaccaatttcatacttatctgattcgaaggctcaaatagcagggcgcatttcaaagtaagccctgtttgagcatgcgaattttaagtaagggcagatctagaaagagatattatcgtatgaaaagaagcttcctgtcacataaggtgtagtgtcttttgaatctttcgtctcgaatggttctatacatgaattgaccggcaaaactttgtgcagcaggtttggagcctgtgactcttgcacctctaatcgtttgccctacaacttataacctgttgctatacttaatttagagatgatttgttttctttccatagtttatttgttagtattgactttttaaatcgctagacatatactccataaattatttatttatttatttatttttacccataaattacccttttgttgcagataagtcatacaacttataattaacattagcctaattcatggcacccgagagatcatgtatacgtactccctccgtacttgtaaaggaagtcgtttaggataatgtttaagtcaaaccttgggaatataaatcatgaataaaaattatatgaatagatttgtcttgaaaaatactttcataaaattatacatatatcagttttcaataaatatttttatagaaacaagaagtcaaaattgtattttggagaccgtgtcgctgtccaaaacgacttccttaacctttttaaatagatacatgcacgcaacactagaatagtaaatcgatggtctcattaaattcctattgagatttgagagtgtattcacacatatatgtgtaatatttttggacaccaaaatttgaaccatcgtacgtagagttatgtaaccacaaatttaatattgcaccaccggtgttctcttggtatgtttttagataatgagaagaatttcattgaaatgaaactacacttgacctccatcaattagggatgcacacatcctaaaaaggcaaacatgaacatattgccttgcagcaactcgccctacacataattaacacaaacacaaagtattatgcacctattccaaaacaacatcttcaactcttttgtacaattttctctccttattaatgaaaattaactgtggggtcttcaagaaggtcaagacctatatgtgttgcggtcataaaaaaaacatgggtggatttttatttgaaatgtaagacaacaccttcaacaacgagacaacaaataagaactgatgttgccgaatctagatgaactagatcatagtttctgccatgccatcatcattgcttatactccatgtcactgtctagctaaagcgaatatagtaggggtaacaattgcccatggtgactattgttcgtcaaaaacatccgaagggtccgctcatgactagtcatggttgctagaccaatttcaatagtcgtcaaccaatcttcccaatcaagacggagatcactacccacgtagcaaccccatttgatcgccaacggcaaagaccaggcatcaatatcaacgtacaaccacaaggacaaagctttggtctcctctatttgcctccatcgagcgaatgaaagaaacattttccatttggaacattgaagaaggaaatgtaaaaaatcgcatggcttcaaacgaagccaacccacctccatcgaccatggcaagcacaatcaaattgaatcgattttgctccactgacatgtagtcataaactgactcaaaaacaccacaaacatatccaagtcacaaaacaatatcatgagaatcacatgtggataatctgttcagcattatgctatttttcaacttgaataatctttctagcctaagtaccttaaaattatagcatgttggatagggtgtgaatgtgtgtatctttcatgtaatcgaaaatttccaatatttttaccttatgtactttggctgacgtttttgtcttggtttcggtttctccataatgatcctcatgatgttaagttccaattattccaataaatggatgtagccttttcattgccacttaggctaagttcttatcccaatttttccaactcacatctctcgttttccgcatggacgtttttcaaactgctaaacggtgtgttttttgcaaaaaaaaactatacgaaagttgttttaaaaatcaaattaatctattttttaaaaaaatagttaatacttaattaatcatccaataatacgtattttgttgtgcgtgccggggaggagctcccgaagacagccttagacttcatcatctccaacatgcccatgtcaagctgagatttgggctcattgtacccattggcaataccaaaattttgtaggacataattagaaaggatatgttcatttggtgacaaaataaggtgcatacaagatcaatagatgtgttttatcaaaattttgataggacagtgttttgatggagatggtttgcttggtgggatagcaaatcagacaaattgttggataaaaataagttatgtatattgtttcattgctggtacaaagaaaataaaccccacaaaattcaaaagaagccacagaaacctactccctccgtcctaaaaaaagacaaaccttggtttccgtgcccaacgtttgaccgtctatcttatttgaaaaaattatgaagaaaattaaaaagacaagtcacgcataaaatattaatcatgttttatcatctaacaacaataaaaatacgaattataaaaaaatttcatataagacggacagtcaaagttggacacggaaacccagggtttgccttttttgggacgaagggagtaacgatttttcatccaaacttttgtacttgcccaatccaatttgtttgatcgctgcaattcaggtggtgtttggatgcagggacttaactttagtctctatatttagacactaatttagagtattaaatatagactacttacaaaactaattacataaatgatagcgaaagggcctgtagcctagtggttacaagagcctcagtagcacctgaggtcctgggttcgactccccgtgggagcgaattttccaggatttaacggcgttgtgctttcagtggtaggcgacgtacccatcgacagcgaggcgcctgtggtgacttcgtcaatctctccaggatttgccggcccagtcttcgaagatgctcgtaggggtagggtttgcgtgcgcgtgcattgtgagtgtctgcattgtactgtgcctaattaatctataattagaggcgcctgtggtgacttcgtcaatctctccaggatttgccggcccagtcttcgaagatgctcgtaggggtagggtttgcgtgcgcgtgcattgtgagtgtctgcattgtactgtgcctaattaatctataattagagaatgtttactgtagcatcacataggtttttttaagcctaattaatctataattagagaatgtttactgtagcatcacataggttaatcatggattaattaggcttaatagagacacatgattaattacgctcaatagagacaatttttttaagcctaattaatctataattagataatgtttactgtagcatcacataggctaatcatggattaattaggctcaatagattcgtctcgtgaattagtccaagattatggatgagttttattaatagtatacgtttaatatttataattagtgtccaaagatctgatgtgatagggaaatttagtcccatctaaatatgttctcaatattatgagtttctgacaatcgggtccgagaacccagagagacatacctgggacccaccgtacagtgggacaggagagaaaacctccccggatcctgcccctcctcaccgtctccactcccgatctccccgctccccgcgtcccgtctccgatccacccaaacacccgcaccgccgcgctacgcgagcacggcaccgcggcgcggcgcgactccgcaggcgacaagccgaggagaatcccgcgcccgcccgcccgcatcaccgccggatggccgccggccgtcgccggtagggcgataggcgggtagatccagatccggcggggcgggatcatatacaccccgcgccgatggcgggcgcggtgtcggcgctgttccttctggacatcaagggccgcgtcctcgtctggcgcgactaccgcggcgacgtctccgccctccaggctgagcgcttcttcaccaagctcctcgacaaggaggtaagcgctcgcgcatcccggcctctctctatctcctcgtcctcgtaggatctatgtggctcgccggtggcgttgcgcgctaagctgatgtgaaccaacagggcgactcggaggcgcactcgccggtggtctacgacgatgccggggtcacctacatgttcatccagcacaacaacgtgttcctactaaccgcctcccgccagaactgcaacgccgccagcatcctcctcttcctccaccgcgtcgttgatgtacgtatacccaccctggatcctgggacgcagatgacatgttcagcgttcagtttgttcacgaagttggtttgtgcatgagtgcaggtgttcaagcactatttcgaagagttggaggaagagtcgctgagggataactttgtcgttgtggtaagtaatggtgcaagcagctaagcatcactctggtttgctgcacaatctactggatttgacacaagatggtgtttgatttgtgcctgcagtatgagttgcttgatgaaatgatggattttgggtacccacaatacacggaggcgaaaatcttaagtgaattcattaagacggatgcgtacaggatggaggtatcacagaggccacctatggcagtgacaaatgccgtgtcatggcggagtgagggtattcggtacaagaagaatgaagtaagatacaggctcactctgttattttgggtagttttgtgatggtgctttccaaattatctaaccgatgtgtttccaggtgttcttggatgttgtggagagtgttaacattcttgttaacagcaatgggcagattgtgagatcagatgttgttggggcactgaagatgcggacatatttgaggtgagcctacaatgttattgtggaactagtagtatgatatctggatctgtaattcaatagggatcacatttatatgagtgaacattcagggtaccttcaatcggatctcaccaatagatgaagtgtccaacctaattgcccatttagaagaccatttatcagaaaattgaactgtttaagtgatggcctaagcaaacttttttactttctttatttgtgaagtaaacgcgtcatcttacttgctggttcatatgctcatttttcctgtaatcatgcatttaatatgtatttgtattccaattgttccattcttatgtgtgtcaaactaagtattatactaccgcttcacttctgaaatttcatgattttatcatgtagccatagtgtttcattgaccttttgcctttgaaagttttcaggaagtcttattctagaaacctcttcgtctctaacagattactgcttgtagattcttctgttatgcaactagatctatcataaatcttggacaaagaaatgaaagcatgctgaatgtcttttgagctagatcaatttccatgcaatactatctgacgactttagaattggttcaaagttcaaacgtcaactattgttatatgaatttgatttgccaaggctatcacgtatttgtataaagaactgctattgccacacattaaatcatcaaggaatttgatcaaggtagaaattcactctgtaagcactacctgggagatgtgccgcaccgtttttttctaatttttaaaatgtctatgcatcttttatatcccatattcagaaagaatggtggtctctcatatgatcataaagtgacttgcagttgaaagatggacatacaatttatgacctgggaacatcgatactgcatttcaagtgtttgatgttggccatacccatcacaaaatgttagcaaatacctctaaatgtcaattatagcttcggagcctacaaattaagattattaggatataagcaatgagagtgctttgcagattaccagaatttgggagtattccgtttaatttgtttcagatgtctaccttttagcagacattctgaactgatcatctgatgatgctcatgcgccatgctccccatcgaattatgttttccatctatgtttcaaagttcaaattatttgtgttatgctgtcaccccaaccatttatgttttcctgcacatctctgacccccactaatactgaacaatattgtgaatcagtggaatgcctgagtgcaaacttggattgaacgatagggttcttttggaggctcaaggccgagctactaaaggaaaagcaatagatcttgatgatattaaatttcaccagtaagtaaacagtttagcatttttttcaagtcactttgacaatttgagcagggccatatatgacctctctcttctgttattactaggtgcgtgaggttggctagatttgagaatgatagaactatatccttcatacctcctgacggatctttcgatctaatgacatacagacttagcacccaggttttctctactgcttgtgatttacagctattggatgctttagatacctgaaatgcactgccttgctccgctattctcatgcctgtctttttttatatatccttaaggtaaaaccacttatctgggtggaagcacaaattgagaaacattcaagaagccgaatagaacttatggtgaaagcaagaagtcagtttaaggaaaggaggtgagcattttacaagagcaatgtttgctgttacactaatgcctcttggaaggtgacatatttcctattttcacctgcagcacagcaacaaatgttgaaattgaagtgcctgttccttcagatgctacgaaccctaatataagaacttcaatgggctctgctgcatatgcacctgagagagatgcaatggtctggaaagtaaaatcatttcctggtggcaaggtaagtttcaagccaagtcatctttgccttctacttcatgctacctagaagtgtgctaatatatgtgagtttttctgttaggattacatgtgcagagctgaatttagtcttccaagtataactgcagaagaagcagctcctgaaaagaaggcaccaatacgagtgaaatttgagataccatatttcactgtgtcgggtattcaggtaatcaaattactattgcaaatatgtacttgattgctcttatggtacttctttgctatcttcactcaaaatgtatgccatcttgtattttctgcaggttcgctatctgaagatcattgaaaagagtgggtaccaggcgcttccttgggttagatacattacaatggctggtgaatacgaactgagacttatatgagttatctctgatatggctgctcaaagattttgatgctaaatttcaactcccaagatacatgtttgatgctcgatatacaacatatagttggcattgggacgttgccatggaagtctttgaaaagctcaaccatgcaaggtttttctgtctcgttgttcatcttgttagtgttactttaccatggttactgtaagttacccatcaagtatagctttgaaaaaaactttttttttgttcacttgtatcattattgatttatttttgtgggtgtcgaactttcccccttttgtactacacaaaaatcttgagctgaattggtataaatgaaatacctgggcggtgcttttgaagtccagattaaaactgctgaacctgtagaactatttttaaggcatgctttctgttgtgtacctgcacagtgacggtttcctatagcagtgagaatcagctattcagagtttcagaccttacagggtgttgatcatcttgtcaatgctgtttccgttcgtgatccattgttgccacatgccaacattcttctttatataattatattccatggcttagaacaaatttcgtgtcgttaaggtttgcttttttggttttttgagatgtttatgacgttcaattttggtgattccaagtctttctgtactagctagactagctgggccttgtaaagaacccactttatccaatgacactatattcccaccttcgcagtagattgtttcgactcgttcaggtgtgtttacaacccaaacccgtttacctttccatcacgacctttttatagagggatgatttttgtgggattgattttggatcgtttcctagtactgcatgtaatccgttgaggtagttctggcctctgggtagttgacacctctgcggctctgccacatcgatctttgtctaacgttttctcaacatctcagtttactccgctgtggtttgcgtcgtctcgccggcctggccaagcgaatcgagggatcgtcgcatgcgactccctcgtggcatcgtcgcgaccctatcaatcgataattaaaggaaaaagtacataaaaggtccctctcaacttgttatcatcgagttattataaaatcatctccgactataaaactggatatatgatatccctcaatttataaaaccgttcactttagtttctttggtggttttgactataattttatgtaacatggcgactgagtcagcgtgagcccccatatcagtatgccatgtcatcaccctctctctcccttccccctctctctctctctctcacttttctcctctctgctggccggccgacgggtgggaggaggtcgctggggcgaggcgggagaggaggaggtccgacggccggcgacgcggcggtgggtgacgaggtggcggctgcgacgcgggagcaggccgctgcgcctgggtcggatgttcgaggagaagacgggcggcagctggaggagactggaggcgcacggcgcggccggtggccaacggacgcccgccgccatcgccgcgaccactggacgctcacactgacatggaagcggtccccgaggtcaccggcgtggaccccggcgacgacgaggtgagcgaggatgcgcggggtggtgggggcggacccgtgtgtggagaggcgacggaggcggcgggcgacagtcgacgtcgaccatatggaggcggaggcgcgctgtgccgctcctggatctcggccaccacgccgagcacctcgttgcggccatct

SEQ ID NO: 7131 - DNA, 22857 bp, Oryza sativa
cgacggtcggcgcgaaggaaggaaacggcggcgacgaccggcgatgctgaggtgcggacgggcggcggcggcacgctaggagaaaacagagaggggttaggggtagggagagcgaccacggcggctagagcggccggccggagttgggtggaaatggagagctcaccggcgtgcgagagaaacggcgcttcggcgacgattggcggcaaccgaatggtggccgaggtgcaggcgggctcggtgagcgtgacggtggcgactacgcggcgcggcggtgactctagcggcggcggcgcgcggccggagatgggcggtgggcggcggagctcgggtgcgcggcgcgagggcggtagacggcacgggagagtgcggtgaaaagaggaaaaagcgatagaaggacgcggggaacgatttataggcggagggggaggcggacgtggccgggaacccaccctattgcgccggcgacgtgggaaggtggggggagagagagaggggtgggattcaaattcgaatcccgcccatttgcggggcgcgcgagggcgggagacgcgggggagaggcggcgacgtgggcgcagcgcgcggggtggggtggagtgggcgcgggaaacgcggacggcgacgtgggagcggcggttgccggccgagcgcggtcggctggaggaaggggacgacctgacaggtgggccccacctgtcagcgtcccggagagaggggaaggggaacgggccggcccaaagaaaggaggccgagcgcgggagggagtgggccgacggcccaatagagaaaaaagaaggaaaagaaaaagaaaaggaagaaaggatttttcctgggattaaaaattgcactttggtgatttttaattggttaaaattattcccaaggctctgaaaattccactaaaaatcttgttaatgcattggagcatggggaactcaagaaaaattccaccacgccgaattcaattattaatcgcatttattaactagggaattagctctaggttaattaagataatttcttcggacgatttatttaaccaatttttaaagcaagcaaaagggggaaaacttcagggcgtgacagccggtgcggtaaacggaggtgggagcgacgaactctgggggagagctggagttttctggcgttgtcgtcacgagacgaggaggcggcggcacgagacgaggagggtgtgcgtggcggatgggtgctcaccgggactgcggtggaagtagcaagacagacgacggcggcgcccccctgcttagttcacgggatggagatcggcgcagcctactcaacccgccgtcggtctcggctcctcgcccgccgcccgcagcttccttcgcatctgcctgccgccggcctcggctcctcgcccgccgcccgcagcctcctccgtgcccaccggccgtctcctctattcacctggagagagagagagagagagatgggcagagaaggagagaaaaaaggcgctgacaggtgggccccaccagtttttatttgtttttgctgattgtatcgccacgtatgtgtctacgtaggctgaaaaccgcttccaatcgagttagggtggtaatttatccggttttaagagtttggggtgtcaaatgttcgtacttttttctttgagaaactatgcatcaacccgtgtatcgacgtgtgctacatactcatttcgtcttaaaatacttgtttttatttaaatttgttccaaaataaatatcacacaatcaccttctgtttaaaattttcacattctacccgcaaccaccactgcgacatgccatattcccttgtatggtttataagagttgtgtgctcatatttagtaccacatagctagtttagtatgggtgggatctaggggtgaaaacgtgtcgcgaccgagaaaattgccttttcccgaacgctagtgtattaatccccgtcccaggaaaagccggggtacaccacacaaacatgatataaaagacacatctttattatatcgataatatttacattattacaaaggcacttaaggcctgacaatcaaaaataaacagcagcggactagcgggcctacggctctatcttcacaggcgctcaactggggtataagccaggactccacctaagacatcttctccgaagcttctcttactgaagggggggaaagattgagcaagaatgagtacaaccacagtactcagcaagtcacaccggcagatgcatgattaatgcaagggggtacaaggggttaataataggggttaagttttgcagtaaacagcatttaaaagtcacttagttgcccaaagccattttaaaaagacgatcctagagctacacagtattattaatcaaggtcgtgaacccgcacgaacctgccttaacccaaggcctatgatgattcagaccgaactggcaacccgaccctgggtcccagctcgtcccaagccaacccaggccaaccattccacattttagttgttaagcaggttttaagaattaaaacactaacttgggtacattgctcggcttgcccataaccgagggcgcggctattcgaatagattatactctgatcagaggtgtacatctttacccacaagacacatcttcctcacgtgtatccacgtgccacataccaccacggtatacggacggaagacgtgacatagttcccaacccatcctagccataaacaagagtaccgacccaaccacacctacggccggaacccccgggacaggtaggcaggactgagcccccagcagcaggacaccggccctgtgccatgacatctcgactaccgggccgcagctcgtgtagccttcatttgtcctagagatgtccatcgacccccgacttcgtccatctccatccgtgtacttttgtttataaccagactgagctacaaactaagccttacccactagacatgtggaagtatggtagtgctttgcaacagaggcccgagcttaatccttatagtacccgaggtacgactaacaaaacccaaccacgcacctcgagcccagcctaaaaccattttgggagttttgaatagagggggaggtgtgtgtccaattccacaataagccaaccattccatactgtccaaatgatatgagaattcccaaagtctaaagttataaaaccacctaatgttgcctaattaatcagcgaagcatctacctaaattcataatagtagaaccatgaacagagtacccactagttggggttttgtttatcctagggtgaacaaggtaataataacaataacaacaataataaggtcataacaaaggtaaataggcatggctaaataaaacagtgataacgcgggaatttaaataaagcgataatgcattaatttaaatcaaaataattttataaactgggattcaatatgctcaaggatgatgtgacttgccttgctcagagagaacggccttccgaaccttcggcgacgaccgcgaaccacgcttcgagaacctccggaacgacagaagctacgcgaagcacacaagcaaagccacaagcctataaagaagcaataacaatacataaaaagaaaccacacggttctttaggttataacaaacattaggagacttgaacgggtcgattcagagttcgtatgaccaagatatgatcatccgaagtttaatgctgttatatggagatttgcggattattataattaggctttgcgactataaaacatgtggaagcgctagccgggaaaagacaggaaggctgcgctgttgacatgcggaccccacatgtcaacctaaaggaccgcggtagaccgggtacacagagacggtccacgggtcgacggaagcggaccccgtgtgtcaaccgaggcgagtggccgacaaacggactccactagacaccacatgggttgcacacgtggaaacaacgcggctaccaagcgggcacactaacacggacactacacggacaagcgaacgactaccgataccgatacacggataccggggccgacaaccgcacaacgggcacgggcgacaccgaaaggacgaggacggggcagcgaaggagggatccttaccaccacgcgacgaggcgagggaacgacaacgacgaacgggcgcggcggagacagcccggaacgacggagacgaacggcgaggggacgacttcggtggcgatccttggacgaaggcgagacgcggccggcacgaggcttgacgacgcggagccgaggacgaagacgacgacgggggctgcagcgaccttgacgaaacaccgaggacggacgaggagggctcgacggagggacgaacgccacgacgaccgggaacgacgagaggacgacgacgacgacgaccggggccggcgaggaggcgacgagggcagccggcagtggttgcacggagacgaggatggcgtggaacacgccactgcgaatccgatgacggaggcggcgccgcgagacgacgagccggcgaggaggaacgatcacgacgacgacgaacaccggcggggttcggtcgaaggggaggcgaggccgagggcgaccttgccgctgcgatgccggaggagatggcgacgtcggccggcgcactggcacagcgaaaggggctgccggagtgggtgccgacgagaccgagggagaggcggcgcgcacgacggcgttccgacgaaatacgggcgacgccgtggcttggccggggaagaggatggcgttccggtgcagggagaggtggtggcgacgtcggccggcgcacaggggacgcggcagaggcggccggaggcggaacagcggcggcaacgccactgttgccggcggggatgcacttccggaggtcttcgcgggaaatagagggcaggccggggtggagggcgacgcggtgacgtcgagggaggatggcgacgacgacggctgccgcaccgacgagggacgaggaacagtagccggctggagggagtacagtggcaccaatgccactggttgccggcgggggcaccgttccggcgagtttccggcgaggagacggtgaggccggtgaaggggacggtgttgcagagccgagggaggcgacggcacagccggacggcgcgcgggcgaggcgggagaggcggctggaggcgggcggcggtcggagagagagaaggggaaggcggggagaggtggtgcggccacgggatgacgcgggaggaggctaaaacgatagaacgcaaagaggtggttccattttataggcgcgggatgggagccggccacgggagagggcggaacggcggcggaaaagacggccggcggccatggaaggcggccgggaatggcgcggccgttccgggcgttagagggcacgaatcaagggggaaaatgggggaaatcaaagaggatggaaaggggattaaaagcccccacttaatttggaaataagggaattgatttgcgcggatttgaggaaggaagaaactagggttcacgggagagagagagaagctgggcgggaggaggacgacgaccgggcggtaggacccacgcgcggcgcgcggtcagcgcgcggcaacggcgcgcacgcgcgcgcacgtgcacggcacgggcgggagggcgccgctcgagttgggcccggaggcggcccaggtgggagggggcggggaggcttgggccgagaggcggcccaggaggagaggagggcgaggaggcccgggagagagaggggaggggagggagctgggccgggagggggagggaaggcccaagaggagggagagaaggagagggagagaaagagagggaggaagagaggactttggccgcgggccgagagagagagagaggactttgggccagacttggcccaaagggaaagagagggttatttctaggttttctttttaataaactttgataattgtttttgttgcttaataaatatttccggtgctctgaaaattcaagtaaaatttgagagctccttttagaccaaggagaatttaacaaaaattctccgggccacattcgaatttttcttgtacgtattttagtgcttgccaatttcttttcgaattttaattaattctattattccttttagggaatgatttttatttcgggatgaatttatcaggacgtgacaaaacggatcggatattatccaatccgatccgctccaaatccgttcgaagtgaggatatggtatgggtttttagttatccgacggatatggtaagggtttttagctatccgacgaatatggatgcggatgtggatagtgacgtgcggatgaggatatggtatcgataatatccggtggatacggattatccgctattttaagcggattatccgatgaacgttttggcggataatccgaatttcgtagcccatataaccactcaatttggcccatttggcatgagcattttagtcgtgtaaaaatctagcccatccagatccaacctatccatcgatcaatctagctaggtcataaaaccttcagtccgtcatagtagagtacgctgccatcacccattgcaattttttcttcgactcttcttcctgtcctaccacaccgccgcctcctccaccccggctctgcggcctaccatctccaccccgctgtcaccacctgccatctccattccaccacagggccgccgcctgtggctggttgtctccgtctcggtgccggcgacgcctccaatgttctatcacctatgtatgtgatacctatgtcatgtgatactttgatgttggtactgtatttttaatttgtggaacttctatatctgttatctgaatgagatatatcttgatgttggtactacatgcgtcaattgaatgcatttggacagatgacaagttaatcgttaacaacttaacattatattgtgatgtgatgtgtgctttcatgaaccatgtgaattgtgatattggtaccgtattgttgctcattgtatagatgaataaatattgtatcgattgtatatatatgccacatccgattattttcatccatttccgaaccgagtccgcactagctccacaccattttcgacatctgaaacaatccgctccgcatccgcacattatccaaatcacctccgaatccatttaaaaaaatatgatataggatatgatataactactatccatcagaataagatccgttttcacccctagtggaatcaacttataaggtattgtccttcaaaccataccactcatgggttcacccttttacatgaaacgggaacggaattgtaagtggggtggaatatttaagtgggcccattcatctaatgagctgagctgccagttttggagaatgggctgttacaaatggtattagaaccgaccctcgcagttgtgcgcgtgtatgggacagtgcgcgggagaatggcacacgtgggctctatgtgagacatgtagcatcggcactggacgtatggacgcacactaaaaggagacgtgttcctagatatttgcctatttgcctatgtggctacatggataagttagaccgacgagaacgtcggatcctttgaggggaaaggggtgaatgtgacatccggactaatttcgatggtccatgtgtgacccatgatagctacgtgctcatttttagtaccacatagctagtttagcaagagtgtaaaaaacttataaggtcttctcgctcttaccgtaaaactcccgtgttgatcctttcacatgaagttaaaccgatgagaacgtcggatcgtttgaggggaaatgggtgaatgtgacatccgaactaatttggatggcccatgtgtgacccatgatagctacatgctcatttttaataccacatagctagtttagcaagagagcaaaagcttataaggttttctcgctctaaccgtaacactccgtgttgatcctttcacatgaagttagaccaacgagaacgttggatccttttaggggaaaggggtgaatgtgacatccggattaatttggatggcccatgtgtgacccatgatagctatgtgctcatttttaataccacatagctagtttagcaagagtgcaaaaaacttataaggtcttcttactctaactgtaacactcccgtgttgaccctttcacatgaagttagagcgaaaatgtaagtgggtggtatgtataaatgggcccatccatcggatgggctaaactgcacggttctagagggaggggtattacaaccactcacagtcccaaccatacaacatttaataggagtcctatattttttttctaaaccttaatatatgctaaataacccagaaacaattattttagaacggagtattgtaaccctagataccactacacgatgtgcatgcacctgttagtactcccttcattcacttttgatcaccatataagagaagtgcatcaagaccaaggaaacaaaaatcattctaaagacctatattccatttactgtgcatcggtgaaggtgcgttgtcgcttcaatggaagagtaaatgaaatagatggatggagtatatataagcctagagaatctgaagcagctcacatggcatgcaaatggttgcatgcatgcatgcacacacatatgcccccatttacttctaaaaggaccttatgtcacctagagagggtgaataggcgtttaaaacttttaagtaagttcgaaagctaggcttttcggatatttctaaatatttttggatatttccaaatattttccgattttttttttgaaaatctcatatttacaagcaaactagcaaggcaagcaaaaggggatagtggcacaattaggaaagggattgcacaaacaacaactaaactactagaggcaccaaataacaaagctagatgagcgagagagagatatcaccggggttcttataagatgttgtgttcccgaagttcaaatccctgaggggggttctactctccgttgaggagcccacaatgagccaggtcttttccagttctatcctcatgaggttgcacaaatgcacttcgccttccactaagggtatctctttcctttcggaggtgcgatccgaccttcacaaactccctcggcacactacaaacaaatcggtgtctcgaggttgactctagccgtctataggtgtcctccaccaccaagagtaacaaatgcaaaaaagatttcttggggataaatctcaacaaatatttacaaagttaacaacaagcactcaaacaaactaaaatcaaccactcacacacacatgtacactcacgaaatctaagcttgtagattggtggagaggaagaagtgagaaaggcaaggctcaaaagtggatctcaaggctcaaaagggcaaaagatttggaatggaaccagccaccttaacttggggggtggagggggctatttgtagccacggcctcagatttgtccgatgggagcaaatattccattttttagaaatttctgaagtgatttttgaaatattcgaaaatcaccagagagcaaaaacaactttcaaaacttgctacaataactttggaattttccgaacagtacaaaattccagcacgagcacagcagaaaactgggcaaaaaagcatttcggaaaaaaatctgaaaacacccgtactgattttgcgccaacactgcatttcgagaatttctgaagcaattttcaaaaattccgaaaaacaccagtaccgtttttgtaaactcgaagtagttcgggaatttccaaaatgacttttgagaacttctaacaaagaccattaccatttttcgaaggcaaaaaccaattcgggaacttcctaaatcaaatttagaaaactccagtacacaaacccaagagtgagaaccacttcaacaaagattttgagctccaaactcatcactagacatcaaggccacgttcctcttaatagtatggctttcctaccaaatcaagaacaaattgaaaagctataccaatacgaatacatttatgtcttcttgtttctttgccttgaacaatgctaatacaaaatttgacttgatcatcaacgaatcatatcctcttgatctttcgacatttcatcttgcacttcttcttcaacaaggattgatcgtcagcaacttgtgacatcctatggcctcgatcggttcaacggtattcggccaagcacttgctccttcaccactacgtcaggtcctttggcgccaagtctccgcttgcccttctcctatgcatggtccatcagtccactacgtagccaagtcttaccaacccttcaccacatctagccatcttccgtcacttgtggccttggattgcaatgaaaactcattgtattgcatattctttatcatctttatcagttcttcaccagactaatcctttgcttatacactcaataagcacactattcccctaatcgtttgtcatcaattaaccaaaacccactaggggcatagatgctctttcaatctcccccattttggtgattgatgacaacatgattaaagcttacaaagattgataataaatgattttgaatccaaagagctcccctcaatttgtgcatacaaatatatgaagtgaactcatatgcatatatattttagaatgtgagagctccctctaactcttggcgttagtggggtgtgttgtgtgtgacaagagataccaaaagtaaaaaaacttacaattcaaattcttggtatcgattcaaaatgtatcaaatgaaattcttgatgttgattgcaggcaaaagtttgaaaacatattgttcatttttttctcagaaatatccagaaagtattttttttgatagaattataatgttgatacgctgaaccattgcacgagaataacgtgcacggggaagacgcgagaccgagcagtctcgcgcggatacacagcgacaatgcggccaacatagcgacaacgaccgcggccaaaacattgattaattaatagtaattaatgattaattatcttattagaaaaaattaattaatcgctaattagataattaatcactaattaatcaatttgaattgacctgctgttgtggtctcgcttgttggttatgcgagaccaagcggtctcgcaacttcactgcacggtctcgcgccgttgtcgcgcgagacttcccgcgtcgtcatgtccacgtcattctcgcgcaatgattcaatgattcggtggtatatttctactaaaaatattgcatatggaatatttctaagaaaaaattgaatgaacactatattttcaaatttcattcgctgattgcaaaaacttgattctatgccaattgattccggtaccaatttataaagcacgaataaccaaatttcataatcaatttcaagtataaatatataatttcatttgcatgtggcatggtgatcaaataatacgcattgaatccatcacaccatgcgcacgctaattgataaacattttcaaatattctctctccctttctcatttaccctttggcatctttcaaagcatgcattttgataatttctcacaattatctcaccctttataataattctttataccctttaatatacttctccccctttgacatctaaaaactaaggcataagtaaggaaaggaaagcaaagggataattgatgaggaatcatcgagtattttcctctcaattttatatttcatcacttgtgattaggtaatgaacatcaaattgacacaaagatcacaagtaaatcaataagcattgagatacaaattttgcacataaaaagctcacatccaaagggtttaaatcatagaacaaaaagtctcccctttgcatgtcaaggacattcttattttcttcatttaatgtatccctcccccttagttctcctctcccactttggcatttaagcatggcaagaagagcatatgatatataatgatgggggatcatcgagatttgaacatgccaaaccacttcttcacaaacttgagtgagattcaagagttttaaaaagaacaactcacacaaattttcacaaagcatatcgcaaacggatttagtatacatgaatcccaaagattttgctaagtgttgatggctgttaagtaccaaattttcgccatcaatagctgcattaaaccataaatataaaacatccaacatagtggtaggatttatttctaataatttccacgagtgttggtgtatattcatatgtaggtgacaaactatctaagttgagaagaaatatacatgaaggaggatgagaatcaaactcgcatccgaacttatggagttttggacccaaaaacccaattaaacacctccaaatgggccaaacatccataccaatagaatgaggggcccaaaatgagtgtccaagccgaaaattggggccaacggagccggctagggatcgaccgaactctgagttctgccgaaccttgacagaggccactggcccaagcccaggttgcgttcagtagaaaaccgcttcccaatgctctttggaaaatggccgttttcactagtagaaactgtcataagcatggacacttggcaacacaagagagaagatgctctttggatgcttggaggatctccactctctcaagttacctccacactataaatacctctctcctccctcattcacaacacacttgaagcttgagcttaattacaagaggctttattctactttattgtatactagattagggagaggtggagtagaggaagtcggaggaattccagagttgtcgataatcctcttcttatttattttactctggcaattactctactttaatcaaatatcattctgaggaattaagatttattctatgagagttacctcttagttagttcctaatcaacgtatgggatcattgttcattatagtccattaaaatatagtgattgctttagtgagttataaacattaaagtagttattaacggtgtagacatggtgtttgggtagttaatttccttcgtatcccatagtaggtttgaggtaggtgaagaggtggtggcaacctgttaacaaccaaatttgacctgcactggagttaagcagatctctcaggcctcgtgtttttacatcaacacaaccctaagtacactaaagtcctccctacccggttacgctgtagagccatatctgggagcagcgggctggccagcgcctgaagtaccatgttaggattaaattaagctttctgtagacactgtctctcgctagtaaatcctctcttagcctatcttagctttgtgtccttggataaacctggagaagagctgacatacatgttcatcggtatcttccgtgctgacatacacattccctgtgaaaatcgatgccttggaatactctagagtgaagtgctgtattgatatcttccgtgcgcttgtggattctatttgtgacgttaagaaatatataccaacactaagacaaaattcacatagctagaataaggtctccgagtactttgattcccatagacaccattttgtgactaatactcgcttattgattgaacaagcatttcggtacaacattttgtaaactaggctaattagaaagaaatgaaacttagtctagatgcacaaagataaggcaagttattcaatcataccgatttaattaacaagttttagattatccgattaccttccttgacgattttcaagatgtcctctcaatgaaattgataccttatttcaattgaatttgacacccattgtcacacacaagacttgcatatttatatctcttcctatctccattttttaagtgccagttctttacatatttttcatattcgtaactaagtaggaactaacaaattctgctatttttggatttttttttacttttttgcgcgagaatttatgagtgccaacaaatacacgggacctatttcatcatgcatcgacgaactcatgcaagcacggagggtggattttaaactgttatttgcatgttactcaaatagttatgaaaaaaattgagaaagatgtattaatatgttatatgtcacttcacaatcatgtaagtttaaatttaacttatacatatcgcaacgaaaaaaataaattaaactacggctagttaacgtatattcacagtcaaatttggttttttagttgtgacacgtagaagttgaattttaacttttatgtttgtggagtgatatatatcacatgttgataaattttttaaattacttcagattttcttatattaatgacatataaacaatgagatggcatcccctcgagcgtttagaatagttacgtgtaagtacgcgacaatgggttctctcgtgcatacacgtcaggactccggacatgaacccaccaccattagcatctgacagataccccactgaagaaaacaaagatcaatttgtcacgatgtactcattggctgcacgcgattaattatggttgttttagaacatcattaaggagaaactaatacagccaaaaccatacgcctctcaaagatgcctctgaacgatacctcaatgcttatctccatctacactgttggacggttcacaagcctatttaaccagcaacgcttggcacactacgatcaactgcgagagtgaggcaaagaggaagtcagggaacggaagggttgagatggagatcagcacagtgctgggcgcaatattggcagagtacgcggtcaccttggtggccatggctgtgggtttcctggtggtaggctacttgtacgagccatactggaaagtgcggcacgtgccaggtcccgtgcccctgccgctcatcggccacctccacctgctcgccatgcacgggccggacgtgttctcagtgctcacgaggaagtacggccccatcttcaggtaactggcttctctgcttgctgcttcttctgtttctttaatgcagagctcagagatgacgaggataccagggtctattgctaactggatctagtttactttgcttgtaggtttcacatgggaaggcaaccgttggtcatggtggcggatgctgagttgtgcaaggaagtgggcgtgaagaaattcaagaacttccctaaccgaagtatgccctcacccattaccaattctcctgttcatcagaagggcctattcttcacaaggtagtagcaactagcagttgattgctttactttctttatttcgcgcaattttacctgaagctaaatttaaatagatttgatatacatccctcacttctacatccaaaagaaaaatatatatgtatacatgtttttattgcatgaaagatacacatatactatgaatgcgcatccttaagtacgtatagtacatatttatttcactaaatttctactaaaatcttacccacatgtttatagacactggtatttaaatcctagtgtacggacccatacacacatgatccaccacaatacctctcgggcctccccatttgcgagtatattttgtataaaactatatttaccaatttacacagttattataatttgacccaactcgattaagtgatatttgtagttctctttttctaaggataacatgatacctttttatatgtctggagcgaacttgttggattttcttcatatatactctcttataataaagaccagagaactttatccataacttttcttggagctaaattaaaagtagaattaaattttactagttgtatgttgcacatgctagtattcttaatgttataaatattaaaataaatatattggttatatttttgaattctgtctgtttagttagatttataaaagtcagctccagttataaaatgctattttaaatttgaatttcggaattgaattgacaaaataaatttattaactgtaaattcgaaattattaaaatttagaaaaataaatttaaagagcctgtagtatttttgtttgattcctttgagcgtgatcggccataacccattagttatatggaggggcaattttctatttgactctgttctaaagcccaattaataatttgaccccactttttcaagtttgtacatttaaccctttttcaaaatcgaagattaagacttaccctattccgtgaaaacaagataaaagtgttagctaagagataaattgttctttttgcccttgctcatttgaccataactgcataaaagctttttttattcaaacctttgacaaacttgtaataaattagcattgctttgacagatttggcttcaaactgacaaatttgacgtcaatttggcaaaaataaaattaacaaaatctcacataactatgaatgaaattttacaagattttcacatcatattgttttttccatcccaaattgaaaaaaaaacacagataaagcaaaatacagataaccatgccactatcgcccctcttccgtgcaccaccatcgtaacccctgctccccgcgtgtcgccacgatcgccaccgccatcgctctctccgcaagccgtcgtgacctccactccggcgcttccactgcgtgtcgtcgctcctgctctctctgcgcgatgctatagcttctccctccgcgcgccgccaccgctacctccacacaccaccgctcctaccacgtgccgccacctccacctcctcatgctgtcattgtcgccgccgccacctcacgatgttgttgccactgctccctcctcgtgccaccaccacccatgctcccatctcacgcgtgccgccaccccttctctctctgcgcgccgccgtcactgccatccctgctccctcctcacaatgccagccttgctctctccgcactgataccgtcatccatgctagtctccgaagatgaatggatgagaagaaattggggataggattattgtgttcttagggatatttgtaagtccagcacataaatgcattttttttttgttttttctaacatggtcaaacggtaatcccaatttttaaaaacagggccaaataaataagagtcactgatagttagacttcgaaatagagtcaaattagtaattgtcccttatttgaaatgcataatgttccattgaacttttacaaattattaggcctataatttttttacaagaaaagagagaatatgtcttagaatacattcaagaacatatgtcttagaaaccattctattttttcatagcaatatgcaatggaggtacatatgccatatagtagagccataaaaaggttttattaccctcgcaaaaatgtaaaatggttttattacactattgtttgtgtcaggtaggcactgaagagttctgatgtaaagatctagcaagggtaaaaggtccatcaatgtttaaatatttaaatagtactctctctctctccgttttatattataagttttcctatgtcatatttttaagtttaattattttttaaaaaatataatatttttaacattttatgttaaaaataaatatactataaaaatatattgaatgatggatgttactgtatatttttataggggcattttataatatggtcgaacttaatgatatttggcataagataaaactcaaatgatcactcgaagaagtaaaagtgttcgtgcatgcacaccgtaccgggccagcttccatccttggttagtagttaattactgttggaacatagatggattctaatagctcgaatggacgtctacccgtttattgtatgtcaactagatggttacgaaaaattttcaaaaaaaatgataaaatagatcaatatgtaatatatcactccacaagcatgcacgttcaaatttaacttctacaaattgtaacaaaataacaaatttaattgtaaatatacatatagtaatttgagttttgtttgttatttttgttacaatttattgaagttgaattttaatttgcatatttgtggattaatatattacatattgatctatcttgttcatattttttaaatttttttcataaccatttagatgacatgcaataaatgggtggacgtccactggagccgttaaaacagtttcccccgttggaactttataaattcacgaacattcaaataaaacatcagtactctttgtcgacagtggttcgaggtggacgactatgcgaaacatgatcctctccatctaccagccgtcgcacctggccaccctgatccccagcatggagtcgtgtattgaacgcgcggccgagaatctcgagggccaagaggagatcaacttctccaagctctctctcagcttcaccactgacgtcctcgggcaggcagcgttcggaacggactttggcctgtcgaaaaagttggcctcgtcggacgacgacgaggacacccgcaagatcgcggccgatacctgcgcggaggccaaggcatcatcggagttcatcaagatgcacgtgcacgcgaccacgtctctaaaaatggacatgtccggctcgctctccatcatcgtcggccagctcctgccgttcctccatgaaccgttccggcaggttctcaagaggcttcgctggacggcggaccacgagatcgaccgcgtgaacctcacgctcgggagacagcttgacaggatcgtcgccgagcggacggctgcaatgaagcgagacccggcggcgctgcagcagcgcaaggacttcctgtccgtcatgctcacggcgagagagtcgaacaaatcctcgagggagctgctcacgccggactacatcagcgcgctcacttacgagcacctcctcgccgggtcggccacgacggcgttcactctcaccacggcgctctacctcgtcgccaagcacccggaggtggaggagaagctgctcagagagatcgacgggttcggaccccgcgaccgcgtgccgacggccgaggatctgcagaccaaattcccctaccttgatcaggcacgccaaacccttcctcgacgtgtttatatcgtcagacatgaatttctgaccgcgcatcgtgcacgcatgcaggtcctgaaggaagcgatgagatattacccctcatcgccattgatagcaagggaactaaaccaacagctcgaaattggaggatatccccttccaaaggtacatccgacgatctttatatacaagtccatataggacatgacagggagaaatttctaggggacttccgtctagcttcacaaggtggtgggctagacgatctgggttcgaagcctcacccttctaattatttgatattaggtctttccttaatattcacatttttataggacatgacaggcttgctttcatgtttcctcttatgtactacttcagtatacatttcattcgttttttcagggaacatgggtgtggatggcacctggtgtcctaggaaaggatcccaaaaatttcccagagccagaggtgttccggccggagcgcttcgacccaaacggcgaggaagagaagaggaggcacccgtacgcgctcttcccgttcgggatagggccgagggcgtgcatcggccagaagttcgccatacaggagatgaaattgtcagcgatccacttctaccgtcattacgtatttcggccctcgcccagcatggagtctcctcctgagtttgtgtactcgatcgtctccaatttcaagaacggcgccaagcttcaggtcatcaagaggcatatataatgcttaatcacatcatcaggagaactattcgtttggattttgggtattgcgcatattattaagtactcgttttcagtttatgttgtactgtacttgttttcgccgggcagtccgtgttgtactcgtaatatatatgaaccacagctagcaaatctccgaggcataaagtttcttatgagtaaatatccgaatataagatttttcttctcataaagacctctataggtagaggagcaggccgtgggacatatcatgttgtacgatgaaaatagatctaataaagacagttattatgttcgctgtttagtttctgtgatattttgaggtgaaatggccacgggtgtttagtatcttctcacgcttctaaaaaaacatagaagggaaagataacaaacccagtggtcgccactattttacaatacattgtcagcagttttccattcacagggtttattgatccaatctactgttgttattattagatggttaagcctattttaacctttaactttgctcaaagcgtatatttcatcgtgaactacaaagtctatttttcattctcactttcaaattcaaaactgaaaaggtaaacactttcggatataatctctctgtcttggaagaaaaaaaatcaacttctgaatttgaatttggacacaagcctttctagattcgtagacagaagttttttttttaatatggatggagtatttagtagttgttttgcttcaaatggagatggtttccgtagtttatactcttattatgcatactttgttgatgaaaattaaataacacataattaggtctataagcatgaagtttgcctgactaaaattcatgctagcgaaaattaaaccactatatcatgtcgtctataaaaagaaccatcataaaattatatgcatgattttaaaagttattgttgaaaaaataaccagttttgtaattcaggtgagaaatgaactccaagcaaagtctaagggccaaaaaatagaccatacgtgtaaataagtttgctctgctctaaaattctcacattaatcagagaaaagaaaaaatagagttgaagtagtgtcaaggttatgaataacacatatctaaaagtaatcgactaagctcggcagggcctaccatatactaagttttatacggaatcatacctcgtatatagatggagttctggataaggaatgacaagaagaagagttctacatgaaaactatgaggactgatcagattatatccatatttgtctccctaattatacttggacaaagggacatctatggatataaatacaagaccccaaggaggagagagggacaaaccaagacaagccagcacagaccagcacgctcaatcagaatagacaccaatgcatgccgccagatatcgatatcagagataaacctagacagacccaatctggtaccatcagaggctaacaagagggatctagcgctatctctgatctcaccaagtctatattcgaggaggaagactgccctgtcgtcgactacatgatggtgttccatgccaccaagtcgacaatggctagataggttatcccaaatattgtacctgtgtgattctgatgaataagagcagcaccggtttcggccaacaggagtagggctattacctgatttcgatgaataaggggcctgaacctgtataaaaatccttatctctgcctcttttacctcaatttcgcatataccctggtaccaacgatccccataccatgcaaataccgtaatcgtgatctaaaacatcgacaagtatacaatttacgtggatccgctatacctcatatacttggatagaacaattgtggctacttctaaaagctataaaaagaaaaacccaacaacaatcaggttcgactttaaaaatcccaaagatagtaaataggaggggcaacatgctgaccataaaggagtagggtggtggtgattgacgggacatctatagctacaaagtagaacccctagtccagatctggccactccggtgtgagccgcagtggcttggtggtagtctgggcggtggtttgcaatggtgcgacgacgacggctctgctggcgatgggtgtgcctgtactgacctggtgtgggaggccatggccggtggcaggcaaagcttccgcagcacgggcacaaggcaagactaccgctgacagtgctccagcgggtccaatggcggcgggagctgaggcaacggggcgaggcgaccgcgatgcgaaagagcggcctgaggtggcggtgatgcgggctgtttggtcgatgtgttgacgatggtggtgttgtgaggttgcgttacaagcttgaggggggctccaatctaaatgatagtcctcttgtggtggcgccttgctgtcacaaaatggccacgttaggcgggctagtgcaagggagaggggatccattcttctctttccctctccctctccaacccaaatgcgtggatcgatttggagcgcgtccgatgttgagctcctactcaaaggtcgaccaatggcaaggtgttggcgcggtggccatccgtcgaaggtgtgcaggtggtgctggtaccctttttgcaggcaacctcgacacgggagggtagaaagcttacgggcagaagcctagcccttcagacaagcaatagcgacatctacggacgctgcttttcccttggggcattatttgcatgaatttttaggtttaaatcatgtcctagcgcctcagggcgggcggcggagttactcctggtgccgcatcctttctagaggtgtcatttagaatatcgttttctttagagatgatgtgctctgctttgatcttgagtagcgggttttggttttagatgctttatgcggcagacgcatagctagctaggtggcactgtgggccatggaccacctaaaaatttgatcaagattaaaactattgtatactagcaaaagtgcccgtgcgttgctacgggaagaaaaaaaggagaaaattgaattaaagcatattacatactaattaattgaaatacaacgtctgatctaatcagttctactcgaccaaatttatagtgtcgatgaacgagtaatactatatgttcatgaaacctatggatgaacatgaataattaatttgcgttgtctcaattatttacatagttaaacagaaataattcctaaattacatcattgttgacgtaaataattaagaaacatgaacataaatgaaatttatacgaatttataatcaacgttagtcagggagataaatccatatcgtgag

SEQ ID NO: 7132 - DNA, 11304 bp, Oryza sativa
aatagagaaaaaagaaggaaaagaaaaagaaaaggaagaaaggatttttccttggattaaaaattgcactttggtgatttttaattggttaaaattattcccaaggctctgaaaattccactaaaaatcttgttaatgcattggagcatggggaactcaagaaaaattccaccacgccgaattcaattattaatcgcatttattaactagggaattagctctaggttaattaagataatttcttcggacgatttatttaaccaatttttaaagcaagcaaaagggggaaaacttcagggcgtgacaaacctaccccccttaaacggaatctcgaccccgagattcggaagagctggcgaagaggtgcgggtgggtggccttcaactcatcttctctttcccaagtggcctcttcttctgtgtgatgactccactgaaccttgcagaatctgattactttgtttctggtccttctctcgctggtttcgaggatacgagtcggcttctccacatacgtcagatcttcctgaatttcgatgtgatccggacttgcctgttcctcaggaactctcaaacatttcttcaactgagagacgtggaacatgttgtggatgccaagcatgttggagggaagctcgagctggtaagcaacttcacctctacgttccaagatcctgtatggtcccacaaagcgtggtgccaactttcctttggtttggaagcgatgtactcccctgagcggagtgacacggagatacacataatcccctgtttcgaaagcgagctcccttcggcggttgtctgcatagcttttctgccgagactgtgcgattctcaatctttccctaacagctctgactttctcttctgcctcatttaaaacttctgtaccaaacaattggcgttcccctgtctgatcccagaagagcggagtacgacaccttcgtccatacagtgcttcaaacggtgccatctgcagactagcttggtaactgttgttgtaagagaactcagcatacggcaagcttttgtcccatgctccaccaaagtcaagcgcacaggctctcaacatatcctctagtatttgattgactcgcttggtctggccatctgtttgtggatggtaagcagtgctgaagtttagacgggttcccaattcttcttgtaatttctgccagaactttgaagtgaattggcttcctcgatcagacacgatcttcttaggtacaccatgtaaacacatgattcttgctagatagagttctgctaatttcttccctgagtaggtagtgtgcaccggaatgaagtgagccactttggtgagtcggtcaacgactacccaaatagaatcatgccccgatgatgtcctgggcaaaccggtgatgaaatccattccgatttcttcccacttccattctggaatctgaagtggctgtagcaaacctgctggcctttggggttctgcctttactcgttgacggacgtcacatagtgctacgaattcagctatttcccttctcatgctgacccaccagaacttttctttgaggtcttggtacattttggtactgccgggatgaatggaatattgagtttgatgagcctcggttagtatcaagtcttttaattccttgttttcgggtacacacaatctttctcccatccagattgttccttgttcgtcctcaacaaaacctcgggcttttccgaccctcatgttctttttgagctctgctatttcaggatcacttgcttgagctatgcgaacctgctccaccagtgtgggctgtgcctctagggcagccacgaatccgtgctcaactataccaaggttcaaatgttccaaatcacgttgaacctcacagcatagttcctctacccatgcgacgttgcagtgactcttcctgctcaaggcatctgcaaccacattagccttgccgggatgataatgtattcccatatcataatccttgatcagctccaaccatctccgctgtctgagattcaaatcaggttgagtgaagatgtactttagacttttgtgatccgtatatacctcacaacggttaccgatgagatagtgccgccaaatctttaaagcatgaacaactgcggccaattccagatcatgcgtcgggtagttgccttcatgaggacgcaactgccgtgaagcataagaaaccactttgccatcctgcatcaacacacatcctagcccctggcgagatgcatcacaatagacctggaaatctttcgtctgatcaggcaggattaagactggtgcagacaccaaccgtcgtttgagttcttcaaaactcctattgcattcagcagaccagataaaattttcttccttcttcaatagctgtgtcattggcttagcaattttagagaagttctcaatgaaccggcggtaataacccgcaagtcctaagaaactccgaacctgagtgactgtccttggtggggtccatttggtaactgactccacatttgctggatccatagctactccttgagcattcacgatgtgaccgagaaactgaacttccttaagccagaagtcgcacttgctgaacttggcatatagctggtgctcttttaacttttcaagtaccagccgaagatgctgctcatgttcttcctcggacttggagtagataagtatgtcatcgatgaaaaccacgacaaacttatctagaaattccataaacaccttattcatcaaattcatgaagaaggcaggtgcattagtgagtccgaaagacataactgtgcattcgaacaacccgtaccgagtgatgaatgctgtctttggaatatcctcttcgcggatcctcaactggtgatagcctgatcgtaggtctatcttagagaacacagtagctcctttcaactgatcaaacagatcatcaatccttggcaaaggatacttgttcttgatggtgacctcattgagtgcgcggtagtcaacgcacatccttttggttttgtctttcttctccacaaagataaccggagcaccccaaggcgacgtgctcaggcggatgtatcccttctgtaactgttcatcaacttgtttcttgacttccgccaactcgttggctcccattctgtaaggcctcttgtggatcggtgcagttccaggtaccaagtcaatccggaactcgatatccctttttggtggcattgttgtcagatcatccggaaaaaccactggatactctctgactatgggaatatcctccagcttcttagtggttttctccactgctacctcttgttcttcaccagcagcctggtttaaactaatccctggcttccgcggcactggagactggaagattaccacctctccttttgcattggtcaacttgatggtgcggctggcgcaatcaatcactcctctgtgccttgtcaaccaatccattccaagtatgacgtctaggtccttggattcgagaagaatgaggttggctggaaaaatcgacccttgaatttcaactgtcacagatgggcagtagtgagttgtggtcatgccacctccaggagtatgcactcgcattggtatcttaagcttcactaaagataacccatgtgcaccagcaaaacgcttggaaatgaaggaatgggttgcaccagaatcaaacaatatttttgccggtgtcgagttgacaggaaatgtgcccaatataacctctggtgctgactgcgcctcctccgcagatgcatgattgacccgggcctgaacgaacttgggtccagcacgtcttggcttcgagcactttccaaccatgtgtctgggtttgttacaattgaagcagagttcgggtttttctcccaacctcttgggctgttctggcagagctggctgaactgattgagctggaatctttagtgaactcggagtagggttgagactgtgctgctcactgttgttgtgactgccactatggtggttcttgttgaagctacccgggtggtagggacggtactgccggataatcatggtggaaggtccaccctgatgtcccatcgtgaaacgaggcttctgactcttcccctggggagtcctgaactgagctgccttcctcttacggtttattttgttacagtgctcctcctgacggatagccttatccaccagcttctcaaagtcctcataatctctagagatcaactggttagtcaattcatcatcaagaccagacagaaacttctgctgcttctcggcatcggtacgcacgtcctcaggggcgtagcgcgcgaggcggttgaactcatgcaaatactctataactgttctggttccttgttgcagggaacggaactctctcttcttttgtgccacaattccctcgggaacctgtgctttattgaaactatgacgaaactctgtccaagtaacctctgccccagctggacgggtcaccatgtagttgtcccaccaaatagaagcgggaccttgtagctggtgtgtagcaaaagcaaccttctcctgctcgttgcattgcaaaagattcagcttcttctcaatggcatgaagccagtcgtgggcctcgattgggttggtggtgcttgagaaggtgggcggcttgacacgaagaaattctaacagtttggactgaggaggtggaggaccaaactgcaggttctgctgctgcagctgtgcttgctgctgcacctgctgcaacacctgatggtactgttgctgcatctgttgcatcatcattgtcatcatctgagtctgattgtccaacacctgagcaattgttgggttctcgggcggtggggacggactgttgtcagatgcactgttggcacgtgctccattgatcggcttttcgctgccactggcgttgttcgagtcgcgtgaaccattccttgtctccatctgaggggataggtagaaatatgagaaaaggaagaaaaacagggggctcagaaactaatcttgcttatgaatttaagtgcaattatcttaatcttgattaaaacactgaaaaagaggcacgcaactcctaattgaggcagtcataccactgacacatgatatcgaccgccgactaacccacaagcaacaaacctaaacacgaaaactagcaagcaaacagactaagaaagcgataaagctaagggcggcgactctgaagctcggggcggcgcttgcaaacgagggataggactgacatctaaagtagacaagggataggaaccaattcatgctcaaatccaaattaaacaaagcaaaagaagactcaaataaataaccgagcatgatgatttttatgcatagaacatttttcatgaactcaaataaagacactaatgcaactaaacaataaattaatgcatagactagttgcatggaaaatgatgcgcataacattgcccccatcgaatatagacacgacctaatgtataacccccaataaattcccgactgactgtcgaataaactccaactaaaatttttctaaagccctagactgagctaatttttttttttaaaaaaaatccgatccgaaagaacgaccaagatttttcccgcaaaccaaagaggcaaaactccaaattttcccgaaacaaatccaagtgaaaaagggcatatgcatatgaaaaggggttcagaaggctcttaggttttccagttggcttgtcctacggtcaaggtcggctctgataccaacttgtcacgcccagaaattctcgaaccagaatttctaagctgaatgtgcattaaatccctgtccaggaccagccagggtacacaaacgacaattgttgacatacagatccacgtcttacaaaaatggaaaagattacaaatgcagcggaaaagataaaagcgagctaaaccggaaagcttgacttcagcagcgagcgactccactccacaggcaatccttgacggcagcgacgaaaccaactatgacaaaacagctccaactaggaagatcttcagctctggtgtgggggaaaagagagcaagactgagtactacccactgtactcagcaagtcataccggaagaggaggtatgatgcaggatataaccaaaggaagctaggggttcttttgcataaagcaggcatttcaaagcagtagttgaaagcagtaaaacagctgtagtaattaatcaatattaaccaatcactgtccaacgctacaccacgttgcaacaggcccaaccaaccacctgaactacaccagttcattaagctaaactaggggtgagactaatcacggtgaatctggttgatcgcccataaccgcgggcacggctattcgaatagttttactctggccagaggtgtacaactgtacccacaagacacgattccacacatgtcgccatgccccgaagtatcaccatgatactgcaaaaggggaaatcgtgacaagaccctccacataaccctcccctaaccatccacaccacgctaaggtttcacccccacccctcataaggcagtgggcggtcccctcttgcgccgcggttaatccggcagctggacaaccggacaccccggccgacccaactccatcacgcccaccctcgccaccggtgcctaggaaagggtcgagctatacttcagatcaagcagttacccactcccgcttgtggtaagcacggtaagtctcccagggtttcccgtgaaccggtccttaattgccatgagtgcgaccagcaaaaccatgcacccacagcccaccattcagtgtattttaattaactaacaccattgcggtggcaccaatctaaagctatgccaatagacaaagtctatgtaataaggtgatccccatttgtgtgctagttgaactaagcatggctaagcatttcctaaaccaacatctagtcattttgatacccaggttatcaatggcatatggtaaacaataaaaggctgagtagtaggacccatcccacatgatattgtaaaagaatgcaacatttaatagaaatgcgggatatttgtaaattgggtacaatatgatcaaacgtattgcatgacttgccttgctctcacactgacgagacctcagcaacgtcttcgagaaaccgcggatcgacgaaacggccgaaatctacgcgacaaacaaagcacacaagcaaaacatgctataagactactgaaacaggaaacaaaagtatttttaatggattctttgcatttttcttgatttactgagacttgaatggacttaaacggagctcggatgaattacttatgaattttagaagataaactgtgtttttactaataaagaaaagtccttaaatcaatttattgcgcaataaagcccagggctgacgtcatccaagggggggggggcgccgacaggcgggccccgcttgtcagcggttcaagagagaggaagggggcgccggcacgtgggccccattggcagcggcacaagggagggaggtggcggcggcatgctcggcacggctcaagccggccggccagccatggggcggcggcggcggcacgcgcggtcaccggcggtgaccggcggcgcgggagacggcggcggccggcgcgaaggcggcggcggcggccgaagacgacggcgcacgcgcggagggcggcggcgctcatgggagagagaggaaaggaaggaggagaggggattcctcaccggcgagcacgacggccggcgcgaaggaaggaagcggcggcgacgaccggcgatgccgaggtgcggacgggcggcggcggcacgctaggagaaaacagagaggggttaggggtagggagagcgaccacggcggctagagcggccggccggagttgggtggaaatggagagctcaccggcgtgcgagagaaacggcgcttcggcgacgattggcggcaaccgaatggtggccgaggtgcagcgggctcggtgagcgtgacggtggcgactacgcggcgcggcggtgactctagcggcggcggcgcgcggccggagatgggcgttattctgtagagctcgggtgcgcggcgcgagggcggtagacggcacgggagagtgcggtgaaaacgagaaaaagcgatagaaggacgcggggaacgatttataggcggagggggaggcggacgtggccgggaacccaccctattgcgccggcgacgtgggaaggtggggggagagagagaggggtgggattcaaattcgaatcccgcccatttgcggggcgcgcgagggcgggagaggcgggggagaggcggcgacgtgggcgcagcgcgcggggtggggtggagtgggcgcgggaaacgcggacggcgacgtgggagcggcggttgccggccgagcgcggtcggctggaggaaggggacgacctgacaggtgggccccacctgtcagcgtcccggagagaggggaaggggaacgggccggcccaaagaaaggaggccgagcgcgggagggagtgggccgacggcccaatagagaaaaaagaaggaaaagaaaaagaaaaggaagaaaggatttttccttggattaaaaattgcactttggtgatttttaattggttaaaattattcccaaggctctgaaaattccactaaaaatcttgttaatgcattggagcatggggaactcaagaaaaattccaccacgccgaattcaattattaatcgcatttattaactagggaattagctctaggttaattaagataatttcttcggacgatttatttaaccaatttttaaagcaagcaaaagggggaaaacttcagggcgtgacaaacctaccccccttaaacggaatctcgaccccgagattcggaagagctggcgaagaggtgcgggtgggtggccttcaactcatcttctctttcccaagtggcctcttcttctgtgtgatgactccactgaaccttgcagaatctgattactttgtttctggtccttctctcgctggtttcgaggatacgagtcggcttctccacatacgtcagatcttcctgaatttcgatgtgatccggacttgcctgttcctcaggaactctcaaacatttcttcaactgagagacgtggaacatgttgtgaatcccaagcatgttggagggaagctcgagctggtaagcactttcacctctacgttccaagatcctgtatggtcccacaaagcgtggtgccaactttcctttggtttggaagcgatgtactcccctgagcggagtgacacggagatacacataatcccctgtttcgaaagcgagctcccttcggcggttgtctgcatagcttttctgccgagactgtgcgattctcaatctttccctaacagctctgactttctcttctgcctcatttaaaacttctgtaccaaacaattggcgttcccctgtctgatcccagaagagcggagtacgacaccttcgtccatacagtgcttcaaacggtgccatctgcagactagcttggtaactgttgttgtaagagaactcagcatacggcaagcttttgtcccatgctccaccaaagtcaagcgcacaggctctcaacatatcctctagtatttgattgactcgcttggtctggccatctgtttgtggatggtaagcagtgctgagtttagacgggttcccaattcttcttgtaatttctgccagaactttgaagtgaattggcttcctcgatcagacacgatcttcttaggtacaccatgtaaacacatgattcttgctagatagagttctgctaatttcttccctgagtaggtagtgtgcaccggaatgaagtgagccactttggtgagtcggtcaacgactacccaaatagaatcatgccccgatgatgtcctgggcaaaccggtgatgaaatccattccgatttcttcccacttccattctggaatctgaagtggctgtagcaaacctgctggcctttggtgttctgcctttactcgttgacggacgtcacatagtgctacgaattcagctatttcccttctcatgctgacccaccagaacttttctttgaggtcttggtacattttggtactgccgggatgaatggaatattgagtttgatgagcctcggttagtatcaggtcttttaattccttgttttcgggtacacacaatctttctcccatccagattgttccttgttcgtcctcaacaaaacctcgggcttttccgaccctcatgttctttttgagctctgctatttcaggatcacttgcttgagctatgcgaacctgctccaccagtgtgggctgtgcctctagggcagccacgaatccgtgctcaactataccaaggttcaaatgttccaaatcacgttgaacctcacagcatagttcctctacccatgcgacgttgcagtgactcttcctgctcaaggcatctgcaaccacattagccttgccgggatgataatgtattcccatatcataatccttgatcagctccaaccatctccgctgtctgagattcaaatcaggttgagtgaagatgtactttagacttttgtgatccgtatatacctcacaacggttaccgatgagatagtgccgccaaatctttaaagcatgaacaactgcggccaattccagatcatgcgtcgggtagttgccttcatgaggacgcaactgccgtgaagcataagaaaccactttgccatcctgcatcaacacacatcctagcccctggcgagatgcatcacaatagacctggaaatctttcgtctgatcaggcaggattaagactggtgcagacaccaaccgtcgtttgagttcttcaaaactcctattgcattcagcagaccagataaaattttcttccttcttcaatagctgtgtcattggcttagcaattttagagaagttctcaatgaaccggcggtaataacccgcaagtcctaagaaactccgaacctgagtgactgtccttggtggggtccatttggtaactgactccacatttgctggatccatagctactccttgagcattcacgatgtgaccgagaaactgaacttccttaagccagaagtcgcacttgctgaacttggcatatagctggtgctcttttaacttttcaagtaccagccgaagatgctgctcatgttcttcctcggacttggagtagataagtatgtcatcgatgaaaaccacgacaaacttatctagaaattccataaacaccttattcatcaaattcatgaagaaggcaggtgcattagtgagtccgaaagacataactgtgcattcgaacaacccgtaccgagtgatgaatgctgtctttggaatatgctcttcgcggatcctcaactggtgatagcctgatcgttggtctatcc

SEQ ID NO: 7133 - DNA, 5985 bp, Oryza sativa
ccaacgggacggcgccagcctctctggcgccgtcctcctgccaccgtggcgcacgcgaaccgacgtggcaggaggagggcgccagcatggctggcgccgccccagggaggagggcgccagccatgccgcctccattcctgtttctctgtatggagttgcaacggtgtcatttttattttatttttttggatgttttttcacactcaggatcacgatacaaccaaccacaaaaaaaatttaaatacgaactaccacttagctaagtctgaaaatatctagcataccacttagtctactttgcaccttcactaaaattagaccataactcctttagtaaaaccctttgatcaacacgttaaacataatgcactctaccactatatgaaattacttaatataattcaaaatataaccacatgaaatgacatatataagttaaatagtatatagagatgcaattttttatttttatttcatttttttgatatttttttcacacttaggagaacatagtaaccaaccgtataaaaaataaactcaaacggacaaaatatgtgacatatagaattttccaaaactctaccgaaacggacaaaatatgtcatctattaaaataggcgtaactttctcatacggactcggaatcagtcaaataatatatgcacggacatctacagaaaatgttacatccgattctccccggctttggcgatattaaaacctccaaattccgcttgcaagattgtgtttttgaggagagaagtttttcggtggagctttggaaaattccacatgccacatatttcatccgtttgagtttattttttacatggttggttcctgtgagttcctaagtgtgaaaaaaaatatcaaaaaaataaaataaaaataaaaaagttgcacatctctctcctctgcaatagttcggagagagaggagaggagaggaaaaattctacatgtcacatattacgttcatttgagttcaatttttctatggttggttcttgtatgtccctaagcgtgaaaaaaatatcaaacaaataaaacaaaaataaaaaatttcggggggggggcgctagccactctggcgcactccccctagccacctcagcatcgccccgccacgtcggcaggggaacggcgccaaagaggctggcgccgtcctgttgaacgacggcgccagccactctggcgcactccccctagccacctcagcatcgccccgccacgtcggcaggggaacggcgccaaagaggctagcgccgtcctgttgaacgacggcgccagccactctggcgccccaaaaaggaccatttttgggataagtttttctaggggtctatttacgaaataagtttttcaaaaggaccaaaatgtgaaaaatcgtcttctaatattttgatattttgcttgcactgtttgatcacttgttttattattatttttaaatataaaaaacgaaaagttgtgcttaaagtactttgggtaataaagtaagtcacaaataaaataaataataattctattttttaataagacgaatagttaaacagtgcaaataaaatatcaaaatcccttatattaggggacggagggagtacatcatatgtatactattattagtatgaatgtagttaagtttttttttcaagatttatagtagtaatgtgttattattttcgtaatagatgaagtgacaacggcgcgtgtgtgcgaacactggcatttcgaatgagttggaaaacgacgacttcgattagtagttgatcgaaaaagtaaatcaagtcgcttgttcggattggtgtctcgtcctgataatgatccgcgatctgcttggagttcaaacacacgcacgtgcgctgcgctgccgtccgcgcgctggattgctgggaacaaaacgctaccgagcgtaccgcgcgctgtggcgttctgcctctgcctgcctccatgtacaccacgcgatttcctgcacggatggcatcaaatgtatctatccgtgacacgtagcttagctattatgtaaaagcatttaattttacatttttttgcggggaatttaattttatatttttataactctatttaattttatagttgagatagtgttctgagaaggacataaacaataaataatattttcattcttacatattttttaaatataatacataataatcctgtctttgttttaacataggctactgcctcttattataaagttttttttctctaagttgaaccaaatatgaattaagcaacaaaaatatgatgacaaaacaggtttgaagcacatgaacacaaaagaagaaatacatattattgcagcctaccagtaaatctccatactaatttaaagttgatgaatattgacatgatcggtgacttcgaattgttgcatgcaagttaaattacatatttattcacgtcgcaccttttgtagttgggttcgaaaccgaaaccagaatgttgccgtgaaaacaaaatatctttatcatgaacttttgatatatgctttattgctctaatttagcaaataatttacctctacagctccaagtttttttttagctttagaaattattggagttggagctgctgatatattagagttattaggatgagacattttattcatattttacactcctccttttcccctttaacttggactactaattaagatccattaacggctaatattagtgtattgcctttttcgcttagctatcacacgcatgccaaacatgaccataatgcacattatgggctccaagaaaaccatggagcgcaaagtcatagagagaatgggagaggaattaatgccgtacattgtacgccttttttcttttatattatatgcggcgttacactacagtcatgcgatccatcaagtcagaagtcgccttctgttccgttaggcaggcagaggcctccttcccctttttgattttcttggcgtccaaggtgctctgcttaataattagtctcaaattaatggcctgtcaattggtcaaacctcctgttattttatatacttcgtcgtaaccaagagccagcagctcatggacttttcgtattatttccaccttctgtttttgatctgagtatcagagtatcatgaagcagatatgatgcttggtctccaaggctcatgcttcgcttccaaggcggcgccagtacggaggtccacttgatatgatgattaaactaagaggccatccatgtggggctgtgggcatgcaactagatcttaatttaccatcatccaagatttgcctttttttagtttcaatactccgtatgtactccctccgtctcataatataaaagattttgagtttttgcttccactgtttgaccattcgtcttattcaaaaaatttgtacaaatatagaaaacgaaaagttatgcttaaagtattttggataataaagtaagtcaaaaaaacaaaaaataattccaaaattttttgaataagacgagtggtcaaacagtgcaagtaaaaacttaaaatcccttatattatgggacggagggagtagctaagatcgattaacctatataaacataacatcaaatttctgctaagctttcacacatgacatgtatcatcactactctctgtcccattctaagtgcagccatgatttttcgtacacaactttgaccgtccgtattatttaaatttttttaaaaaaaattaagaaacataagtcacatataaaatactaggtttatgagttcaaatcagtaggatattatgacatgtatggattgaatctgatctctaagctcaattaggcacgtgctcgataaagatagcctgtttaaattgatatggacacttaatcagcctctctctctttttttctttttttttttgctctaaagaacttgacgacgttgctattatacagcatgggtttggttgataatcctcgcagaaaagttaaggacaggatcacatcgattgcacaatccaccaatccaatgcaatctcatggggtttatctccgattaaaaatgagctgaatcgtacggttttgactcgcccattgattgccgaaacgaagggcgtcgcagttaatttgtggtctcgtggatggccggaaagagctctttcttaattactaatccctccgtcctaaaatatagctatttctagcacagtgtcttatcctaaaatgaagttatttcttcatctacctcctcctctcaaccaatcacaaccattctttttcacctactttctcttttcaaccaatcacacacttcctccaatcattctcacctactttcttaatacctgtgccaaccttaaaaatagctttattttgggacggaggaagtagtaattcttgtcacttcctggtgatgctatcttctagaagagagtactgtatgtagctgtctcgtgtccgtgatgcgactgtgcaagtggcgtaatcgatggtgcaagtggagtaattgggaacacgaaacgcacgtcacatgctacgtacaagctgccgttgagctctgcacagcctagcagtttaatttaaaacgttgatacggttcatgagatgccatgttctcgtgtttatcgtttagctatccctgtcttctgcatagagacgcgggcacaagcgatactcaatcatacaaaacaggagtggtacagaaaggcacgaaacttagcgtaaaacaaaactggaacaacaactcaccaacaccagcaaattgaacgaatagattgctccatctgccttcccgcttaatcagcgtagcaggcatgcgggagacacgccctccaaatcactaaaagcagcactaataatcggcagtttatgaatccgaatgaacatttcaggccattttggtttgactccaaaatatgccatattaaattgttggtattttattaaatagtgaaaaccttgacctgcaggagtaaaatagcctcaagcatcatgcgtagaaaaccttctcacacacataggttaagaaaacccctgaactttaccccaccataacccaggcatcatgcgttgaagaccttctcaggcatgtcaagaaaacccccgaacccgcccccatctttacacagcgacaccgtaacccatgtgagaacaaccaatgacctggcatcatgcgtaacgtaacccgtgtgagaacaaccaatgacctagcatcatgcgtggaagaagaccttcttacgcacgtcaagaaatcccccgaactcctacccccacccttacatagcacatcgtaacccatgtgagaacatctaattacctggtccgggtctaagagctatactttgacatgggacagataaggggattttttttaaccctagcctggaattcgctcccatggagaatcgaatccagtgaggagtgctgttagagccacctgaccaactcagctaaaggctcattgtcagggttatggataccacatacctaatagtagttgactaaatctcggcaggatcgactacataccatgtcctatacggaagcaaccttcggataaagaaagacacccagagttctacatggaaacgacaatgactactcggattgtatctatattgattttcctagttctacttggacaaggagacacctataggtataaatacaagccccctaggaggagaggggacacccacgaggggacgacacacacactcaccatgaagagacaatctgtagcgcccgttccgtcgtggcgcctagcggaaaaattatctcttaaaaaccctattgcgaaatttgtttctttgcttgttgtctagtgtccgtgccatctcagatctcaaatccccgatctatcgtcgagttcaatcccgaatccaaatccttccaaatcaaatccctccgcaaaagtctattttgccttccccagggtcgatgggccgaatctctctcggcccatctccccctccctcccggcgctctctctctccctctctctctctctctccctctctccc

SEQ ID NO: 7134 - DNA, 12826 bp, Oryza sativa
aatgcacattcagcttagaaattcgggttcgagaatttctgggcgtgacaccggcgccgaccgaccgaccgcctccgtttcccgtgctgttgcttgccaccgcacgacctgtgcccatgcccgagagagagggagtctcatcgtgctctgcattccgccccagctcagcctccgcggcgtgcagtcgctgcccggcggcgccctccaccgccgaaagcaccgcccgcaggtgccagcgccgcccctccatcagcccaccgcccgtccccacgccgccacccacctccccgcccctgtgcgctgccccgtgagagagagaatagagaggagagggaggaagaggggaagaggagtatgacaggtgagacccacatttttttagtatataaaatgttgactggattgtcacgtatacgccacgtaggacaaaactgctctggattgagccgaggtggggtaattcgtccggtattgaaagttctgggtgagtaatgtctggttttcggattcagaggggtaatttggtcgaccacgatagtttaggagggtaattcgtactttttcctttctcaaaatccttgcgccaccatctccactttcttctctggaagcaaccttggaatatattagcatattcgtgattgtttaagtaagaaaatcgctagttagcatttagcaagatgggtgcatgcgtactaaaacatagagcagtaaccaacatgatcatcaaatatgttggaaatttctgtacctaatcctaaaacactcgctctcactgaactctgaatgttggtttctaaagtttttcagactgctacaattaactgacggaaatcgaaaaaaaacagagtatcgaacgcaaaaacagagttttggtgctgcgtaatatttcagcaacttttctcggttctctttcattatttatattccaaactccaagagtttgttacaaacggaaaacaacaacaaaatcgtgacttgaccgtgttaggaaaccaatgtcctatgaagacccagcccaattacccactattgagcacatcactaaatgaactttggtttgaaagtctgaaagtgtgaaattctgaacatgcagtagctaatatagatcggtcggtcgaggcgtggtaattatattgaaatttccaatcaattctaatttggttgcataataaattccgatttgactccctctcgatcggacgcccgaccgggagtcgcgtccaaaaaaattctagagtccatatagaaataaaatttataaataaccgaaatttagaattaaaaaaaggaatattaggggaaaaaagtctgaagcccatataggaatacaatttacaaatgataaaaattaaaaattaaaaataagaaaaatcagatgaaattctcatggcctagatattttcatattaattagaagaaagaaaaaaatagaatccacataaaaataaaacctaaaaatagttgtaattcagaattaaaaataagcaatattgaaagaagagactaaagtccatactacaagcatataatttagaactaatgaaaattcagaattaaaaaaataagaaacatcaaaagtagagtttagagcccatatagaaatacaatttagaaataactaaaactagaaattagaaaaaaaaggaagagtgggagaagagtttacagtctatataggaatacgatttataaataattgaaattcggaattaaaatgaatgaatattaaaaaaaattctagagtcgatatagaaatataatttacaactaactagaattaggaattagaaaaaaagaatattgaaagaaaagtttagattccatatataaatacatttacaaataactaaaattaaaaattaaaaaaaatgttagaagagatgtctagagtccatatagaaataaaattcataaataatggaaattataaataactaaaattcgaaattaaaatgaataaatattagaaaaagagtctatagttcatatgaaaatgcaatttagaaacaactgaaatttaaatagggaatattgaaagagagttagagtccacataaagtacaatttataaaataactaaaattaaaaattaaaaaaggagtgttgaaagaggtgtctagagcccatacaggaataaagttcaaaaataatagaaattcgaaataaaaaactgaggaatattatgagaggaacttagagtccatatatatatagtatataggctctgttcggcaacactactctactgttgtaaccggctgtgctgtacagcctatttatatattttctttaccatacactgtagcggctgctgttgtgcagctgcagtttagctacacccaatagacccataaatacaatctacaaataactatcacatatatacaatacaatataaatatcacacattggttaataataaaatgtaaaactatatatgctattttaagaaaaaaatataacgatactagccgcgcaatctgcgcgggccaccatactagttaaaataaaataaaatttaagccattagatcgtgatggtatcaaattataataggttttgattgacagcaataaatattttcactttcgctgggacttttgggttacttatacataataaagatttagtatgagccagtacaaacctatctctctaagagtaatatacacaaaaaaaaaatgacatatgggcccacccgcatatgaagccttagcggtttcacaacaaacatcacgtgctagcggtggcggatctaccataggggctatgggatctcgagccttcactactgacgttgaaaccatgagagccctcgtaaagcccccactaaaattttctgtcatacatccattagaagagggggctatagctttgtatagtttgttttatctctcctattagttatttctggatccgcccctgcgtgctagtacaccatcaccttataaaatttgttgcactggcctggatctgcttaagctgaattatttaaggtaaggtgacctcacgaataataaagttcaggcttagacaacctaggtgtcggtattgccaccagcggtgtggccttcttcatcacgatcccaaacttctcggacaggtcaagctgcacgccctgcggcagcttccagtcgaacgcctgcagcagcatggcaaccgagtacaccatcaccttctcccccatggccatcccggcgcacatcctccggccggacccgaacgggaggtagtccagctggctaccggtgaagtcccccttgtggccgccgtccctggcgaacctatccgggttgaaatcgagtggcttgttccagaccagtgggttccgctggatcgcccagacgttgatgagcacgcggcagccctcggggacgtggtatccgccgaccgtcgcggcggcgctcgggctgtgcggcaccaagaggggcaccggcgggtgcagccggagcgtctccttgatcaccatgcggaggtagtggagctgcgggaggtgggactcctccacgacggcgtcccggcccacgatgctgtcgagttcttgctgcaccttgttcagaacctgagggttctgcagcaactccgccataatccattccacactgttcgacgtggtgtccgtcccgccgaccaccatctcctgttcacgcatatatataacatatagagattaaccgatttctgattattgaaattttgagaccatttcggaacctgcgggatgaaatgctaatgtggagaaatgaaatcgagttgcaattaattaattaattaccaagaggaagccctttacgttgtccatggtaaaggttgttttgccgtcgctaccttccttttccatcttgagcaagcactccaagaagtccgttgtcatctcgcccccgtcttgctgggatctcatccgctgctgtatgatcttggtgaacaacaggtcgaaccgcgacctgagccgctccatcttcctccggataccctgcaggtcgaacggcttcagcaccggaaacaagtccgagacgttgggcgttccgaggagctcggtgacctctgcgacgagacccctgaactcgctccccaccgccgacctctcgctctcgcttccgatcgttcccccccacatggtgcccgtgatcacattcatggtgttcaggaacatctgcgcgccgacgtccaccggctcgccgggcttggagtggaggtaccggagggtggacctgaactcgcgccgacggaggccgtgcacgctggcgagccccgcggggctcatcatctcctggacgcagacgcggcggagcaggcgccacataggcccgagcgggttgcccacgatattctgtgcgccgccgaaggagacggcgtcgccggcatccagcatgacccggttggcgaagacggagtcctggtcgcggagcacctcgcgggccagctgggcggaattgacgacgatgtccaccttggaaccgaggcggatggagaggatgggcccgtgcttcgcggcgaggctagcgaagtaggtgtgcaagtttgggtcgatgaatgggaggctgccaacgagaggaagccccaccggtcctggtggcaagcggcggctgcgccgccgggtgacggcgaggtacagcaccgttggcacaagcaatgcagcgtagagaagatttgctgttgccatgggctgcatgactatggagatgcatcactgtgagaagtagtagcagtatcttatcaaataccacgctctacccaagcgatctataaatgccactgtcagctagcttcaggccgaatttgaaaggtatcagtcgatgagaacaattgagattcttgttttgtcgacaacgtactatccaatcattctcacccttccattcctcaatctattatagatgtggatttttatccctacagggaacctcccctcattgtttacatgtcatctgaatagttattaaaaaaattaaaaaaaattaacaatatagattaataagaaatatatcactccataaatatgtatgaccaaatttaacttctacaagttgcaataaaaatagtacattaaactaaaaatagttatcgtacattcacaactatatttgttatttttgttacaacttgtagaagttgaatttaaatttgcatgtttgtggagtgatatatttcatattaatctatgttgccaattatttcatattttttatgactatttaggtggcatgcaccgaacaagaggatatccctcgagggataaaatcactttcccaatctattactatttgctcaaatcagtcgtgaaatattctcaatcaatattgatgatcggattgagatccaatgattctctttcttttttttgggggaggggggtgcggctagtgttgggcaaagtaggagggccaggatagaagtagacgatgcttaagggagaggaagatggtagagacaagaattttctacaactaggtgctatagcagccgttatttacatgtgatttaaatagttatagaaatgttaaaaaaaatagtaacaccaattgggatgacataaatctatatagacaaacatgcaaagactaaatttgattaacaaccactaaaacaaacataataaaatcagacaatgaatagtatttgtgcaatgcagataaaatttattattttaatttcttcatttgtagctcgaatttagacttgcatgtgtggacaagaccataattaaggagcaaaaagggtttatctcaattataaatactcatgtaaagtacgcaaggaagagatttagcacaaataagtaattatgcctaagtgaaaaaaacatttgatgtggttttgggttaaggggacatttttaatggcttcggatttataaactaaaatttagggtatacaatttagtagtttaaggtgtactttttgtaggaatatagatgtgaaatcatttcgtcaatttagtgttttgtgatgaacaatttgttgtgtgagtgtctgattaattttggatcaagtgttctggatgagagagtgtacccagctataaatttagagaaaattcaattcatagaaaaaaaaacaacccggtaaaaaaagatagcacaagaagttttcccttccatcaaaaaacacaggtcgtacatatttatcttctatatataacacttctgttacattttgaacaaacgacgttagactgaagtagagtaatctatccttagaatattttgcccttcgttttcctcggtgagcctactcgctgccagcctcctgtacccgtttagccactgccgcgcggcggcgcctgaatccacgacgcgcccgtgcctgctcgatctcgtgctgaactgcacagctgcttgatgctcgctcctgtgcctgcgccgctgcgcggcccacgccgaccgccgccttgccaagcctacttgtcggtctcccgagccgtagccactatcacgcgtcaccgccatgagtccgcaatgcgcctgcaccacccacaccaccatgcctgctcccgtgccgaaccgcctctttggcacttggctcagtgacgatgaaagcaaagagcaaatttaattagcctgaggataaatttctctactcggataaaatctaacgtcatttactcaaaatgagacggaaatgctacttatcaaaggaaaatcggtgacctgtgcttttaacttaagaggaaatttttgtgtgctaatttttttacccttttttcagatcgaattttctctcaaatttttagtcaaagctatagcacgtgccacgtggaaagaggtgatacaatattttatttttgcaggtctcatcggatgaaaaaaatagataatggtggacttaggtgatatgacttatctatagctagcagttatagatagttctatttgtacatgctctaagacaagatttgattcattttttctttttttaaaaaaagaacagagcaactaggtagcgcctcaaataagacaacagtatggtcgcagctgctcgaaaaaacagaatgcatcactctggtatattccttttaagtttgagggaatctggccagccggccatgcatatagaacccacttaggctgtgttttccctttaaacttctaacttttccatcacatcaaatgtatggacacatatatgaagcattaaatgtggatgaaaaaaaccaattacacaatttgcatgtaaattgcgagacggatcttttgagcctaattacgttatgatttgacaatgtggtgctacagtaaacatttaataacaatggattaattaggcttaatttatttgtctcgtagtttacaagcggaatctgcaatttgttttgttattagtctacgtttaatatttcaactgtgtgtctgtatacgtcaaaaaatttaccaaaacgactaaacacggccttaatattttagtgttcaatcttagtggtatcttgtattattcgtatagaacatgcagagcatctccctaaaactattcgatcaataacatgcttaatagttaagaaaatctgtaatgattgtcaggtataccaccatcagcttgtgtctaaatttctatccaggggcagttgaagctaggtatcaaaaccattgagataccaaggccacaataagacaaaccaaaggagagtaggagaccatatacttgtttaaaatttagagatatgtgcacctatcagggaattgtttttttccccttcaaaatacttatatgtacaaaagtaaagaattacttcccatctggatgtccgctggcatagttacttcgaccaccccaggcaataaaactgaactttcaatacattaaattaagccgaatctctaacacagtaagcacataaaaactagagtttgctggcgcgtagaacaagctgttgatatttgcgggtcgtactttcatactcctttcgatttttaatatttaatagtaccttttacttttaaaaatatatttgaccatttgttttataaaaaatatgtaattattatttgttttgttatgatctgttttatcattaaaggtacttccagtatgatttatatttattatatttttataaaacttttaaataaaatgaatgatcagtccaatagttacgtcaaatattaaaaaccggagacagtacaacacatgcaaagtgaatttgttcaaaaaggaattaacacctttgttttggatacttgttgccagatccatattcaaacttttatcacttgattggcaaattgattaataaagcatgtggatttcaccaaattcaaataataccacaaaatttgttagagagtgccaattaataccatgacttccatttataccacataactagataatgtgtcacttttgccccctttctaactctcttaccttcactttttactcctaaatatcatgtggtattaattggtactttccaaattttgtggtgttttatattttggccaaatctttatgctaagagttgaattctcataaaaatgtgatcctcgaatttttaatagacaacacctttgacttgaaacatatgtttgactaaccatcttatttagaaaatcttgtacaaatatgcttaaggtacaattaatgataaaccaagtaacaacaaaataaattataattatatatttttgaaaattaaatgaatggtcaaacgtatgtataaaagtcaattgcaccattaaaaatcggggagagtatagtataaccacataactttcattcattataaccttactatttaaaaactatgggtgtatttagttctttaggtgtaaagtttttaagtatacgggcgcacatttgaaatattaaacgtagactaataacaaaacatattacatattctgcatgtaaactgcgagacaaattgattaagcctaattaatccgtaattagcaaatgtttactgtagcatcatattgtcaaatcatggcgtaattagactcaaaagattcgtctcacaacttacatgcaaattgtgcaattggtttgttttccccacatttaataccctatgcatgtgtccaaatatttgatgtgacgtttttggtcaaaattttttgggatctaaacaaggcttatataaaaattgaaacggtaatagtagccaatactgataaatattttaaaatggaaaaaatcatttcgccatggtagcgcaatccactgaattccttattccgattgcgtgccttgcctataaatatcacctcaacacctttggttttttaaaaaggaaaaagctgcacgtacatactaacttttttcttactaaattcttactagcacagatgttactaaattcttactaacatcgatgtgtcatgctatgagtgcatctagattttttataatttctatttacctaaatcaaactgttgaaatatgattgttagtaaaaatttagcaagaataatttagtacgtgtaccggtgctcttaaaaaatcacctcaccacgcagtactgtgcagagtgcaggacttctcattttcttactttcttttcttttagggacagagtgcacgacttgacccaacctggagtggagatcagaaatcagatcgatcgtcctgaagtaatgtgcagtgcatgtattagaaaattttgaaggtaaatattattgttcgcctccgaaaatgtttacggtcaagtccacataaactaacccaaataattaactggattgagtttcctcagatttgccttctctctaacttatgttactgatatgtgggccttttacgcagcatgtacagcaccaattaatcgcagcacaaatgacttccttttttttttcattttgaaacagtccaagattgatcgatccagtgcgcaacattatatagcataatattgcgtgaattcttgatcagcaaactgccggcgatgtcttcttcactccagtgccccgacgacccggcgccatccatgaacgtggaggccgtcctccacatgaaggaaggtgtcggcgagaccagttacgccaagaactctacgcttcaggtcagcactccacatcggctcgtcaccatccatatctatatagttatctacgcatacggcatacgcccttggttaatccttggaaaaactaattggcgctatgcatgcatgcacgcccgcgcgcacccgtgttgttcctgcagaagaagagcatggacaccgtgaagagcctcgtgacggagtccgcgagggacgtgtacgcgtcgctcaagccggaaaggttcaccctggccgacctcggctgctcgtcggggacgaacgctctcggcatggtggaggagatcgtcaggagcgtcgccgaggtgtgccgcgggtcgtcgccaccgccggagttctcggtgctcctcaacgacctccccaccaacgacttcaacaccatcttctcccgccttcccgagttcaccggcaagctcaaggccgacgccgacgccgacgccggcgacgacccgatggtgttcctgtccggcgtccccgggtccttctacgggaggctgttccccagcaagaatgtgcacttcgtctgctccttctccagcctgcactggctctctcaggtacgatgcgcgcgtcgtacgaacgtgcaatgttcgatcggttgatttttgtgatgatatccttgtcagttgtctagatcatgtcgttttaaaatgcacatttctcaggttcctcccggtcttttggatgagacgaacgggcccgtgaacaaggggaagatgttcatatcgagcacgagccctccagccgtggcagcggcgtactcgaggcagttccggagagacttcagcctgttcctcaggtcacgcgccgccgaggtcgtcgccggcggccggatggtggtctccatgctcggcagggagggcgagcgccacgcggacaggaacacgaccctgctgtgggatctcctctccgagtcgttcgccgcgctggtgtcacaggtgagccaagttttcacatagcgtcttcggccgtgcatgacacgcgcaatatgcattgacgccgcgtgtggccgtacgccgcgcagggggtggtggagcagggcaaggtggacgcgtacgacgcgccgttctacgcgccgtcgataggggagatcgaggaggaggtgcggcggcaggggtcgttcaggatggaggtcgcgcgggcgtacgaggcgagcctgagcggcagcggcgacgcgaggaaggacggaaggacggtgtcgatggcggtgagggccatccaggagtccatgctggggcaccacttcgggacggagatcgtcgacgcgctcttcgccaagtacaccgagctcgtcacggcgaccatggagagggaggaggtcaggagcgtccagattggagtggtcctcacgaggctgtgacctgtcagcttggagactcggggagccctatgtgtatgtgttgacttgtgccgttcagtgttacaaaagaaagttctcaaaacaaaccagttttgtttcttatgggacaaagggatgtatgaacctaagcaacgtatgatggtcatcgttcctaactcacctcctttatttttcacacatatatttcctaaactgttaaatagtgtttttttaacaaaatttttctataagaaaattgattaaaaaagcatattaatctattttttaaaaaaaaatagctaacacttatgaatcgtttcgttttagttccaacgtcatccaccgaacacagcctaatgttcgtgataacatcacctaattcggtcattctgaaagagtttaatggccttatcgaatgaagagccccccgtcatcaaaatttctgactttttaaagtcagtttggtcacttaattcttttggtatatatttaaaaaaattacaggagtgagtatgtacggcggaaaaaacatactcatgcattttcatataaccaaacatccagactacacatcttagacaaaaaaaaaaaaaaacctttggtcaaaataagtacaatttgactctatgcttgtcagggagtcattcctttttcacaggctcactctatgcctcaccagagatagtcaatacttttttcaggaatacgccacaggcgcattttttctattaagagaaataaaagttatttacaattaaagatcgaaaaacagcagggggccgatactggaagacagaaacaaaatggcctgggatttgtgaaagaaatgatgggattgccgagtttgccgcccgccagagcgccgcttcctccgtcattcccttcgcaacatcgacccagatagtcaatactcaatactctactaatttctcacctagaaaagagttacttaactccgacttgcttttaatatggtctgtaactaaactaagttttggcactaaataaaaattatcctatactttcgacataagcaggtatttttctccgagcaataaccaattagagagtcgaaatttcctgtcaagactcgctgtacagtgtctcaccaatttgaagcttcttccgcaatttgtagaaacctcattaaagatcatgagtgatgttcttcctcgttagaagatcctgttttcgttgatgttgtttgaggaacagtcggatggctgtacttcttgaagacccgctcttggttttcccgccaccattcttcagcctgattctctgcaaatttcttcttgctgtccgacaaatttaaggagacggaaaattttagatggaaaggatgtagcagtttaacatctagattgcagcatggatagggagatgtacctgaaccggacccgcttgaatactttgctaccatccttcagctggataagtgtgacatatacaccaggttcaaactgctcaattaattgaacttctccatg

SEQ ID NO: 7135 - DNA, 9128 bp, Oryza sativa
ctctacaagtttacctccagctattccaaacataaagtactccaccggtattgatattattgaaattatacccaggacaacacacatcaaaccccaaaagctagcatccttttttagtttgtctgctggctcaaagaaagttttgatggcattggaaatcattactccaaacattgggaaaagcactccatgaactcctgcagccagtgttgctaacaaaagtatcggtacctctggcttgtttagtctagccagtcgtccaataggagctttctgttggacctcaccatcaccaccctgctctgtctgttcccccacagtcgaatcattgccttcaagcaattcaactgagccaggcaagccaaagggaagggctagagaatgcctgctactatttcctgcagaatccctgctaattgatcgcttgaatgacaaacttctacttttagaccttgaatcagatatgtgatggtctaatttcttctcttcttcttcgtgggtttcttgtagcctaatgagttgcgaataaacaccattggggttcattaccaattcatcatggggacctatgcaagtattcgtgtaagaaattgatcactgcagttaaattaagctgaataactcacaatcaatacaaaatgaacagtggcaaggggatcctaaccttgctcaactatctttccttgttgaacaactgatatacaatcagcattcctcactgtggtcaagcgatgagcaaccacaagtgtggttctgtccaccatgatcctgttcagtgcctcttgaactatcctctctgattccacatccaatgcgctagtagcctcatctaacagaaggattttggggtttttaagtattgctctagcaatagcaattctttgcttttgtccccctgagagctgtgcgccacgttgaccaaccattgtatcatagccctggtacaagataagagaaaacattagacccagatctgataacaaaaaaaaaaacttagacatgcaggttaatttattggagttatcacatacatcaggtaatttgtcaataaaatttgctgcattagcaagctcagctgctctcctaatctcttcaattgttgcatcctctttgccgtatgttatattatctttaatggaggtcataaagagcaatggctcttggctgacaagaccaatcttccctcttatccaattaagcctcaagctcttgatgttaatcccatcaatcaaaacctcaccagcctgtggatcatagaatctttcgacaagactaataacagtggacttgccgcttccactctccccaactatagccattgtcgtgccactagaaacatgcaatgaaaatccatcaaatatcagttgctcaggccttgctgggtagctgaagtacacatccttcaattccacatcacccctgatgtcctccaactgtttcccagttatgtcatcaggatcaatctgtggttttctcttgattgttttgaacaatctataagctgcagattgcccttctgcaaaggctgccatacatggggtcgcattccctaaagacctgccacaaggaaatggaaatttttacctccattcgttaaaattaaaatatcataataaattaagaactcacattgccccagtcatgacagcaaacaagatatttatgatgtctcctcctgagtatcctttgctgactaccaacttgccgccataccatatagctaaaccatagctggagaaaaatatgaagaaaacggagcccatgccaaaaccgttcgtaagtccttcctcaacagctgccttgtatgccttgtttatgagtttattgtacgatgcaacagcctgcttttcaccgttgaaggaaacaacctgttttcagataggaaccacacaaaactggtgagttcatgccatttcagatggaggtagagggagtgaaattattctaacaaatgaacttacagtttttatggctccaattgtctgttcaacaacattcgctgcatcgctatatgatgcttgacccttgctagagatttttgctagcatcttcgatacagctccaccagcaatgacaacaggagggatgcaggccaacatgacaagggatagaagccaacctttcacaaatgctacaacgaaaccaccggcgaaggtagccacaagttgtagaaacttgccaacctgcagaatttttcatcacaacaggaaaaaaatatttatgttgtagtatgtcagttagtgctattggtcttcatataataaagatatatgttgacaattctgttgaacttgagagaaggtgattaccttctcaccaatggcatcctgaactaacacagtgtcaccggacattcttgaaactatctgcccagttgtcatttctacatcaaagaatgctatatcctgtctcaggacagatttgaggtatagagatcgaatgcgtgtcgcctgccgttctccagtcattgtccagcacgccacctctgcacagacatcaaattggcattggttatttacagtgatgtgagcgccatatgccttgaacatgtagaattatgtttcattttttctaatcagtttagtttgctaaatcaaaagtagtagtaccgttttttaatgtgcagtttgacatatgcttattcattttccactttcgaaagggaaaagtaaaacatgtgtgctctgtatctcctattcaatagtaagaggataggtttaacaggaatattcgattcacaatcttaaaaattatgtgagtgaccttttgtggactgtgatagcattaataaagagaattgtttgaactttgaactcatattaccaaaagtcaaactttgactctgcattgatggcagcgtgcaggtttgaaacgccaatattggcaaaaggatgatatggagtagtagtattagataagttgccagcttgctaagcatatgctctcaccgttctcttaatcatgactaatttactaatgataatccataactagcagcaacagttgacgcatgtgcagtgtgccaagtgcatacacataccaacagaacagtaaattctattacttacgaagaaatgaaacaaccgctgtcgcgatgcccaggtagacaaagttgagaaccgcctagagaaattgaaagaaaatgacaccaaagtgaaaagtgtattcatgtcatcactacctttaataacgtgtaaccgtaaaggtaacgaattcataatgcactaggagtagttaactgcaagctgaatgttaatggaaagaagttttctgtaatatgacacactggcggtgataaaaaacggcgaaccgacaaatttgacagtgtgtatcatcaccactcattcaaaaaagattaaaaaatataacgtgtcgatctctgacctcttgataggaaaaagattccaaccattacattgattgatactctgttatcctatatgacatttctttactggaaatgggaaggactttgatccttcttgctccaaaaaaaaaattgatactctgttaactcttctgttgtctcttgttggaatattaacttattattacaagttgcaatcatttggcataacatatttactttattgaacaattactacaaaaacatagctaactgaaagctgcacactgtaaagtttgccggtataaaagccagctcccaggtgaacgagaaacaagctacaataccactgaatattttgggagaaaaataaacaaattcattatccttaataaatagacgtgagaatctttaaaaaaaagaagagagagattgagagaagaaatatagaaaagtactatcccagaaaataaaatgcaacaatatttagttgaaaaaagaatatcgcggtacgagaggctgtttggtttaagttccatagatcgaagaattatcccaacttgtcggaagaattgattccacaagcgaatactctctttttttcctttctcaagaagcaaagcaaaggaaagaaatgagtcgagaagacgactgaaaaaaaaaaaccccgaaggcaaaatcgacgaggagttaataccgccaaaagtcaagatacgagcacatcgttctccgagctccaaaacatcaacaaatttcaccggagctttctcaagatcaaacccacatctaaaaagacaaagaccgcaaaatgaatgaaatgaaagggagtggaattgattgaattggccaaagctcgatcgagcacgccgctaatccacggcgcgcgtttccttccacatcgacggcgagaggattaatcgaccggaaagttagccgcgcgcggatcacggccggacgggcggcgctagctgtggcggggaggcaggcaggctcacctggttgacgcggtggaggacgtcgccgttggtggcctcgccgaaggcgttgatgacctggccgaagatgacggtcatgagcggctgcgacaccccgttggcgagcgccgccaccgtgccgaccgccatcagcagcaggtccgtgccgtcggcgtaccggaacagccccgtgaacgacaccttcttcccggcgtcgccgtcctcctccttcttcttgtcctcgccgtccctgccgttcttcgccttcttctccttgccatccctgccgccgttcgccgccgcgtccattgctggcagctttactgtgtgtacaagatagatacgcccggctcgatcgcctcggcctgcggcgccggattcctgagtcgtagctcgcggctcaacgcctcaaccctttcgcgggtatttattgggttggccacatacacacaccgccgcacgcagggagagatgagacggagaggagggtttggacgacgaatagaaaatatcactgcgccagctatttccaaatggtctatggagaaaatgttcggaaggatcattacaaaaaaaatggggacaaaaaggtgtagtcctgtgcttttttttttgggaagcgtttttgtttctttgtacttacattttttttatataggcgaaggtcatagatgcatgttactccactaagatggggtatgaaaattcagaagggagttatgtggatgattaatatatgatacagctggtagtagtatatattgcttagagctggctagaacagggatttcctctagatgctattgtagtggaaagagttttttttttgtgaggaataagtgaagatcgtagcctaataaggtattatagatgttgatcatgttattctacaaatttagttaaactttaattgtatatttgtcctaaaatacgaatgattacattgacaaattcacttgtgttttggaatatatgcagtcagtttaattaggacaaattaatacttcgtatgtcccattttaaatgcagccatgattttccgtgcacaactttaaatgcctgtcttatttgaaaaatttttgaaaaaaattaaaaacataagtaacgaataaaatattattcatgttttatcatctcataacaataaaaatactaattgtaaaaaaatttcaaataagacggacgatcaaagttgagcgtgaaaacttatgtttgcacttaaaatgggacggaggagtataaaacacatgccttttatattggcatactccttctatcacaaaataaattagtttttcttatgaatctagacaagttctaatctagacattaagatttgatttattttagatgaagggtgtagatgtcatcggttagaacaacttgtatccatggcttcactcaaatacttgagcttagttctaatgtgcaagttgctttagcttttcaccgtcacttaaaacaagacgagggatagggtataattaattaagtattttttattataaatgaataaaatagatttatttaatttttaaagaaattttcactataaaaaaagtgatatgagacgtcgattaatataaaaccggcacatgtgatctttctccccatccttctaatctctcatatgagtctaaactaaaatcggcacttacaacacattattggtgttgtttaataaaaaaccgccaaatataagtttcagtgcatgttttttcaatcacacaatttaactggtacctatgaaatagccaccggtgcgttttttttattaaactgacacatatcgagaaaacaacgttgagccgaacggggtggaagaaataatccgctgagctcgagcctctctcccattccacatgtcccatgtttattattttacttcgatctactctccgtctctttcccacaccctccatatcctctctgtctctataccaccgccacccgcagcccctcctactcccctctccaccggtgcggcatcgtggcatcctccccctcaacggtggtgactccggcgggctgctctgctagctgggacaacgatggctcccatgggcagatctgtcggtggcgacggcggagactgtgcagatccataggctgcggcggcggtggctcccgcgctcggatttgtcagttgcaacgacgatggctcccgtggccggatccattggttcagatgacgacaagcatgggctcccatgagcggatccggcgatgtctcccgcagatggatccagtggcgtcgatggctctcgcacatggaggcagcaatggcaacctcggcgccccaatgagcgatggcggcaggcggagttctcgtctgcagtgagtgactgcacctcctttgatttggtttttgatgaatgcttgattctataatgtgcaattgttgatggatatccggttgaaatttttgtgatttgtgctatgtgattttgtgcaggggatgttgttgttagatggattgatgggtgatttgtgttttgtgatttggaggatgttgttggataaatcgatggtggtatgggggtgatagggagcaacttaatttaagccgatgcatcgagccagcgttttttttttccgcattcgtggaacctcaaaggtgctagtttctaaactgaactttggttactcctcatcagtgccatttgaggggtttcggttgggaaatccaatacctatgtgatgttcgcaatcagcacctattaggttttagtgtgtgataactgatatacaaaataaaaaagaaacatctattaggttttagtgtgtgataactgatatacaaaataaaaaagaaacatcgtaaaactattactctctccatttcaaaatataatatttttcattggatgagatacatcttaggtagtgttcttttctcctaaaggtgaagatgaagattaagtttttttacgcaaaacgaggtggtattaacgtatgattgattgagttttaattattacaaagctgaaaatagattgatatgatattttagagcaacttttatatagaaagttttcgcacgaaatacaccgtttagcagtttgaaaagcgtgccacgaaaatattaatcttcatccaacacttgttagtactacgaatctagacatattgcctgtctaaattcatagtattagcatgtatcccatccaacagtggcggatccagaaaattgattcgttggtgtcataacgtgtctatctgtgtctagtatactaattatgcttagattatggtgttataatgtatgaataaaattgattcgttggtgtcataacgtgtctatctgtgtcatagtatactaattatgcttagattatggtgttataatgtatgaataagtagttttgctataggtttttgtaacgacccgcctctcccaggccgggctaaattcatagtattagcatgtatctgtgtctagtatactaattatgcttagattatggtgttataatgtatgaataaaattgattcgttggtgtcataacgtgtcaatctgtgtcatagtatactaattatgcttagattatggtgttataatgtatgaataagtagttttgctataggtttttgtaacgacccgcctctcccaggccgggcccacttacatctggcagctttcattggtcataaactaccctcacagaccaacacatgtcttttctgcacactttgtcctcactcgtgtgcacccgggaagaatttcctggtcggtcacccatcccaaattgctccaggccaagcacgcttaaccctggagttctttggagattggcttccggaaaagaagttgtaacttgttgatatattaatcctattaagccctaggccgggatgttacagttttgccaaaagtcatcggtgtcgcctgacacaggcccttataatgtagatccgtccctgccatctaaccaaaacttttttatattctaagacggatggagtattgtataagctcattcacataagcataagaatctaaggtcaaccctggtgggtggcgggctgctggcctccactgccacgtcattggggtttttcttcaccatatatgaaatcaccgttctggcaacggggttcggaaacgctgttcggcgatcgatcgccttagggatggggcagcgatccgatcccctcccccctccctccctccacccctccacctggtttacttttttggcaccgcattacttttctattttagtaaatttatacacctaaagtttatacacctcaagtttacacatctaaagtttagagaccaaaagtttataagtcaaaagtttatatatccgatttaaatttgaattcaaatatttttttatatatagtatttctatacatctaaagtttatacacctaaagtttataagtcaaaagtttatatacccatttcaaatttgaatttgaattatatctgattcaaatttgaattttgaatttgaattcaaatattttctatatatagtatttctatacatctaaagtttatacacctaaagttttaaagtttatagatccaaagtttataagtcaaaagtttacatacccgattcaaatttgaatttgaattatatctgattcaaatttgaatttgaattcaaatattttccatatatagtattcctatacatctaaagtttataagtcaaaagtttacatacccgattcaaatttgaattcaaattttttatatatagtatttctatacataaaattttctaacttttatttttttaaaaaaaattgtgtgtactgtggtagaaagagaagaaggggaagaggaa

SEQ ID NO: 7136 - DNA, 34477 bp, Oryza sativa
  unsure (1)..(34477): unsure at all n locations
tcaagattttcatgttcccttcatttggtagtaatttttcccttcttcaactatttcagttgggcacaatatgttttattttaaaatcgtaaattaggaagtgctacacaagttacaacgagaacatgtcaaaataccggacaggcagttaaccagtagaaattatgtatagcctaaatgaaagtattgcaagatatggtttgtatgcatcaaactgctgaaaaatatcaattataacaaaaaagtacctgttggcgagcggaaatcatattctggaacggtaaaagcaggatcagaaccaagaccaatctctgaaacaacagacgctatcactgcactgagtatcaccataggtgttgagttggaaagggatgaaagtcaacagaagtaggccacaaaacagattccacggcgaaaaagcacccggcaacagcagcattaaaacctacaatacaagcaatcacctgaaatataagtacaatgcaatcagaaaacagaatgcatggggaaaaggattacttggccagtttgaattgtaggactgtgtggagtatccacaaaaggagaatatcatactttatgctgtgtcaacttaggtgatctattgaccaaggaacattacacaaagttccataaatagattctttgcgtttggatgctacatagcaaaaagttccaaaaaacagacgcttgcgttcagatgcgtagcttctgatacaaaaatatattccatgtgtgtaattaattaaaacatgacagaccaacttaaaagttgaagataaaatatagagaaatattctgcagtgaatggaattttgaaaaataagaaatatgagaagcaagattcacctgatgcgattccagctgctgatccagctgccacaagagaaagttttttccctccttccaatttaaacacatttccaaatcctttggctatagatgaaccaatctccacacttggaccctcaggccccaaagaatttccagttccaagagtaaaagatgctgccatggctttcaaaaatggcctaaaggcaccttttatcttagacatagtgtcatttgagttggttgctatagaacttcttaatgtgttaaacactccaactataatgcctccactgactggaacaagtatcactctctgccagatttcaccgatggactcctcccttagccatgaagcgcctctcaatggtatgccgtcccaaaagagatcacgtatttcatgaacctatgccaaaataatacaaagttcttatctcaatctgcaacatgtgtaatagtgattactttgaggacttgtatgcaatcaagatgctcaaattcttgaaatacattatttatgcctggcagctgcaacgccaacctccattttcatcaaacatctatgggcttagagatcgagattatacacactatccactatattatcagtagggaagaatcaggaaatggcatcttgtgaggatgggtgaggactggacgcgctaattggacaaacacaattcgaaccaagctaaaacaggcacacagcagacaaggagtaataaaactagtaaattttgaatgggaactaaactaatgcatggatgcatggaattangcacccagcattagcttaatgggatccggcaatgctaacatggtgagaagcggtttagaaagggaatttggaagccaaatggtagcttaaaaacattggttatggtaagttcggtggtccaattgcatcgcatattcacatccaagtcggggaactagacgtgagatgtgtcgtcgtatgggtaccgagaggttgaagaggacgacggagacgccactgaggagcccgacgaggcaggcggcgagcgtgacgaggtcacggccgggcgccgccacctcctcctcccaggccgcctccacccgctcaccccgccggtccccgtcctcctcctcggtcgccgcgccgcatcggatggtccggaggcgcgcgcccccgtccccgccaccgcagcggcgacctgccgggcggcggcgggagagagaaggcggggatggggtcgagacgaggaggacacgcgcgggacagggtgccacggacggcggcgccatgaattgggagaggcatctcatattctcatccctagcatactactgcgagtctgcgagagaggagggagtgccgcgaggccacggcaattcggcaaagcgtctcctggcggatttccagcctatccaattccagatggaggctggagcgagctgttctttttttttttttcattcctctcgttttatgtggtaggctggtagccaagaaccgcgatcgtctgtttcatatcatcatcggcctctctctacttctctagtctcttggagaagtaagcaggattgggctttgggaaatgataatgcgtttttgggttttagggccttgcttgatttcgagtgaaacgggcctaacaatttcctgttaattactccgcttaaggaaggccatttcctaatcatgtcgaatatgtgtttatacgttatcagtgtccttaccaaaaggtctctatttgactagattgctttgctccaaacacatgttatcgcaactatacgatattggtggagaaatactttttactcctggttggtaatccctatagtcccggttttctaaccgggagtaaaaatacgggactaaaggttttttttctttttttttctattttgtatatctcacgcacattatctcacatcattcacaataatatagttcatcctaaatcattcacagcaacataattcattctaaatcattcacagcaacatatttcattctcaaaatcattcacaacagcatagttcattctcaacacagatcgaatcacacattcaacacaaatcgaatcaacacagatcgaataattcagcacaaatcgaatcaacacagatcaaatcacacattaagaaaaaagaaaaaaaatacgtgcagccacgccgccctccaccgcctatcgccgcaccgccctccgcgccggccgccgccgcccggctgcctcccctcccggatccgccgtgcgaggccgcctgtgccgccgcctgggcgcatgagaagtggggaggagaggggagggggcggatccggagaaggaagaggaagagatgcggtgagtgaggagaggagaggagaaagagataaaggtgagagaggaggagatagaatttattaactgatcccatgcgcctcctcctcctcgatctcgcgcgcgtgcacgcctcgttctctccgcgcatgccaatcttttttcccggttgtttaacaaccaagactagaaatagatctttagtcacactaaccgggattaaagataacagagggtctgacaccgcttgcctttttttatccgggactaaaaatgatctttaaggttggtgttaccaaccgagactaaagatcaaaaggtagctctaaccttttgaaccgagtctaaagatatctttagtcccggtttttattgtaaccgggactattgtggaatttggtcgaccgaccaaagatggtttctccagtagtgtgattagtgtgctaggatctttctgacatggaccaataactccttcgcatggaataagttcaagactttgcggggaggtccgtgtatccgttggcgatccatttgtgtaattaagagcaaggctaataatatagccgacttgttaactataaggttctttgtagccttctctcagcccacccatataatagttagctctttacgattaatataggacccacttatctctctcacagagttttttggtttttgtgtccaaaccggctataagtttacagctcgcttctcctctctcttctctcttctcttctacacctcagcatttagtcggattatagcctccttattatacttgctctaaggataggccaacgtgagactttggtggatagccttgaagatgctcgaaggtggccacgtgtcctctgcacgggtgcacatggctatctagctaattgcccgggaaccatgtcgtggcaccattcgaagataggaccccacaacccaagtttgcatggaaactgccaagtatgtttacccaagacacggtcaactggagttggtatgttcactcaagaagaaggtcgatcttcgcacatcctagggtgtgtttgtataatggaaaatgaggaatgtaattaggaatgagaaatgaatgaatggttatgattaaatagaagaggaagaatggatggttagaatttagagatgttttggtgggtgggaaattatttccctatcccattagccaaacagggctagatgtctcgtttcaggaatcacttgtcagctcggtaaaggctaacgtggcgtttcttgaagaacggtggaggcacatcctacggacatcacacatccatcatatacgggtggaggcacatcctacctctactaaaaaatgatttttcatggcgtcaccctataattttcgctggcagttatacgtgaaaaccgctactaaaaatgtaactaggggtgaagggttacggacagccagcgaaaatcggtttttgcttttcgttggcgcccccactaagaggtccgccattaaaaataactctattttcgctggcggctacgctaagagacccactataaaaaattgggttttcgctgacggccgattttcgctggcggcagctaacttacaccgactatgaaaaaaatattccctttattaaaatcttttccaattttatcccttcccattcaccttttccattccttcttttcctcctgcagccttttcacctcctgtcctccttcagcctttcctcctcctttttcttcaccttctccttcttcttcttctgtgtggagtaggaaacccgcgcggattaacgaccgtgacccgcggcgcccggaagggcgcctgtgtatccgcgcccggaaaggcgcacgcgcgcgggcacggctgtggggtatccggccaccgcagagccgcgggcggcggatccggccgccggagggccgcggggagcggatcggggcgcgggcggcggcgcgcggctgatccgggcaagggcggccgctttcggacgccggcggcagtgcgcggcggatccaggcgcgggcggcggctttcaggcgctggcagggaggctagatccgccgccgctagatcggtggcgcctggccggtggtcaccggggagctgcatgctagctgcagagaggaggcacgaccgcacgagaggatcctctcttcagttcatgcgtttggttctgatctgtttgcacgtggtggggttcaactgctcattatgtttgacgtttctggatcatcattttcttctgttcatgtgctcattttcttccttcgaattccagaaaccatttctgcagcggggctctgtgcagcggcggaggccggcggggctcggcagcggcctcgtcgaggcggaggcagtggaggcttgaatgcttgaatttttttgatgcttgaatgcttgggggaatagaaatttttgactgtaaatttaaattgtgcttgtgtgaattgaattttttgactaatttttgcttgggtgaatggaaatttctgtggatttttgaatggtggagcgttgattttttttttaaacttggccaggattaacactggcggctgacacagtgttacccgccaacgaaaaaatattttcgctggcggccatcttaagccagccgccagtgaaaatggatctttgctggcggttgggcttaagacaaccgccagcgaaaatgaattatcgctggcggccaaaaaccgctagcgaagattgtgattttcactggcttttgctttgtggcggctcaaaattccaccagcgaaaatctaaaatggctgccacgaaagatggtttttttagtagggtacggacatcacacatccatcatatacggtgtgtcagttgctaagtttgtccattgcattagggtattgtccttcagaaacctgaacatgtatacttctttctttgctcccgagcacttatggggtagaccgtaccaaggtcaccgagaacccaggtcgatcacagttccatggtttcctttgtttgttggaacacagtacacgcttatgtaaacacgcgtacatcacatatataaacacacatcttataatacgaattcaatgcaaacaatcgagaggagaaacatgccacgtggcaactccagtttcgcataagaggctcgacgaaacgatgtcgcgtccgcgagtggaggcatcgatgaaacgctcttgtgcgcatgcagcaggcctccagaaatttctccgtaatcaggtcccaatgggccattgctcggtagcccatgcgaattatgccgtgtgatgattctagaaagaaccggcgccattactatgcatacatgtagtgcaaacacccggtgtatgctgattaatgaactgtaccggctgctgacgttgatttctcacattgcgccgtacgactggcaaagcccaggcaagcaggcagctattgcttcctttcaccaccaaatcttgaggatcaaaggagtaaggccctctttatttaggtttataagctaatttataagtcgaaaagtctaagcctaaacaaacaagcagcttttcgtttggcttttttaaagccataagccactctaacactattaagctaaaagctaggttggagaagcttttttggcttatgtgaggtagatgtatgactcaactactaaacttaggacattaaatccaccggcttataaatcatataagccaataagctgacttaaaaatctaggccaataagcctaagcctaaacaaagagggcctaataatactacctactttagttagggttaaaataggattagccggatgtaattaaatcatccactaaaaaaatcctcaaacatcagtctttttaaactttctatgtttttcatttatatgttttacacatgtatttatgcgttttatattccaaatgttttctttcatatatattgttttcctgagttccaaacatgtcttaggctatgtctgagaggagaggaaaaaaataagacacgtaaaaagaagtatgccattatcgcttcatcaggtgatttaggactgtttaaaaagccaaggactgtttcaaacatgaaaaatagaaatatgattattttaaaaagtaacttttctacatatagttttatgtaaaaacactctgacatacgggtgaaaaatgatggatgtttcctttgtttgtcctttgtcgaatgcagccttagaacaagtacaataaaaagcaataagctagctatagaacaacgaaggagagtgaagaaaaatggactagttagttgcagcacgagctccaatatagtatgtgagaagtaaccaccccttgtgaaaggggtaatctcttcacgaactccagtaaaggaatggtgtgaattggatgaaaattggagccagtatgttagagacaatttattacatatgctacatcttaattaattagttgatgatgtgaataaattggtggtctcaatcacctctactataaaacttactcataaaatttgctcttagagcaaaaataatagtggtctataaacttacgtatatgatagagattaaaatatatatatagagagagaggattggctttcgataaaatctagctctacacatgttttaaggtaaatacattaaattcttgtaagtaagataaagagaggaaaaagaaatatagagacaatcttatagccaacttataagctctaatataagtttagttatctctactattaatctggctcttctatatatgtgtattaatttgttacctattcactaggcctaatgagccaggctcactgtaccacacgtggcaaagccgcacgctttttctagtgtatacattaatcatatgagcatcttagtttatatttggttaaagggatatccctggataggagatgatccagttttttggtatgtttggttggtggacaaaggtggatagggtggtccaaagaggaaataactcacacatatgttggatgagcgtatctgaccaaattggtcggatgagaatatccacctttttgttaatcttaatcattagtaattgattaacaataattaatgtaatttattgataataattaataattaacttgtcaaaatcaagggtaattagacagaattagtctattttgtttttaattagtatagactatggctacattaatgataataacatattttagtattaattaatataacattgttttccttctcatccatccaaccaaacaagatccacccaaccaaataaaaaataggatcaccatcagtggcgaagccacgttgaagctagcgggtgcacatgaacccactaaatttagaatttctcacttgaaaacactaaaatgcacagtattacattgaaattttctagatcttcaatggtagtgtccccttgttttgatgctagcttcgcccctaatcaccatatccttacaaatatgaatgaccatatcatatctaacattctaaccttagaccacaagccaaacgcacccttaagaaaactagatcacattgacaaaatcctcacatatatctcaccattgatattgattaaccgcaccaaagttgtctttataaaatgtcatgtaactacgccattggaccataaatattttatgtttataataggttaaacttttatttttttattatcaattttagattaaaatgtgttcataaatttaatgagttcatcatgatgatatatagtacttttttaaaagcaaacacaccttttttttataaacacacataattgtcgttgtaacatgtaagagcacccgcaatgctaaagtaagatgctctctataaaatatgtacatctcagcaataaactagattaatagtaaaccacctcaatagtatgtttagagcacccgcaatggtaaagtaaggtgttatctataaaacatgtacatctcagcaatagactagattaatagtaaaccatctcaacagtatgtctacatgggtatctatagctctctaatacattgtctcgtttttctctatagactatctccaggttagtagatagctttgctctctctcttcatttaatctcttccaagtaggaaaatatgctgacatggatatcttatagagagcctatagataaccattgtgggtgcccttatatgggtatctataactctttaatccattgcctcgtttttctctatagactatctccatgttagtagatagctttgttctctctcttcatttaatctctttcaagtaggaaaatatgctgacatagatctcttatagagagactatagataaatatctatactaatataaaaaggaggagttgtcccccaccaatgcttcaggccaaatcatcccccaatcatctttgtcctcagccgtccgatctgttgatccaacggcgaaatcaccgattccgccatcccaccaccacacaaatccacgcccgcactactgccaccgcgctatctacgcccccacgctctccccgcgcgatgactccgccgccgcgcctcctcgcgctgctcagatgcgcgctgcgcctcccgacgcttcctcgctccaggccgccgtcgtcatcgcacggtcccgacccctccagtatcccccccatcccgcctcctcctccaccgcgtcgccgatggctccatgtcgtcgtcgtcgtcgcgcggtcccggctggctgtccaccgcgccatcacagatccagccatccctcataccggactcccccatcctgacggccccatcccagcggcgaggaggcgtcgtcgcgcgggagatgactggtggggagagtgaagagggagaggcggatggcaaccctccctctgtcacgctcgctctccaatcccccttcacagtcgagccctgcgtcgtcgccttcccccgccgatgccaccacatcaaggcacctcacgcatggagctctttccccgaagccggacgtaatggccggtccctcgctaaggcgcccagcagatccggccagttgcctcagcaacagagagtccacggacttctccactgctctgtaagaggatctggactcttctgccaacgaggccactgtctgatccaccatcgtaggggattctttccgttccctaaatgcaccacatatcttcccctccggaattttttttttcgaatgaaattgatagaataccaatggctgttgcaacaaggtaatttgccctcaacctttagcttttcaaattagaatcaatttaattacttctttgtttacgcacatcattttaccctaaagactgatgcttgcactgatgtaccatgttgtcatgggggatgatctagacgtgaggactggcaagccatctcttgatatgtttcttgctgagatgaggaggttcgaggtattgccatgtaagtgctcttacctataatgttctttatactaaacacaatattataattttacctggcacaagtgcattgcatgttgttcgggtcaatttggaaccagtatttcaagctccttcttctgtagcagcagttaaaaattgctggaatgtgacttcgctcctcctcgctcgctcgctcctcctcgctcctgtgtactgccaccgcgccgccgcatcctcgccggagccactatcttctccatccgccgccggagccgaggtccatcttacagtttaattcctcactgaatgttgactatccctgccaatcaatcacacgattccctctgaatgctaatccattcaattaatttcctggactggtaatatctctcccatagtggggaatcatgtgtcttttgtacaaattacacaggttattaaactggattctccatttcactttagaagttgattttcttgctttcttggctatatttcctgtcatcacatcttacatttacaagtaggaatgaaatgatggccgactaccttcttgatcactgcgatgtgccccttcgcttcaaggatatgcataaatccaaggtgattctcatcttccaaatctttatctcgatatttcccctaggaataaaagattccaaacccatattcacactatttacagtgagcattaggatcattttatagaaaaagatatcgaggtgatctagaagttattatacgttaggtctgctgcttcattataatagatcatatgtgtatttctgaatatatcttctttgtttggtttttcccagtccggcactctgctagtattctaggtaccggactgcaacctgtaatattattttgcggtgtactgattgggtggttagatttcaaaagcaatttcaaattatctgtcctgtccaactattgccagattacccaggtgccatgtacaatactatttttttttaaaaaaaaagtggcactcaggaagtttgagaaccagtatgtactcctaccaatgaatatcacatcatggtgtttcaggttttgtttaagtttggaaagaaaatatacataatttgtggcaaataatgttcagatttgcagattaacatgctaccaaggtcaaaactgtatgtaatacatgcaagtgtcagattttttttgttcccctactttactaaaactgtaaattaggtttacaacgtgtttctgatatataacaataagagaaatcatgatatcgaaaagtatctgttaatgctataaggcatctgaatatattggcttacttctattgtttataatacaggttgacattgtggccaactggagattttggtaaaatcctatcatgtttcaccatggcatttcactgtttggcgcacggtatttaggagctatttgtatagtaaatgctggaatattgaagtaaattatatgttcagcttattaactgcattgcgataagctttgatctagatccggtttcaattttcatttgtgtggtcgcatcctttaatttatatagcttcataagagtatactccgaagtacatgccgttttatgtatttttatgccttcatattctgattgtctaatggctctaaaacaacagacgtaaactacgatgtctgaagttttccatgttttcttccttatgaaaatgatatggagctgtggcaagctgctttggcaatccctgttgctgtccagagtaaagattttcatgtggcttgcgctaaagggcagatgcctcatggctgacaatctacagaaaagaggtggcctcatcaggcgaattgttccctatgcaacctgacatttcaagatgacacccaacctttttgttcaatgtgctttcacaaacaggatttggagattgctcaggagctaggtgaatgttggctttccgcttcccagtgacctcaatgtagacttggctgattggcggatggcttcaaggagaagcttcagagattatctcagaaaagttttcggtacactcttcttcagagattgtctcagcaagttgtatggttgtgcagctctttggtgacatcaaagaaatcacaatctggagggaggcaggcttcatggtaggcgaaaaacgattggcattattccttttgcagttttttctctcccactctttgtaaccggtttcgacaacttcgtgtggacgcttagtttgtaacaccatctcataatcttaatgaatttgcttagcctactcttgggccagtctggctaaaataaatgtaatcagagttatacttcatttgttggaaacataacttgtaaaataaaactaatcatttttatccttacaaaaggctgctcaatgctgcaataatttatgttgaaaaaggaagtggcaaaacagcatgtcttttgctactttgttctgtctgtttttcttgaagaattctctaattttattgtgattagtcttttgaaaagactatattaaagaaatttcttattttgttttggttatttctatatgcaaaaattaatagctctataaattcaatagttgaagagaagcaatgttcagaaaagttgaatatgcacttgatatatatgtgttaataaattacctttcaaagtatgtgtactttctaatttttaaatgtgactatatattttttatatatattatgacaaacgtgttttacatgtgcacgataactagcaatctctaaagtaaacgtatattgactaagaatctacgctgaatggctctattttgaaacgtggatatatgactatatgttacataggagttacaaggaaaacgaaagaaaaaaaaagacgcagcgttctagaaaagtgtcatcgagcccattggttttgtcgcaaaatcgtaaatgttattgccaaatgccaatcacatcgtggtccaaagcaaaacacacatttctgcgagtactttaatcggtgagcccttgagacgttaactacacgaaacacacatttctgccgcccgacacttgccatggaccagatgaccaaaaaaatgaagcggttagtgtggtgcaaacaaaacaagccgctttacatgtgtttcaagactaaaagaagaatagttttgtgcaagactgtttacgctttcaaataaagacagaagcagtgaaagtgctttgcttgcagagaattgaagaatgccctagcgcgaagcagcgcatgcggcatgcccccaccagaaaccggaggaagaagactagcaaagccggatcgagatcaactgcagtggtaatagcgactgcaactttaaccgttgttgcgtgactgtcagatcaaagaaaatggctcagattcggtcagggtacacagtcgtgtactgtaaagctgacagcctggttgtgtcgtggcgcagctctctatcgttcatcagcttaatttgatggttgtggatgatatgactgtttaacgtgcacccgacctggccgcgagcacacagctttcgctgcagtttccgtccgacctggccgagaccggccatcgaccgctcaggcttggataaaaaagggccggacttgagcatcagcggcggcagagcggcaaagcgcccacggaaacgatcagcccgtacgtgcaaattgtgcaaaatataaatcggtcatcgtccactcgtcctatcgagacggccggtccagggtggcgccctggcgggcggtcatgcctccatcaaataagcacagatgcctatcttgacagaccgtattagtatcgcgaaccatatgtgatcctcatactaccgcatatctgtatgcgtgcactggatcagtgagtggctctgtgtttataacttagggttgggaacccatctcatccgcacggaaaacggaacagttcattagggcgtgattaattaagcgttagtttttttaaaataaattaatttgatttttttgagcaacttttgtatataaattttttttaaaaaacatatcgtttagtagtttaaaaagagtgtgcacgaaaaacgagaaatttgagttaggagcaccgaacacacctagtaagttccacgccaaaaccggaggaacattcgtaccacgcgtatgatgctgaatcctcacgagataattttgccgtacgttttactcgcaagtgcagtgcttctagaacaaagtggtggctctcgtcttcccgacagcgacgcgcacagtgataggatcgtcaagcacacaatcaggcggccgcttgtactgaaaaccggacgctttgctgcgttagcatcgccattattcggaccccgcgcgccaaccatgtggtgtcgttcgatcaccggccactgtctccgcccacacggccggagagaatccctcgccgcttgaaaaaaatatctctattccccccggtattgatagctcgcgagccgcgactcgcaagtcgcaactgaccacaggaggagacaaacaagacgcagaccttatggaccttatgggtgatgatcttatctgattcgactagtcgactagtcgcactgattagactccccttctctggtcccatcgtcgcgttgtttggcggcatcagcagttacccgaaactaattattgcgaacacgacattattgtttttctaaaacaaaatcgagatcgcaagttcgcgacgaacgctgatagcttcagttcaggcgcgccggtgcaacgcgcaaggaaggataacccttgccgtcgcggtcgtgtgatcgtgtcgtgcgctgcactgcactgcactgatcaggtcgcgcagccgctgacgtttcgttgtgtcggctccacccgtttgggtggatcccttccgaattccgatcccattggtcattgaccaccgggctggttgcccgcactggtcttgcccttttaagcgccggcgcttccgtggttggctcgccattccagagctcgaggtggagatcgcggggagaggaagcgaaacaacgataggaggaagcgagacaacgagaggtggtttctcggttgcgggtgagtcgtgttgaagtgagctatggtggcgttggagatgtgtgcgggagtgggagttcggggtcacgagttgaagcatgggcggcagcggcacgaggaggtggggagtgaggtcgcgggagacggcgtggcgtcgctcggggagatggacctgtacggcgacgtgctcgagtcggtggtggagcgcgtgccggcggccgatctcgccgcatcggcgcgggtgtcgcgggagtggctccgcgcggtgcgcgccgcgctgcggcggcggccccggcggctgccctggctcgtggtccacctccatggccggcggcgccgcaccgcggcgtacgacccgcactcgggcgcgtgggtcaccgtgccagcagcgcgccacgacacgccgtcgcacgtccgcctggtgcggggcgcgggcggggaccgcgtctgcgcgctctccctctccgggctcgccgtgtccggggaccccctcgggaaggacgtgtgcgtcgcgctgaaggcccccggcgtgtggcgcgtcgacccggtgttcgccgcggtgggtgaccgcgtcgtcgccctcggcggcgcgtgccagttggcgctgggcgagggcgaggacgcctcggtggtggaggtacacgaaagcggcagctggacggcctgcggtccgatgccagccgagctgcgggagtccgcggcggcgacgtggctctcggtggccgcgacggatcagcgagtgtacctcacagacagatccaccgggtgggcaagctggttcgatccggcgaagcagcagtggggacccacctgccgcctccgccctgacgccaccgtctccacatggggcctcgcccccggccgcggcggcgccgagcggctcgtcctgttcggagcgaagcgctgcggtagagccgagcaagcgaagagcagagtcgtcatccaagcgtgggaagtggacggcgacggcctcgcgctgtcccgtggcgcggcgcacgacacgatgccgggggagatgtccgagaggctgttcccccgtgacgaggacggcgatgaggaggacgaagaggagatgtcgccgtcgatcggggtgtgcggcaacgccgccggagggtacgtgtacaatgcggccgacccgacaatcggagccgtgctctacgagctacgtgacggggtgggcagcgccgtggagcgatgggaatgggtgccgtgcgcgccctcggtcgaggccgagccgttgggacgcttcatcctcgcgtgttcgccggtggggctggacgagctcgcgcgtggtcaaccagccgcatgtacaaccgcacagtgaactcatgactgccgacgcccgtccaaagcaagttaacctcaaaggttgcttttgtaaataaagtcccgcgcagtagcacggctactcgctagcgtacataaaaaattatgttaaattttctttacacatgattttcttagaagttattaatagttatcccgttggcttataacattataaaaagtcaaatattggtttccaagtcaaaccagccaccatcttttactcttcttctcatgttacccttttatttactcgtgcgatttgtcacaacttttattgacttttcatgagaccattaaaaaccgtaccttataacttttaccgttcattgtatcgttaacgttaagttcccttttattgtttcgagaagtcccatcaaacgattacattatactcatttatggataacccgttatcttttttttattattatcattcagtttttaaaagttgaacatgttccttactttactttctagaagttctgctaaccatcatgaccctactatttatgtcatatctatctcattttttcttaatatcattgggataaaaaaaaataggcctaactatcttttttttttggagggggggtttatagtttttatatttccattattcgtcacgatactacttttacggcttgcccgctatcctctcccttactgacattttcccaccgttgtgttatatagatgaactactttgaatgttccttgttttcctttatttctacatgtatttctactttgaactctgaatttttttttctatttctagtttaggaatttattttttttatttaaaattttggttaatcatgtgttgtgttctatatggtatttttttcattatttattatttttatttcgaaattcagttatttgtaaattataattatacttgatgcttaattttattttttaaattttgaatttatcttattttctatttgaaattttaattaatcttgtgtcgtttctagatgatctctccttttaatgtttcctttttttatttctcattttagttatttataaagtgtatttttacttgaactcttattttttatttttctaatttcataatgtattttttttctgttttttaaattttagttaatctcgtgttgtgttctaaatggaatgttttttttcaatatttcttatttttatttataatttcagttatttttacattgcattcctatttaaactcttcctttttttccctaattttggaatttatttaatttttaattaatctcctattgggttttgtatgaattgttatttcaatatttcttatatttagattcgaatttcagttatttctgatttgtggttgtattggaacactctttttttctaaatttggattttattttatttttattttgaattttaattaaagttgtcgtgtgttcttgatggacagttctttcaatagtcctttttttttatttcaaattgtatcttacttgaactctcttcttttttttaaatttcagaatttattttattttttatttcaaatttaattaatcttatattggttctatatgtactctttttccaatatcacttatttctaattctaaattttagttttttctaattatatttctacttaaacactcttttttctgcaattaatgtgataatttatagcgttcatggtgaacatggtgaaaatgtattttaataatataatagatgtcgttccattgtgaaaatgtattgctttgctgaaagttgctgcagtgttttgcatagtttcctcgaactcgaacctctctgccatttttttcctctcgttttttttttcatgttgaacattcgtatagtgacaaaggtgagggtgttcctttctgtaactttatttaagcaggaggtaaagcagtgaagtgacatatgcattatcttacacattattgctttcatgtgttgggcactaaaatctcggcttcaaagttaaagtcttggcaatagtgactaggggggaaacaatataatgataaagtttggaagactcgattaagacatatactaactcctcttttactgttatttcacagtggcatcgggacagatcgggtgcatagatccgatctttgaccagtgttttgtataggaagacaagtccattttaacaaaccacccacccaacccccaaatattactgttgtctaaaacactttcccaaactttaaaattggtcatccaatcttaactatcaaaatcattcaatttaacccatcttattccaaatcagccggttttcgcttgcgtagcatttgacatggcattcccacgatgataatggtctctgcaacaacgatgacttatgccatgtgggattggtgattttgggtttttttttcccatgaatgtggatttaggattttggggagattttgcaaatgaaaatacaaatttgggtgatgaaaatccttatcatatgcggtcaccttaatcaccctgctagtgaatttttttcattggtggacgtcataagctagccgcatgtgaagaatatatttcccaggcacagaggcatccgtcagcgagaagtttgtatttttcattgacctttggttatcggcggcaccgcggtcgctaacgaaaactcattttggacgtcagtgtaaacacattttgtagtagtgggaggcagaagaagaggtgtttgtcaccgatatatgggcctgtgattattatttttatttcttgactaggcagttacatcagctcacgtaggcaaaaatcggtgaaaaccgttttgagggtaaagtaaatggcattaaaagtttaggatgtcaaataaccggtttcaaagtttaggagagtaaaataccctatcgaaaaagaaattgcaatagccattgaaccggtatcaattccacatgtggtgctcgatgtccatgcaaagtgaaggctgttttatcgcgaatattagtgaatgacctaatatcacataattagaaggggtgaggcttcgaacccaggtcgtctagcccaccaccttgtggagctagccggaagacccctgtgcgtttctctaaaggttgttttatcattctcctgagtacctgtgtaacaaccacttacctgtagtgtttaattatttacagacttcacagcgcgtgttgtactgcacactggactctaaatttctcgcgcgcgcacagacagtatatataggatattcatatgggactccatggtgcccgggctccaaggtataaaacacacaaattctctcaaatttttaaaaattttcatatatatatatatatatatataatatgtgaactatcacactatcacactatgtgaactatcaatatgcctgcacattatcttattcgaatgtgtgtgtatatacactacgactaatggtaaataatactccgtatgcgactagctagagttggcgaaacaaaagatatattagaagcaagttactaccaactatctgacgagaaaagactgttggaacagacaacacaccatccttattctaaagagcaaaaattaagccaagcggttgctaacgattgactaatcggtcattatatctgcgacagtgccaccaggtcgtggcgtggaataagttcattacaggtcccttgacttgaaagcaagttcgattttcgtcttcgaaccataataccgaatacaacagatctttcatttgcaaagattggtgcaatattggtctcaaagagacggtttatatggcggtttcaactaacctagcgcccacgcaaacaatttaacttggtctttatctgatgtggcacatgaagcaaaatttaacaattcaaacattaaaacaaaaattgtaggcccatgtgccagtcaaacaataagattaaaaattaatattacccacatattagtgggcccatttcctccacctaatcccttcctcgacatgtatggccacgcctctgcgctccccattacctgacgcctaccgcgatgccaagtcctccctctatgcctccgcctcccctggcgacaacttcaagcacatggaggccaacacctagggcgccgctgccgacaaccattgaaaggagtcgtccgactactgtaccgccgtaccgaacccttcccccacgtcgacgacttcctctcctccccttgtcgacgcaccattagcagcgggcgcttccaatgtgtcgaaggactcaactaagaaatggtatggacttgtggtcggtgtggtaatcgttgcatcgcagcagggtggcgatctaccgtgccatcacttagctcctcaccggtcaagaaaggaagcggatcgagcgcttcaggatcgagctctgcgttccagatccaggccctatcaaactacgctcctccacttgctcggcctccgcctggccgctgggaacgatatccacaccctcatcactgatatggatgctgacgacaacgggaccatcgagttcgatgagcttgcctcctcccgccgcgggcttgtgctacacccaccactgcaatcgccgccgccacctcactcccactggttatgttgccgccaccgcaacagtcgtagccgatgcgctgctccccatgccgccacgcatcgaccgcgccacacggcaccctagggcgccgcttccgtgtcgtgtgccggaagcacacaaggacgccatggctgcctcctccgtcgctttggaggaggaggggagaagtagaaggggtggatatagagaagagagaggattatggtgagggagtgggcccactgacatgtggtctcactattttttaatcttattgtttcactaacacatattgttaggtccacaatttttgttttaatgtttaaatttttaaattttacttcatgtaccacgtcagatgaatgaagaccaagtcaaattagtcacatggacgacacgttagctgaaatcgcttgggacaaatatttcatttgttttgacggttaaaggacccgttgtatctgatattatggttctaggatgaaaattgaactccttgtcaagttaagagacctgaaacgaacttattccttatggcgctgccattgtgggtaataggcccagactaagccctttgtgtagtggggtgtgggccagtgcggcccattaacgttgaggacagggcccagcaaaagcaacttgcatttccttctttttttcaggcaagttgccgagttgggcgctgcccagggccaacctgcggacctgcttggaaccctagcgccgcaatgcaaagagcaaccgttgcctcagcctccctatataagcagagcacaagccgggggtcttcaccacatcccctctgcttggtcattttcagctatgggtggtagcattcatcttggtatcgtcctgcagttcttagtgagaaacaggtcaaagctctagatttgtggctcctggcttctattttacttgagtttgctctcctttcttgtggctcttctgttttgtttttcttttgatttttattaagctagatttatcatgatttttgctgtttcacggtgagatcttgttgtgcttgtgtattctggtgcaaaatcttccaatccggctgcgacaaatctcctttgggcagcccggccaccttttgcacagaaggatgggctacgtgtgttaaaacattagtggcaagtgctttgcctcatttccatcgtggaggattggagttcatctgtttccagtcctcccaatggagcaagcgcacatcttgtcttgcatcccttcaatttctgtctttcataggagtatcacttctgagatctgatgaaaaaagaaacctttctgccatcttttgagttttccctgcttttctcgtgaaggatggtttatctctactccttccgtccaaaaaaaaaaagtacttatctttatatctgaaattcagtcagaggtcaggaaaactggatctgaggtaatgttcgtacatcagtggaagtaaaactgtggcacagtgcagctttgacaaatgacatggtccctcgtctggaactattcaatcattcaaatactagtactaataaaaaaggaacatgtaattttgcgtgatactactaacttgctaataacatgtagcaagggtttgatgaccaaacttcataaggaaaaaaatttcatacgcttgcaaggagatattgatttgcataaactgctgttccgcagttgtcaatagggaagccagcatagcagccacatatttccaaatcgctttataagttacatacaactaatgaaaatcttgcttgcgtctaggctaattagatctatacaaagggtaccaaatccccgagtcccagagcaatagagcatattcgcgcagaatatgccttttcaatctctgtcccaagatccaaatcttcaatgaacctcccccactcgataaactaaaaacgtttgactctgtcagaataagcaaattgtgacaaaaaggcggctgcaccttggccgtgtttacatttaaattttcttcaaactttcaacttttccatcacatcgaatatttgaatacatacgtggagcattaaatatgaaaaaaaaattgcacagtttacatgtaaatcgcgagacgaatcttttgagcctaattacgtcatgatttgacaatgcaatgttacaataaatatttgctaatgacagattaattaggcttaatagattcgtctcgcagtttacaggcggaatctgtaatttattttgttattagtctacgtttaatacttcaaaaatatgtgtccatgtaattaaaaaaaattgacgcacgcaactaaacacagccgtaatcgagggctgtaaagtttacataaacaggaagttctccaaagagaaaggacagcaggaaaaggctacaacatgctgactgagcctatacttttctatttgcaccatttgctctgcacgtcctttggtggagcataaatgcattttcacaaaccaggccctatttagggcgtgtttagtttgggaaaagaaaatttttaaatgtcacatcagacgtttgaccggatgttggaagggattttcggacacgaataaaagaactaattttcagaactcgccggaaaactgcgagacgattcttttgagcctaattatgccatcattagcacatgtgggttactttagcacttatggctaatcatggactaattaggctcaaaagattcgtctcgctatttcctccataactatgcaattagtttttctttttatttatatttaatactcgatgcatgtgtctaaagattcgatgtgatgtttttgggaaaaacttattgggaactaaacgggcccttagattctaactttttttcttcaaatttctaacttttccaccacatccaactttcctacaaacacaaacttacaacttttccatcatatcgttctaatttcttcaaacttctaattttgacgtagaagtatacacagcctcaatctagtactcaaggtttaccaactggcttgtggaatcccagaatttgatccacaagaacacgttaacacgctagccctacgcccctacttgtacagtgcgggcagttcatctctcttgcagtttagtttcactgtagttcctaccagttagtttcactgtagttccccaaatgacgatgcacacggtttaatccctagaccaacagtaaactttgcagacattatcaactgggcaactggctccaggtaaattgatttacaatatggagactgtacacataattttaagtgctacctcagctgatagaagttaagggtctggaatgtctgaagagggaagaaacctcattaggaaactcgatagagaccatacgcagataaccccaagaatctggaggacagtcaataatgctcctaaggagttcatgatagccaaggtttggtttgttgcctctgttcctctaacagaaaaggtgagtgctgtcaccagctgagctgccctgttcagttggtgaagcctgtagatctgcaaagacgaggaaaagagtaaatgacatatgcttagaaatggagcagttcacgagacaaataacatcaacagatatctaattgttcattatctgcttttactgtgcctcttaagcgattcactcaggcatcttcaagacgctcgtgagacaaacaatatcaactgatatttaattaaccgtatagtgagcttcgttccagaaataatcacaaaaaatttctttaaaaattgtgaagcaacctcctggttcgtttgaatgaacaagagcaaaatagatggtctgcaactctgcatctggagatacaatggacaaaaaataaagctgatacaaataaaagagtgtcaattgtaacgtgtaaaaagatctgatgcctgcttctatatatgcctatgtaatcggattttttgtgatttaacacactgcaacatatagtttgggcagactgaaatcacaccagtgcacacttgattataaggaaagcacaatggattaagcttttgtttcaggatccaatagcaccaggataaatataagcaccaggttaccttaaagatgatagggataactggccaagaaggtgatttccgatgccgtgcatactgctcgaatgcgaattgtacaacaagaccaaccagataaggggcaagagtagctgaagctgctggtccagtccagggccagaccattcccatggtcaaaagcggtatcatcaagctcaaaaccatcgttgttactgaagaaatacggaaaaatctggattttgaccagatataactcttaggagctacttgctgcaaaggcctccagactttatcaatcaacaggacaaaaattgcgactcctccataaaatagagcctcggtaaagaatagtataagaaaatctgtaagcaattatgaaaaaccatcaggttatgctgccatgcttaggcttcatccaaatgtggaatgggaatcagggacatctagtgtcttaagatttaagagtattagtatatacataaaaatctttaactaaagaatgctgcacatagggttcagtttaaacaaaaaatggaactgttatgagatatgtttgaatagaaaaatataaatttaatgtagaataacctattgtcaatcaagcactaattagtcatattccttctctagagtagtgcaaatacagacacatgggatatgctagtgctaaccaacacaattatcttgtttccgtcaactattgaagtatcaaagaaagcatacctgtcaacaaggaatcctcaaacacagctgagagtactttgcgcaagtaaagcgatggaagaaccaagaaggccacaaggatagttggaccaacaaaccaaactaatctagacgcttccttgccaggatgtggcacactctccacacttttcatctgataactactgccttgaaatgagatgaaccctgattttccattacccctctcagtaaaataggaggagctaccagacgcaggggaatcctcagtgctattatcggtctcttctaccggcaacgcatctgtggtaggtgaagtaattgactcctgtttgtccatagcagcgaaggaagtaattcgcttgatatgaaaccttccatcgtggttgccgtatcttcttaaagcatgccctgtttagcatgtagaaaaactaagcacaaacacagcagctcaaattcaatagagttttatggaaagtagatggtccaaggggggaaaaccttttagggcgtccaagtgctgcattctacccccatttactctctgaattggcaatgaccttgcaaactgagagataatccgtgttactgctatgttactaaagctacatcagacaattcaccatctcttagtggtcacagcatacagaatagcagacgtatatggagtgatagtgatctttcaaaaccaaaagtatatggagtaggcactagttactgtgaccattcttagcaatttcaagtgcagtactgcagtatccctgaaattatctgccattaatgtattatgtatcccctctgtgggcgactcggatgacacagcctcactgcatgatgccaccacacgcagggtagatttttattatgcctttcttttcgaccgggatatacacaaccactcacgggaaattctaccggcggccaattaaaaccctgcctaatccccaacccaacccaggcaagcaagacaaccaccgcgtgaaattctataaattggctaggggacctacttgccttggaatacgagtaagcggaggagctgaggcggcagcgaggaggcgacggcgcggcggtccgggggcggggcctgagccggagggcggggctcgcgacggcggccatgggcgcgggctgtctctcccggcgtggcgttatctgtagcagcggccagtggccgggcgggcgggcggctggtgtggggagtcggggagggaggggaggccgggagggcagcgatggtggcctggggaggcggacgggcgcaacgcaacgcaggcacgggacaagtgcggtgtggccggttggtgcgcgaacgtcgtcgcggactcgactcgcggtttgctcgcctcgcttcgcttcccacacttgcgctcaccgcctcacacgcacacggcaggcacggcacacgcgcacggtggcatcgtgctcggtgtttctgggccaagtttgcaccgcgcgatggggtaggccgtgtggaacgcaaatggtggctgcgctacacttgggctgctattccatggtttggtgggctctgattatcggtctttcgcgtgtgtatgggccgtatggcagcttagaagagaccttcgtctctctctcaaaaatgagagagtgtgcgtactggagttttacaaattactccgtactgtactacaatagactgaaatacaaagaagaaaaataattgagtattggttgacggacatactatcctactaatctactattcccttgcacgttcatgtgaggtctatttgcacacgggtttgttttgataatgctcatattttgaaactggcacagatccgtagattctaaactttgtgtatatattcaaactttaccatggatttcatagatattcaaattttgtacgcggttttttgagcgacaacagttgcagggtgttgactgactactgagtagggcatgctatgtacgtcgagtgtgaggagggggattgtccgtcgccaaaatatcacctcaactatgccgcgagaatgaagtcgcgctagttattttatactactcaactaaatcaaatgcctctctaatggtcatttagatgacgttttgtccaatactttaatttggtataatgatagtcctattttgaccgaacaaaagctgaagcttgacactgttcttcagacttcgaaagaatctgcagctcataaagccggagcactttcacatttcgagccactgttcccagcgaatcaacgactttagcaatagaaacactgataccaacatatcacatcaaaaagttttgactgtttgagtatgagtatgattaccatcacaaaaaccacagggagcaaaccaccaacaagcgccgatccacagaagtaaatcaaacccgtatatatctggagtactagcgtatagtgcccccccaatcccaaggccaccgaggtgaccgcgcgcgccacgacacacgtacacccctcactgtactccactaagcccacgaggccacgacccacactgtgcgcgcgcgcggtcaaacgacacgtaccatcaatttgtacagttgtactacaaccgcgaccttattgtccgtggcattcttcacaccccggccggcgacgcgtcgacggggacggtgtgcctgggctgtccgccattcgccgacgacctcccgccctcgcgcacgctgttctccgcgaaccgcacgctggccgcgttgaaacccttctcgcgctcgtgatccgaccactcccggctgtagtactcctccgccgtggcccccttcctcgggcctacgagcatgccgccccactgcgggaagtagatgagcatgacgggcagcgtgcacgcgatgatcatgagccccatgtacttgatcccggtctccgtcttgtactttgtgccgtggaagaagatgtactgcgtcagcacggcgcccacgttgcccccgccgccggtcatcccggagatgagccccagcgacctccgcgacacgaacggcacgatgccgaaggtgagcccgcacgcggcctggacgaagaaggagaagagcaccatcacggcgacggacgcggcgaaggagaagtcgacgattccgagcaccacgcagaggacgccgccgatggtctgcacagtccacagcccccacagcctgccgcgcatgccgtaccggctggagagccagtcggagagtagcccgccgccggggcgggagatgatgttggccatcccgaagctggcggcgatgagcccggcggtctggaggttgacgtcgaagcggtcgtagaagtactggtgcacgacgttgtcgatggtgagctcgacgccgaagctgtagccgtaggtgagcgccaggatccagccgcggtagttggtgagggcgtggcgcagcacgttgccgaagctgtccttgtgcatgtcgccagtcttgtggagcttcccgtagttgccgccgggcatgtcctgcccgaacgccagcacggcgatggccgagaacgtctgcatcaggcccgggatgaagaaggcgatgcgccacgccgtgaacggcgtgctaccgatcttgtggatggcctcgtacacgagcggcatgagcagctggacggcgccgccgccgaggttgccccagccgccggccacgccgttggccagccccactttgggggccgagaacatggagctcatccagaactgcgccgacacgaacgacgccagcgagatgcccgtgaagaagcgcacgaggaggtaccccgacggggactggatgatggaggagcagtacaccgccggtgtggtgaggaggatcagagacgcggaggccagcctgggcccgaccaggtcgcacgccgtgcccatggccagacgcgcgaacacggcgcccgacacggacgcgatcccggcgttgccgatgtccgtggccgtgagcccgagggtgtcgcggatgagcggcagcagcggcggcgcggcgaacgtggacacgaagcagcagaagaaggagaaccacgccatgtggaaggaggccatgtgtggcctcgcgaaggagaagagccagaactccgtcgccttgaggtcggagtccaccggcatcctgaaccgcggcttgccccccgccgcctcgaccccctccacctccatcgccaccggcttagcctccatctccaacacgtggtagcaaggctagcagcttagctagtgactgtgtgtacgtacatccgctgtgccctgcgcgtcagctcttatagcatagcggaaagcgcggctccggcagcgcggcgcggcgtggcgcgatggttgggtgcggcgagagggcaaccggtggagagaaaatgaataaagatttcgggcgtgatcttacgcgaccggtgggaggccggcgctgccgtctccgcgctcgcgtcgcgggtttttgttggcgagcgggtgacttggcggcgcagtagggtcaccaagccgcaagggtggtgggccatggctggaacgaagggagattccgacctctgactttggaggtcacgtaagttccttggcctgtggaactgcctccctcctcggcacacacgaatactgtattggcggagaggaattcgtcgcggatttggattgggttcccccggaatgccaccaagtctccaactattatggcaagttttatggcagagatgactatcacatctaatattgtccatatcatcaactaatttattaaggacagctcatataatagtctcaatgcaacataaatatttattttattcactctcatccaatcaacctcactcttttctccttcctccttaaagtttgtaaagaggttgtcccttgtatgagggatggctcatcctctctctcatctactctcttctccacatcatcatttaaaattagatggcatctaggagattgtgcttaaataactatagtacttgccgttagctcttctccttctccagtctagttgacaatagtgctacgacatgataacctctgattggcgagtactgtacggataactaaactatgcaacactaacatgttggtgactttgtggtcattttaattttggaacggtgagatcagctcacgtttaacacaattatactttgagacgagctgttttatgtgttcttgtatgcctagtgcagtgaacggcctgtatcttttcatatctatattaacagtatgcctagttgcctacttcctccatcccataaaaagaacactcctaacatctcaagataatttgagtgagaagtaaaaataatcaaaatccttattattattgaaaaagtagtaacggtgataagtaagtaaaaggtatttaagaaataaaacttctcgttttatgtgttgagagtaggtgggatggtagaagttggtttttttttacaaaatttaaactgcaaaagttgattttttttacatagggagtactgctcagtatttttttttataaaaaataggatacagtgtactacttgtccttgtttttctgaatgtcaaccagttatagccgctggtttgctagaaaacagctttgcgcatgcataggacatgttaaaaaagggatcagttgtgcaagtggaaggagaaggacatcacgatcgcaaacgatttgcatgccaatatattactgcatttgaaagcatcaaatctcacggtatatttgcaaacgaaaaataatttgtagataaaatttttacatatgtgtttttaatgatctaaaagtaaagactgaaaaataaacttcgatgaaaaaactccaaatcaactttaaatttaaagttgaaaattttaattttggcttataaatataagtataagcgaaaagatgaggctgaaagtgtggcatcatgcacatacctcagctaggattgcgcagccaaaggacacaatcatatgatttggaagagagaacagaataactaatattcctcaggaatttgttccacgcgaaaaatattcctctgtaatggctggagatcctgctttagtacggataggaaacaacgtttgtggttggaagaaacggccaacaactagaaacattcagaatttagctttcaaaactacttatgattatgctagtaggtaccaaggtgcaaccagacaagtaggtgatgaaaataaccagaaattgaacgctgcatttgtacacttgcgaaatgtttttcccctaccttaaccatggcttctcatgctctgaaaagggcaagattaatttcatcagagttgatgacaaattgaagatacatatgcatatttattttgagacaaattcatttttgaataagtatgaacatttcaatttggacgaaaagtttccttgagctggccggccggcctggccccaagcaattcctggcaacagagcgacacgataacatgtcaaaacttgtgcactctataaaatggtgaagatatagacacgaagcataagatgtatagtaagtagctagcaagaggatcgaaatgtaagagctaaccccagctagtgttttctttttctttttcttttttggaacccttgctcaatcactgttaattagtggacatctaccaaaaagcccaaacttaaattccgggttaccaagttaaccaaaattcttgtgacggcctataaagtttgcattctctggatgtggatggcattgacttgagcaatggagtttgctctggatatatgtgtgacgtctcagcttgaaagctgaattactgtaataaactttggtcggaagctcttgagctaaaggctgggaaacaagttgatcccacaaaacacgatatcatgtggctcttttaatcttctgtacgtgtagcaactaacaataaccaccattataatatacagatgcttgtgcaacccctccgcggactgcggctgttccgcagatcgttgcaagattcttcctctgactttggtatctcgcgtcatctcctcggctttttgctgctaccaaaagtctctgcatagttaaatgtgagatacatttggggtacttatatatttagagcacatccggatccatggtttgtacggaacacagacgatgcaagggattttctgaaatttgaaaacctgacaattagatcattcatgaagatgaaggacatggatgtcaggggcgatcgattcaatatccgggccagtatatgcatcttgtactagtagactactagtttcaacatttcacgctgatatgattaggatttgtgcaagaattgcagataagacggatatcccttcagttacgtttcgtgactagtatacattggactgaaattattggttccggccggacatttcctgcagctcgtatgaacttgctaagcaagatgccaacttgctatcccccaaattgtcaacctcgccgtaggttggcatccaattggcagttactttattgacctgatagggatggccgtgtccttcaactccagcttagcggtgaccccagcaggtgaatgtggcaactcggatatcccagccgcagctagagctcctctcaccaatcactagctctctgttgcatcatcattaagtcatggtgattagttaagataaaaatgacgtattgtgattagtttagcctgcgatctcatgctgtcccagcttgctctgaccaacaaagattcaagataccgtttctgcactattgaactaccagccatcggttgagacgacttagatttgatattattgattcatggcttggcttgagtttacttgggtatccaatgggcgcctctggcttgctggttcctgtaacttcgatatcttaaatatatataggtggctgtttacttacttaagtagcacatgtacgcctgtaatctcctcatcaaactttgaatgcgcagtgatagtcaggatcaattttgagctaaacaaaagtttgcattgccttggttaaattggtcgatggttaattggattgagtttggatgtagtggggacatacttctcgcaaatgtctgcgctacagtgctacctgttcattctccggtagccatttgtccgtagcacataaataaacaagataataccgaaattaattagggacataacttttttaggagaaaactgtaatgcttagcacaccactaaacacgccgaggccattttaaggccgtagagatccctacgatcatggctagccatccacgaccaaaccgcaaaaatttacgccatttttggatcgacggccgtcaagtcccgtacgtcttcttttaccaccaccatttgatctgtttccttctcagacaccaaaggaacttgttttttgtatttttcttttcggtagctactttctacatctctcttatttggatcacgtattatcctttttcattccacgaccgacgaccaatgttccgacacctcgccgccctgatcctgtccgccgtcgtcttggcggcgtccacaagctccggcgtcgtcgatgcccgtcctgtccacaccggcccgtaccacgtcgtcatcagaaccgccgccaagcccagccgtcgcctgatcgggctcggcggcaatgccgcccatatgccaagaggtatagc

SEQ ID NO: 7137 - DNA, 21408 bp, Oryza sativa
  unsure (1)..(21408): unsure at all n locations
ctctcccaggtacttaactcctctgacactgttgcattgtttgatctaacgattaaccggtgtttaagtgggaaattttctaaatacttcaggttccttctgggcttcttgacgagatgaacaggccgatcaacaagggaaagatgtacatatcaagcacgagccccctggccgtgccagtggcctacctgaggcagtttcagagagacttcagcctgttcctcaagtcgcgcgcggcggaggtcttctccggcggccggatggtcctcgccatgctcggcaggcaggccgacggctatatcgacaggcgtaccaccttcctctgggagctcctctcggagtcgttcgcctccctggtcgcacaggtgagcagatagcctgatactcatcagtattcagaactctgaactgataatctgaacctgacggcaatgcaatgggtgggtgcaggggctggtcgaggaggacaaggtggacgcgtacaacgtgccgttctacgcgccgtcgataggggagatcgaggaggaggtgaggcgggagggatcgttcaggatggactacgtgcagacgtacgagatcaacctgagcagcagcggcgacgcgaggagggacggcaggacggtgtcgatggcgatcagggccatccaggagtccatgctcagccaccacttcggcccggagatcgtcgacgcgctcttcgccaagtacaccgagctcgtcaccgcgtccatggagagggaggaggtgaagagcgtccagattggggtcgtcctcaccaggttgtgacacaaaccacaaagctgtgacgactgaccagagcgatttgtaccagtttatagtttgaccccatgtttctgaattctaatgtgtgaccatgtggtgtttagttgttgtattgagtaactgatgatattaacaaattccatgtgtacttaactggtaggatggaaagaaattaatggaaagtggattaacaagtgtgttgaaatgccataaatcgtccgctactcccctttatcatcagtaattcaatatccagcaatactactgattttgtggtttatagctagctacacattcatacgaacgctaataaagttttgcgacttttttttggtttcgtaaaaagaaaaaacatttttttctcgcaaattttttaacgctttttatactttccctcaaaattaatgtcacaaatgtgaaaacaactgaacatgaggccttgtaatgggctggcaagagcaaacaagggcaacaaatttcgaccatcgtgggatgagatgggcttaaggaggcattagggcttgttcagtttgttgctaaaatcaaccatactaaattttggcattgtcaaattttggccaaattttggtaaggcaataaactaaatgacactttaccatcacaaccttgccaatccctaccaacatttgggattctagaaacttctactcatataactatatcaaaaattgttgaggtgtcaaactaaaggcctgttcactttgatgccaaaaaaaaccctatcaaaatttgtcattaccaaaattttggtaactatgccaaaattttggcatgatttcttatatagttaccaaaatttggtagcaaactaaatgtagccacttttttagcaactttatcaaaatttggtaaggttgaaaatgacatcaaagtgaacaggccctaaactccatcttcacagcttgatctttgctaaaattttagcatcaccaaattttgccttttcaacaaatggtaaggtcttttttgcaatgaactgaacaaaccctttgtttttgtatgtgaggcccattaaggaataagtccatttatatccctcactttttgttgagttggaaatcttaacccctaacttacaaaaccgggttaaattaggtcctatagcagtattgagggctggtttcactggcatgacatactagtcagcgaaagaaagtcagtgaaaagaaaataaaaaaacatatagggcccacatgtaagtgagcttgcacctcttccccaactaccctctcttctcatccctcgacctcaacctctctctcccccaagagctcgccggtgaggagaggggcggtgggcggtggctggcgagagaggagcaagatggcggtggctcatatccttaccgacgagccctacgtgggaggttggaggaggagatggcgcagtggagaggggatggagcgagggggcgaccgccgtcaagggtggagctcggggagccgccatcggtgtggagagggtcactgcggctagaatatgtgtaacaaccctccctccagaaccgcgtagccagtccatccgacgggcgggcccacttacacataccactccacttatactttcgtcttcgttttgtgtaaaaaggttaacccgggagtgagatatggttggagggaagatgccttataagttggtttcacccttactaaactagcaaggtggtactaaacatgcacacacagctctcatgggtcatacatgcctcatcctaattgggccaggatgtcacaatatggctgacgctgtccttactcgcaaccgctgccgagggcgatggtggcagtgaacctgtggttgccgaagcaagagctgacgatcacatcatggcagtaggaggagcacaatcagtggactccatggtttcaccatgggcagggtgattgggaggcttcgggtggccttggcctctagctcgatcgtatcagtagtgagtgatgctttggcctcctgtttgggtggctttgctatagcgcctccctcatggccatcgtcgctgagatccatcaaggtatgagaatgggtcaccgcgccttccccatggcttggtgatcgcgttgcatcgtggagcacgaaatgaagcgctacgagagcggtgatccacaatgagtaagtgctctgtgtgttaggatagttgctcgcgcttcactggggaggcatggttgtgatgctgaagcaagcgtgccggtttaagaagctcgtgatcattgccaccacgattgttgccttgctctgaacctagcatggttgtcaccttctctctccacctacggtagctgcgtatcttgagctcgagctcgtgggggaggggcgcctcggccttcccctccctactctcgagtcggtcacggcctgcgcttgctcattccccgccgcccaccgccaagaggagatgtggagagatatgggaagagaggagagaagcatgttagaggaagaaggcaagagcctgacatgtgggtcccatgttgactgcagttaattcatcacgtcagtgaaaccggccatctatagtttcatactgccatgagacctaatttaaccaggttttgtaagttggggatcaagattttccgtattgcagttcataaatatgatttaaatccgtcagaaagatgcgtaaagtggacttattccccattaaacgtagctggtcgtatgcctatattgggcttcggactggtggaacaattctaggccgcgatggtgaggtagacatgcacggtgacatgaattcacctgacatccaagtgaataattgatattctcttcattctaaaattggtaatttataatattagaatatgtcatatttaattatagatggttatatttaggacaaaagtagtaactaatagttctgatgtgcctacgcatggtgcctcttgatggcctgaagcttgacgccatacttgaagtcacagatgatcgcgaactagaactcgagaggggactccatgctaggcgagtgccggaacacgtaatggcggtagaggtggatcattgacagtttgatctcctggatggagaacttctggccgatgcacacccttggtcctatcccgaacgggatgaacgcgtacgggtgcctcctcctctcctcctcgccattggggtcgaaccgttccggccggaatatttctggctccgggaagttcttaggatccttcgctagcactcctggtgccaaccacacccacgttccctgaaaaacaaatgcatttgtaatccattatattcctacatagactttgctctttaatgaatgaatcccactacagtgctatctactggtagtagaaaataatttgaatcattaattttatttgatcgaatggcttatatctatttatattaccacccaattaacaacagtataaacatggaggggtattattataaaaaaaataggtgagaaggggcataattgtcatttagcagtgattaaacctttttttttctttttttagcttttatcgatggaatataaacaatgccagtgcaattgatgaccatagatcaatctagtcaagcataaataacaaagttacctccaatcattatattagtaaatcattactaatttactattaataacgaaccgttgaaatcatttctacagatagtataatattattagtaggaagcaccggagcatctccttgatgtacttatatatagatcgttggatctagtacctttgggaggacatatcctccaatttcgacttgttcaagtgtttccctggctagcaatggcgacataatgtagaatctcatcgattccttcacaacctgcattcataaccaggtgaaaagtgcagtggttagaaaaaaaaaaattggtctcacgaacccatgaacacacaagaaaatatacgcaacacatacctgatcaaggtacgggaacttggtctgcagatcgtcggccatcggcacgcagtagcgggggccgaacgcgtcaatctccttgagcaacttctcctccacctccgggtgcttcgcgacgaggtagagcaccgtggagagggtgaacgccgtcgtggtcgacccggcgaggaggtgctcgtaggtgagcgcgctgatgtagtccggcgtgagcagctccctcgatgacttgttagactccctcgccgtgagcacgacggacaggaagtccttgcgctgctgcgacgccgcaagatcgtgctccattgccgcctccctctcggcgacgatgctgtccatatgtgttttcagcgcgcggttgacccggtcgatcttgtagtcccccatgccgggaatcctcttgagcacttgccggaacggctcttggaggaacggtaggagcataccgacgagtatggagagcgatccggacaggtccatcttgagagatgtggtcgcgtgcatgtgcatcttgatgaactccgacgatgccttagcctccacgctggtatcagcggcgatcttgtctatgttgctgtcgtcaggtgtgactggcagctttgacaggccgaagtccgtgccgaacgccgcgaggccgatcacgtcggtggcgaggctgagagagagatcggagaaggtgatctccttctggccgtcgaggttcttggacgcacgctgaatgcacgactccatggtggggatcaggctggccaggtgcgacggctggtagatggagatgatcatatttctcatcgacgtccacctcggtcccctgcggtgcagcagccatgatgttgtttcctttaatttaacccaaatcaattttttcgacacaactagcataatattcaatgaaattcggccaaattttatgggaaatagctagtctctgctgctagccagctagttgatacttgatattacctgggaaactctaaactatggaggagacaatcctttattgtttacatgttatctaaataattatgaaaaacttagaaaaaaatcaataagatagattaatatgtgataaatcactttacaaacatgcaagatcacatttaacttatacaagatgtaatgaaaaaataaatttaactgcgaatatacgttaactagaaagtttaatttgctttttctgctgcaactcgtagaaattgaattttaacttgcatgtgttgtgcaatgatctatcttcttaaatcttttcaattttttcataactatttggatgacatgtaaaccacggagtaatgtcccctcttagagtttagaatccactctcgatgctaccttatgaagaacaaccctttcttatggataggagaattggcaatgggggagggcatgcttcgatttggaatgctcttgaatttcttcacgcccacttccttgcacagctccgcatccgccacaatgatcagtggttgccttcccatgtgaaatctgcaagtaaattgaataattgtgctatgtgtatgaactttgatctaggttcacactgggtgtgttgttttaatctaggtttgcacagactagataagtttttcaccgaagagtactttgcaatttattacacatatttgcatccacatcataaatttatgcatcatgaatgtagtttactctaaattgaattccagttaactggttggtactgttatcctaagctatgctctccacgcaaaacaaattagaagaactgaatctgcgagcagaggaggcagtcacctgaagacaggaccgtgcttcctagcgagaacggagaacacatccggcccgtgcatggcgagcaggtggaggtggccgatgagcggcagaggcacgggacccggcacgtgccaaaccttccggtacggctcgtacaagtaggccaccaccaggagacccacagccatggccaccaaggtgaccgcccactccgccgttgcgcccagcacctcgctgatgtccatctcagcgatctcactctcaccctgccttgcctccctcttgccttgctatcatttatcgcactgttgacgttctgtgacaactgcgaagcatggttggttaagtaggcttgtgaaacggtccgttcccgcaggattcgatggagaggcatcgttttggttggattagtttgtcctgcttggctgatgtatttgttgttagtcactggttccgaccaaccaattttatttgagcgagatttctgagtctacgtgtgatgatggacgtgccggtcgaggaagaagtttgctaaaaacatgcttaattaaatatcgctgggccggaaaatgcataatcaaatgacgtgcagccagtgagtgcagtgtgacaaaaaaaataaataaataaggaaggtagctgccaaacgtgttgatgccttagatattactcttccatttcagattataagtttggtcaaagtcaaacaactttaaatttaattaagtttataaataaatatagtaatatttataatattaaattattttcattaaatcaataattgaatatattttcataataaatttgtaggttaaaaatgttaatatttttttctacaaacttagttaaatttgaagcagtttgacttgattgaccaaagttaaaacgtcttataacttgaaaaggaggtagtatttttttaaaaaaaataaactttatatgctaatggtggagcaggcgagattctactcagtaggtttcttgtcctcgtgtatataataaggtgtactaatcgacaatcaatatgatcgatgtaatactcttaacggatgtgccgctagctgattggtggatttattccgcaccaaattactgacacttgtccctttttctatttggtatgcagtaccatgcgactatgcgagtatgactatgagacgatacttggctaggctccgtgaagttcttatgggcctcaagaaaacaatcttagctgtttttcttaacccgttttaaaaatggtatgttaagtaaactaagatacataatgacacaatcctatataggcttacaattattgtatttcacgaagaaaaagtactgttgaaaaaaacaatttatgtatgtgaagatatatacagtgattaatatgaaacatggcgaaaaataatttaatagtgttacttccacatagtaaaggatgtcaatatcgcacataataattgttcacgtaagattaacaaatctataaaatataaagaaagaaacaaatcaatttaagggtaaaactttccatatctctaataagttcaaaagaccaccaaggctaaaaaaaatttaagaagaaagaacacaaaattaactttaatattttattaaaattaaattttgtttgtggcttataaaacaataaataggctatgatggtactaacaagttttcaacttccttagtccttaccaaagtcttgaatcctacaagttacttcaaggtatactgtcacaagtcgaattcctttgatcgtcgacgcgctcttcgccaagtacaccgagctcgtcaccgcgtccagattggggtcgtcctcaccatgttgtgaaacaaaccacaaagctgtgacgactgtccagagtgatttgtaccagtttatagtttgacccctgtttctgaattctaatgtgtggcgatgtggtgtttagttgttgtatcgagtaactgataatattaacaaattccatgtgtacttaactggtaggatggagagaaattaatggaaactggattaacaagtgcgttgaaatgccataaatcatccgctacttcctttcatcaccagtaattctgtatccagcaatactactgatttgtggtttatagctccacactcctacgaacgctaataaatgtttgcgatttttttttttggtttcataaaaaaacattttttctcaattttcttgaacgcctttatactttcccttcaaaatcaatgttcacaaatatgaaaacaactgaacaagaggccttgtaatgggctggcaagagcaaacaagggcaacctttcggccatcgtggaatgagatgggctgaaagaggccttagggcttgttcggcctgttgctaaaatcaaccataccaaattttagccaaattttgataagacaataaactaaatgacactttaccgtcacaaccttgtcaatccgtaccaacgtctggtaatctagaaacttctactcatagaattataccaaaaattagtaaggtgttagactaaacaccatcttcacatcttgatcttgctaaaattttagcattaccaaattttggttaaatggtaaggcttttttttggcaatgaacaagccctttgttccattttatatccgtcatcttttcgttgagtttaaattgtatgcttaatactgaaaatcttaacccctaacttacaaaaccaggttaaattaggtcccataatagtattgagaactgatttcactagcgtgacatactatttagcaaaaagaaaaaacatatagtgcccacatgtaagtgagcttgcacctctccccacctaccctctcttctcatccctccacctctcccctctctcttccccaagagctcaccaatgagaagaggggtgttgggcggcggctggtaggagaggagcaagatggtggcgactcatatcctcaccgacgagccctacatgggaggttgaaggaggagaccacgtggtggagaggggatggagcgagccggtgaccatcattaggggtagagctcggggagccaccgtcggtgtggagagggtcactatggtcagaatatgacggacgctatccttgcttgcatccgctgtcaaggccgatggtggctgtgaacccgtggtcgccaaagcaagagctcaatcgtccagattgtggcagtagaaggagcacaatcagtggactctacagttttgccatgggctgcggtgattgggaggcttcgggtggcctcggtctctggctcgatcggattggtgagtgatgcttcggcctcctgtttgggtggctcggccaccgcgcctctctcattgccatcgccgccgagatggatcaaagtaggggaatgtgtttgcgttgaggtgcacacgatgaggcgcaatgagagctgtgatccacaatgagtaactgctccgtgtgttgagacagttgctcacgctttaccaggaggatgacaggtgggtcccacatgtcagtgggtctcacaatacttttttttttgaatgacataagggtcccacatatttttttatttttgtttttattctaataccacgtaagcgtcacgtaggataaaaacttggtcaataccgccacgtcagccaaaaccaccttcaaaaccatcgagggacattgtttgcaccggtattgatagttggaggagtcgatatacccggttttgtggttggaggatatgaatcatactcaggcgatagttatgggagccaaagtatactttttccaaattttttacaagagaccccattaaacgtagctgggctatgtgcctgtgttggacttcggactggtagaacaatactagtaggagtaccattttagcagtggcgaagtgaaccgttgacagttcttttgttttgacacagtattaaatgcagacgcttagctcgaactgataaatatacagttctgctgatgatgtgcctatgcagtgtgcctcttgatgacccgaagcttgacgccgtacttgaagttgcaaacgatcgagtactgaaactcgagaggtgactccatgctgggcgagtgccgaaacacgtagttacggtacagatggatcactgacagtttgatctcctggatggagaacttctggccgatgcacgcccttggcccgatcccaaacggaatgaacgcgtatgggtgcctcctcttctcctcctcgccgttggggtcgaaccgctccggccggaatacctctggctccgggaagttcttgggatccttcgctaggactcctggtgccagccacacccatgttccctgaaaaaaacaagggtatactagtacggaaacaacgaagcagagtctgtctggaactctggattattggccggatctagtacctttggaagggcatatcctccaatttcaacctgttcgcacgtttcccttgctatcaatggcgataaaaagtagaatctcatcgattccttcacgacctgcatagtacgcacatgataagtgcaatgctcggtcagaaattcaggtcttactattcacgactccacaatcgaagaccataaatacgaccaatgtcgaagaagggcatgcatgcctgatcaaggtaggggaacttggtctgcaaatcctcggccgtcggcgcatggtcgtgtggtccgaacccgtcaatctccctgagcaacttctcctccacctccgggtgcttggagacgaggtagagcaccgtggagagagtgaacgccgtcgtggccgacccggcgaggaggtgctcgtaagtgagcgcgctgatgtagtccggcgtaagaagctcccgccaggatttgttcgactctctcgccgcgaggacgacggacaggaagtccttgcgctgctgcgcatgcggcgctgcctggtcgcgctccattgccgccgctctctcggcaacgattttgtccatctgtcccccgagcgcgaggttcacatggtcgatctcgtggtccgccgtccagggaatcctcttgagcacctgccggaacggctcttggaggaatggcaggagttggccgatgatgatggacagtgagccggacaggtccatcttgagagacgtggtcgcgtgcacgtgcatcctgatgaactccgatgatgccttggcctccgcgctggtatcagtggcgatcttgtcgatgtcgtcgtcattcgaagatgctgatatttttgacaggccaaagtccgttccgaacgccgcctggccgatgacatcggtggcgaagccgagagcgagatcggagaatgttatgtcctcttggccatcaaggttcttggacacgcactcaatgcacgactgcatggtggggatcaggctagccaggtgagacggctggtagatggagatgatcatgtttcgcaacgccgtccacctcgaacccctgcatgtgcagcactacagccatttttctacgtttgcaacggaaaaaagaaagtacaccaaatattaaataactttaaaatgacaatttttttcataacctagtgtaatatatgttttctttccgtgtagaagaactatatatatgctttttccacatatttataaattattttattacagtaataaaggaatatttgttcacatgtgtggcttagaaatcaacacattaattgaaacaaaaatatacaccgttgattatagtagatctagaaaaagttttgatacatgtttaaatataatgatgtagatttatcaaatatatgctctatctttataattagatttaatccaaatcatgatcccataccggctaacaaaacaaattgttttctttctaccaacacacatgggataaagctaggtctgggaacacgaacacaaaataaacgaaagattatttcagcaattatttaattagaaaatggaatcaaaatcctcacttttaggtttgggccgaatatgaaaaagtccagattctttcccttttgtctcttttttgtttctagcctgtttccctgtttcctttctccgttaaagtccagtttgcgttctcctagatcgcctaggaaaataagtctaattaatttaacttcctgtcgctacattagcttcttcaagctccagccgagccaccccaatcccgcatccgattcaactaaacccgtggagataatcttaaattagttgaaggcttttgatctatatctcatactctatcttttccctcaagaaattgaaggaaatcccatggaaaatcgctcccgtatcaagctcgaacttgagtttatcgaaccctagtttttatctttctggtgaactcgagtccgattcaaccaaattagcacattgacgggcaaaaatgcagacaaaaaagagatgatgaacggaaagttaacaatttgtaattagttaaaatatttatgaactgtaaaaaacggtcagcaaattttcatattgatgaatttaaatatttagtgccaactccaatgtggcactgacagaaattagaaaagtaaattttagaatcgataaatttattattattattattattattattattattattattattattattattattattattattattattattattattattattattattattattattattatatgttagctttgcaaaaaatgtatcagtatggatgggaaatttccataccattttcacccgtagctcgctctgtcccaaaatatagcaaccaggattggatgtgactcatgctactgatacaaatctggacagaggtaatataccgtgtcccatccaatcttggcttggtatattttgggacgagtgacttataatatgaaaaaagagagtatcagatagcaaatgtgagttcaaatactaggaatgataccaagttataaaccatatatgccaggctgtggagattgttcgatctggttaacgaaactagaggattttcctgtgcaatttgcacggagctagatttaaaaattgagttgaatttgtatacaactttgattctgtttctatacgggtcgatttatgctaccatatttaacattgtactttgtatacaattatatcaataaatctccaccgatgtattctagaccaacacaatttaacggttaacatatttctccttttgtccgattaaatgtggtaatttttaggcctccagagtaaacgcggtgaaactcattttagagctatcttaataataatatgctccccctgtctcaacatataactattttgagttccgaatctacataagtgcatgtcgagatctatagttaaaagttaatatattttaggacggatgtagtaatatataaatacatttatatttatgcaagaaagtaagagttatatatcaaatataattatacttttttatttaggtttgctgcaaagcagcagagaaaaaacactacttatattattaagcaaggatgaaaaggaagtatggaactatcatgtttctctctcgaggcctaaatagtaccatgttatttgaagaaaaatagaatcatatgcaccatcttgaaaaaggaaaagcacccgatgtgtagtgatggagttgtgaaaatttatggacatgcatgacatagaaataagggttgtatattatatatacttttacttttacttcatagaaaaatgcacgtgcattgcaactggtgaatgttattttaatcttattattgttatacggtttagctagggtaaaattcactgtaggaattcgcttgtttttctttagaaaatcatgagttgcaattagtagtccgacttttatctcaagttagcatacagagttttttaaaagagactttttatacgactctttatttctaaaagcaaacgagcttaaaatccaactctaacacggactgtatttccaaaagcgaacgatcttaaataccgactcaaacacggatgacgtatcaaaataccggcaaaaacatctttaatttttataatagtagatatttgtagtttatcaatgtactaaataaaataatagactcatgttttcacttatgtttatatttattcgaacaacttattagcaacttataaaacttttatacttgtatccttaatgattaaaaaaatattgtaataataaattacgatgaaaaaactatgtaaatacttaagtatttttgttaaataaacgatacacaattttgttaaatagtggttttgttaattttgtgaaataaactacaatgaaaaaactatgtaagttttagaaggagttattaattaaaataaatatttatgtagtgttacatatgtgatatccttatcttcatatttgaatataattctatatgatattaatatcataggagtaatattaatggtcaaaattatctattgaagactgtcaaaaacttgcgtcttatatattttttttggttgaagatatataaattgcagaaaaaaaaactccactctttacaggaaccaatctgagttgctacctaccttgtgaagcacaggcctttctgattaataagagaattggcaatggctgagggcatgcttcggttaggaatgctcttgaatttctttacgcccacttccttgcacagctcggcatccgccaccatgaccaatggttgtcttcccatgtgaaatctacgagcaaattaaactagatccagttaaccgggtagtagaccctggtattcccagttctgagctctgcgttcgagacagagaagcaccagtaagcagaggtgccagtcacctgaagacaggaccgtacttccttgcgagcacggtgaacacgtccggcccgtgcatggcgagcaggtggaggtggccgatgaacggcaggggcacggggcccggcacgtgccgcactttccagtatggctcgtacaagtagcccaacagcaggagccccacagccatggccaccaaggtgaccgcgtactccgccgttgagcccagcactgtgctgatgatctccatctcacccttgcgtctctgccttcccctctttgcctcactgtcgcagttcgtggtgtgccaagcgttgctggttaaataggcttgcgattttgtgaacagtccaacggagcagatggagaatcaatgaggcatccttgagagaggcatatggttttggctgtattagtttctccttaatgaagtaataaaacaagcataattaaatcgcgtgcaaccaattagtacatcgtgacaaattttttgttttcttcgggagggtagctgtcagatgctaatggtggttgtcctgacgtgttacgtgtatgcaccagatgaccagaaaccccatcgttgcatgagttcatcgccgtcagatggtgaaatgagtgcctgtgtcttcgttggcactcgtaaaatattgagccaacgacttcagagaatagaacggcgatggcccaccatcccacgaaaggtaccaaaaggtgctggactgcaaattcgaaattaacaattttcttaaacaaatgcataacgtagtacgatatttcgtattgagagagcataaaaattataaatgtacagttctaagagaatatagcgaaaaaaaaaacaccccataacagtggctaggggtggacgttcggtcagacagaaaaatttggtctcggtttttggtttttcggtcatttcggtctttgcaaactcaggatcgaatttcatccaaaaaatctcaggaccggcaaactcggtctcggtttcggtctgaccgaattatgcactagattcgaatcagaggagtagatcaaacaataagcataatacttacagtacatcgcaagaagccaaaatccacagatgtagccgctcgctgccttcccgtcgtccccgatggagacgaatgcggccggtaggatggaggcggaggcggcgccggcaatggaggcggagggcggaggcggcgcggaggctatcaggcggagccacggaggcggcgcgatggatgcccacggcggcggtggcgccggcgcgatggaggcggagggaggaggcggtgccggtgagctggaggcggagagtgggggtggcaccggcgcaatgcaggcggaggcggagtcgtgacgggctgacggcgtgatgcggcgaggattggataagattggaggcggcgcgggcgtgactccctccctgatgccctctagggttttgtttttaccgggcttattgggcctcgtaggtctattgggccacaatttggttaaccgaaagccaataaccgaattgcccggaaaaagtcggtcttttgatggctgagactgaattactaaaagtcggtctcggtcttttcgatttggttcttcggttcggtcttattctgcccacccctaacagtgacgtagctaggatttaaagtaaaggtggtccatcctattaactaacacatctctatctctactacttaaaaggttgaatatgtttccgtcgttcgtccgtgataaaataaagggcgaaaaaaaattgaatccgattatatgcgatgcaggaaaaaaaacgtccatcgacaatccaatttggttagcaaaatgtcacaccccaatctgataccgccgtacaacggcacctgacaggagcgtgtcgtagggaaaacggcgcgaaccgcttcctacgaaaccgcgatctcggtaccagtcccaggacatagtgctggtacccacggtgacaaatatgaatcatagcaatccttaaataaatagaggacttatttaccttaacttaggttgcagctcaggcagcccgagaatacaaccgacgacacggacgaggcgaacaccaacaacaacagcggcagcagaaccaacggtctaacacccaacaccacaggcgacggctgggaaccaggacgaaaccctaatcttcacttcactttgtcttctcttcacggcggaggaactatatatatatatttatatagagcaagggtgagtactttcgtactcagcaagtcacgggaacttaggtgtttaatgcaagcttggaagagaggcaaggttgttttgcaaatcttttatttgaagacattttgaaatcactaagtgatttatttctttctaagtttggggcgaaaagagacttgcgtctcgattcgactttaagagatgtttttcaacagctcatttagtaatgtaccgacctcccgggtcagatcattacttctcggctcccagagccatttcacttgattaatcggctcccagagtccagctgcccagcagcacaacaatccgcttccactcgggaagcctagtctatgatgcccgcagacatcccgaatcacacagattcgtttctgaccactcagttcgtccatctgccacataggctgattctggttacgattcccacaccacaacaacttttcacaaagcacaggcaaacaaatctacgcaacgggaaccacctcacatccgcccatgaccgtgggcacggctgttcgaacagttagttaacctctgcagaggggtacactttacccacaagacacgaacttactccagacactggccggtgtcagaggttcgcgacaaagcctttcccaagccgacccagggatacctcatgccacatagaaggatcaaatcctcacataaacataggccattttaggcgttcaccaatcaaactccaaccacctcgatcggtaattcagcaagcttctcgttcttgcattaccaggaacccggtttggctccaaccgaccccgccccggcgttcccaactattagcatgcgaggtttccctgaacagactagctacttagccagggtgtcccattccaccttgtggttgcactttgattatgttcgatgagtttcccacaggaatcggtccttatatgcgaatacgggacagtgccacataggcacaacccccgcatcgcgagttttcacaattcattttattttcaaacacaccgacaccacatgtcgggttttgaaggcttcacaaacctatttcccaagttttcgacaaacaacggtgtatgtgggatatttggtatacgcgctcagagagcacaaataccgaggtaccacgagggtggagcgacaaggaatcagggtagtacgacctacggaaattagtgcgactactgggtaggtccgtcgatttggcacgcaaaccgaggccaagcaagttaagtgtgtgattctaataatgcaagttgcaaacaaaataataatgacttttcaattataggggcaatttgatcaaagggtgacttgccttgctcaaggtcttcacgaagcttcacgaatcttcgagaaaacccgcgatcgacgaaaatccgataaccgcaactatacgcaaaaaatcgaaaacctaaacaaaggaccaaaagaaggatcctatttagactaattagtagtgccattaaatagatctcaattttacggaattactggaagtataacggagtcaatcggagttacggatcgggagatatgaatttgaagtttatttggaatttctggaataagaggaatggtttatggaatttatagaaataatattctcaagaatattattgacagtcacagacacgcgggaccaaaggaaatgatttgtggaattttgggaataaggaattgatttatgaaaaagggaaaaggatttattaatcctttggataagaaaaggaaggagggatgggatttagacttctttgggcggctcgggtacggcccaagggataagcacggcgcggccgagccaatgggccgggcgcgggcgcgaggaggcggcccatggccgggcaaggcgcggcccaagcgggcggggcgcgcgggaggagagagggggatgggtccgggtggaccggatccatcgtgctgggtctcgggacaggcccacgagttagcgactcggcgcatgggggaagggttcatgcggcgcagggcgctagggttttgcggacgcggctcacggcgcggcgcgcgggtggaccaagaggtggagggcccacgcgcagccagttggcgcaccgtggaccgcgcgcgcgagggtgggggagggagaaggcggctgaccggctcggcgcggtcaaagccgaggtggcgccgacgtggtgccttcgtggctgccacgctggctggcggagggaagaagaaggaggccggccgagaggaggaagaagggggcgcggccgaatggacggcggacggcggccgagttcaccggagcaagcgtgacggatttggtcttcggggagcacaccggagtgacgagggcatcgagaaggagcgagccaacggctcggattcgccggaggaagttcgacggcggtggaattcgacagcggctgccggcggcgagagaaaggggaaatcaccgaggggcgacgaggactcaattaaaggcggcgggagcatctccggtgttcaaggaactcatttccggggtcggatgggtctgagcggcgccgtggaggtccggcgacgagaggcggcctccgggggtgggcggcaatggcggtggggccatgccgggtggcggcggtccttggggcggcgtctacgcgcgttcggcagggttaccgagctaccacgcaagctagaggggacgagggtgagcagggaaggggaactggagggaggcactaccgagccgggacggcgcggtgacgagcagccaacggcgcggaagcgagttctccgtcgtcgggccggggaaggggaagaagatgggcgcccagagtcccgcgtcacgcgtccacgcacgcaccggctcccccggtgctcggcgacggacgacggtggcgcgagcagggcggaggcgacattggcgcggtggcggcgagagcgaaaacgagagagattgggagatggggcgcctcgggttttatagaggtgggggatgtcggttttgggagggaggaaaccgacctcgtgggcggtcaaggaggggcggtcaaggaggacctggcggcagggcgcccgtggtccaggcagtggcaggcggtgacgccgatggtggtcgggcaaaaggaaaaaggaggggggagaaagggagctctgctccttgctgtttcgggaaaagttgaaggagggagagggagtgagagagaggctgcctctctcggctttggaagctagcggcgtggagcggcagcgcacgacgcaggcgacgctagggcttgacgtggcggcaaccgggcggctgcgcggcgcaggcgcggcagggttgacggcggcaatgaccggccggtcggcacgcgcgagcgcgggaaagagcgaagacggtggcgggttttgggcggcgacggcgggaatggtgccggtcggggaaaaagcaaaaggggagggaggaaaagggggccctgcccatgccatcagggagaaaggaggagggacagagggctctgcctcgggagttggacgcacgcggcttggagtggccgggcacgcgtcgcagggggggtgtcggaacccgaacggcgcaagncggcgcaggcgcggcaggccggcatggcggcctgcgtggcgcagcctgccagggctgacgcgggggcgaccaggcagtcggccacgcacgggcgagtgcgcgcgcgacgcagggagtgcggctggatttcgaaggcggcggcgagagttttggcgtcggggggagttcgtcgggagagagagagaaacagagagggagagagggagaagaaaggtgctgcctctctctcccggcgcatgcagcgcgcgtgcggggaggaggaggaccgcccgagagaagagaaccgggctgagaggagatgggccgaaggagggaatcggcccacaaaaatccgagggacgcaaaatagactttgacagagagattgaatttggagagaattggggcttggaaatggaatttggatatctttgaagtcgggcgaatatttggcaaggttttgagatttggaatttgaatttcgaatttgattacttggactcagggaaacagggaggagtcaccaacgggattcaaaaagggaatttgataattctaggacggggacaattatttggcggggatt

SEQ ID NO: 7138 - DNA, 39723 bp, Oryza sativa
actagtggatcccccaaggaggaccttgcccaccgaagaaagagaggggagatccagaacaagaataggggggacgactctgagaatacctgagctcagggagatccagaacaagaataggggggacgactctgagaatacctgagctcgtagaggacagaaagaggaagaggggttctagagcctgaactcttttgctctccagctctctgtaactccttcacacacagatccaccataacacaggagtagggtattacgcttctcagcggcccgaacctgtctacatcgcccgtgtcttgtgcattggctctctcgcgaacattcccagatcgagggtgaagaacctcacttagcgcccccggccgaaccggcaaagggggacctgcgcggtctcccggtgaggagccccacgctccgtcaggtggggttcagtttctgctcaggggtggcagcagcttcagtccgccgccatgcggaggcagggaggggtcggcgcggccaggggcgtggcggtggcagcggcggatctcggtgcgcgtggcggcagagctcggcgttgacctggccaaggcggcgaccgggaggagggcgcgctcctcctcaacgttcttggcggcggctcaagaacgggcagcgtggtcgacgccgccgcctcgcctcggcgttctgtgttcttgatttttcttgtgtgattttgtgtgacttgattttcttttgtgattttgttggtagctcggcgtcggatctcggcacgggagtggaggaatcttttcttggttttgtgtaatgtaatgagatttgatttcttgtgggaatgggggatcctttgtgagtgagatttgggttcttgagatgggtggtagctgctccgacgccattccaatcgatgccgaggccgccatggattttgtcctcatggcggcaaggccgatgccggcgcgggcaaaaggactcggtggcggtaggatgaatcgcaggcgcgggaagggattttttcgtgggcgaatctggaatttctccgagtgctgcgtgcgcgaggtcacgggcggccaagcatcgacgcccacagcgctcgctcctcgtgtttttctggcggcgcgtggattcgaccgagcaaggttgcgcgttgctctgcttggggacgagcaaccaagtttggtcctggttccacgcgacatgtcggacaaaatcctccgtgtcgccccatagcaccggtccagggtagagcactgtgaaaggcctcatctatgataacatcaacgagttgctcatcatgattccactcgctgatcaacgagttacttagtaacgattgtcgatgtagattgcacggatggcattctcaacaactactagttccatagaggtcgtgtcagtcgtggcctacgtgaccaccacaaacaataggggaattgggcttgacgtcggagctagagcattttgtcaaacacatggtgggcgtcaccttggactgcttgtcccaaccgaattttgcaagtcttcggcattcttctggactttggtcatccacgcttctaccaccgtcttgagagatagcaaatcagcgctcgtctgatctgcctccacccgccttcacttgaactcctcaatccgcctcaaaagcgtgtcaaatttatcctcacttgccatggtagcttgtttggtaggcttggtgagctctgacaccagattgctagcaacccaaatcaaccaatctcagcaccaactcaactaacaatctagccgtacaagtagcagcaaagtctagtacataggagatatttggatggggaacaaataggaagatacaagtggtggaaggtgccagaagcttctagaacaagtagtggtaaaagggaggtagggagaaatcgacaagggagcccccgaccacccaagtcgtcaccaccgccaagagcttccgctcgccaattgatttgttcgatgatttcctggaagtgctgctgcttcttatgtatagttgtctcttgggttcgcttggacttcttgaaaagtagatgatccactccaagttgcagcccagctggttcctattccctccgtcccaaaatataaatatttttgaactctgacacggtcttcaaaatgttactttgaccaataatatctataaaattaaggtgttttaaataaaaagagttgcatattatgatagtttgttcaatgataaatctagtaacatcaattttacatgattgattttttatatatttttgctattaatagtcaaagtttaaaatgttttgacgtgtcactatgctaaaatgcttatattttaggacacggagggagtaacacaaagttatattaacttatgttggtgttcaagccccttcctagggatgaagttctccgggatcaagttagttatcatgcaaacaatcacgagaccgttgaaaatttaaggaatacatgaacacatgatcaaataggtaaactacgcaaatatgcactctgttatcaagtgcttaattattccccatttttgtgaaatgatcaaatctgaccatgtatatcacatccatgttgcctgaagatgcggtatatgtaccctctaattcgcctgcgccaaagaaggcccaaaaaagagacgaaggacgtcatcggtaggaaaagccaccggcgaggaaaaaaaacgagagagacgacgacacacgcaccatcagacgaacacggacacagcaacactgtgaacacacacgcacaccgaaacaaacagaataagcggcagcccgaccgcgtccgtcggtgccagaggtatcgatcggccaatcagtcgcggtagcacacgagcagcgcgacgcagcggaagatgatgcggagcctcgcctcgttcccccgcgcgaccctgcagccgccaccgagctggctggcgcccctgcgcttcttcgccccgtggctcctggcgacgacgagctccatggtctccgcgcggcgcgcgctccttcgtcgctggctctctctgccgcgagagcgagtgagctagctagcaactactagcaaatgcgtccgcgcgcgagagccagctaattaaccgggcgctggcatgccaaaaaaacactttgacgacggtgtgggtgcgcgatggagtcggggctgcttgttgatgtgtttatataccgcgcggcgcgcgctagctctgatcgtacgtacacttggacggacgctggaaggttcaatgtaggtcgcgctaggcgctagctaggtgcagttccagtgcagctatcgagctgtacgtacgtgcaatgcgtacgtacgacgccttgaccgtgggtagctcatggtgagttccgtgcaaacgcatgcaccaacctgcaaactttcctggcccgatccagcaaccagatggatcatcgatacgtcggctcgtccatccggcatttaaagtcaaaccgcctggtgcttgattattaacgtccgttcgttttgttcagggaggttagaaacagtccaggatacacgatcggatcctgcagctaatgttgccatccgccatcggccatccgatgccgggtatgccgatacagccgtcaacccgcttgttgttcgtcatcgctgaccaatgcgtcgtatcgcgagccattaattaccttttctttgtaggtttgcgaatacgtcctgtctgcttccatgccttgaccgagcggcaagaatctttttctttcatctgcagtgcagtgcaatcaaccatcgatctgaacgttagtatcagttcgtcagggttgctatgatacacgtctactccctccgtcccaaaaaaaaacaaactctggttttcgtgcccaacgtttgaccgtccgtcttatttttaaaaaatataaaaaaattaaaaagacaagtcacgcataaaatattaatcgcataaaatattaatcatattttatcatctaacaacaacgaaaatacgaattataaaaaaatttcatatgagacggacagtcaaagttggacacggaaacccagagtttgtcttttcttggacggagagagtacacttccatatggttctgaaaatttaaggagcgcaactaatccagtatatatataacaagccaccggccctatccaagttactctttgactggccacacaataatacaatggtcttgtttggatgctccgagctattaaatagccctccagaatcttgctatttagaagtattaaacatagattaccgataaatccgattccataacccctaggctattttgcgagacgaatctaatgatgtatattaatccacgattagcggctgattactgtagcatcactgtagcaaatcatggattaatataccttgttagattcgtctcgtaaaatagcgtaggggttatggaatgggttttatcaataatctacgtttaatactcttaaatagcaagattctgaaaggctattaaatagccctccagatccaaacagggccaatatatcgatgctactcccatgagctaagcacgatccatccattttggacatgcatatgcaggatacatcgcatcaggacgaagttaaaacggctacgggatttggccggcacctcaagtttaacgtacgtcctataccatcgcatcgatcactcgtctacgggacagaatcgctacattggcgcacaagccagttgactgaaaacctcggtgggcacaaacgctaacgttggcataacaaattgtgtgaccacggctctgtgtgtcttttaaaagccggtcaaagaagagcgcttgccgttgttgcaatccagagaaaagtgagaaaactgttactactactaaactggcttatgaactcctagtagtcaactgacagcacactcaagcctctctgcagtctgattattcaaccagcgattcgtgttcaggtgacgtgccatttagtcctgcaaatagagagagacgctactgccagagtgtgctgactggcgagaatttggtagggtttcacatgcatatctacggctgtgtggttagttcgtattccctttcagaaaacaaaggcgaaatgcttgcaagttgcaacctctatagatagattttaaagaaatgcaatccatatcatgtacgtgtctgtaatctgtacaaacaagagcttgttgttaattgttgcaatttgcaaacatgtatgccgggccggccaaagagtaggtcggccaaatttcattaagaaagagagtgtttttatacaggttttgcactttgagtctttgacaagaggctgtcaaagctgaagggagagtgttaaaaaccctcccaaaagataaatttgcaaacatgtaatccagataaattgttaatggctgatgagctcctcattgccaacccgtaacacatttacaatcttctcttgctattcaaccagtggtcattgttcgtattacgtccgatgatttagcccaacaaatagaagaacccaaaatccgctattactctctacagtattggtgctgctactaattaaccggtaagaattaggtagggatacacatgcatcatctacagtatgtggtcgcaaaactgccgacgcctgcgttagtttgtgttattcctttaggtgaggtgcttgcaagttacaaacctctatagactgatttgaaacaaaatgcaatctacgatcatgtacttgtctgcaatctttgcagacatatcaataacacagcagatcattgatgaccagaagttagcctccagatcattaatttgggggaatctgacgatctcagcacatcaggatcttgcaaaaccgaggacagaaactcagatatgtatggccagggccagacagaaccaagttagtgtcaaacaagttggaatgttagccatacgtatagctaaacaaatcccagagcaagattcatgaggcattataggccacaaaatttttagaggcgttgtcccccagatcgatcttgcatcacacttcgtgcaagttgagaaaccgtggcatgtgctctgtggagtacttgcagctacccactctaaaaatattaccagtacatcaaaatgtatgatatattattggtagtttacagctagacaatagaaggcttcttttaaagaaaaggagctagagatttgggcgcttctcctctatataagcacgccaaatgcaacaggcatcaccatgctaagcagaagcacttaagcactaaacacttgtgaaggagggctgtcttttttcttcagaggtgtgatctgatttctccaacagtatgggcaatccaaggagccaagggagaagaggaggcctcggcagaatgttgaaggagcacaaggcgaggctgtacatcatccggcgatgcgttgtcatgcttctctgcaaccgcgactgatcagtgatcatactgatcatcacgcatttttgttgtagtccgggtcctccgggatatggacggacaacttctttttgttctggatttcacttccagaatctagggttaacaattctttgatcgatgtatataatcatgtatggagggctagcatgttattttccaatattttcaccttttaacaccggtgatttcgcactctactttgttagattgacataacagttctctttttgatcgttcagaaactcgatctgttattctggatccttcagaaaaacaaaagtagttcccggatagtgttttatctgaagttctgctacttgtttttctttcactttctgctccaaagaggaaacaagtctccataataattcacacactagtcaccagcaaattagaatactgtcatcaagttgacaatgaatattttgtgcataagttgggaaacaagtttacacactagatactctttgttgtcttgccaacaaagcagtgcaatttgcagcagtggacaacagcaactgaacctgaagcttcaaggcagtagtagtctctagcttgaagaggcttgtagcaccatgttctgtactttcatagttgttccccttcgcatctatccttgtggtcttccttggtactttctgcgtttggatgttacgtttggtgctgttcttttctctaacaagaattgaatgaagattaaaatttttatggtacatttttcaaaccgctaaatggtgtgtttcgtgcaaaagctttttatatgaaagttgctctaaaatatcatattaatctattttttaagtttgtactaattaaaactcaatcaatcatacgttaataccacctcgttttgcgtaaaaaacttaatcttcatcttcattttcatcttatcttgattgcctgatccgatggctatcaagaccattttagaccttaaccaaaaatctagccatgttgaaggatttttttgtgcgaaagcatgaatgatgtattgttgaatactatatacatgaatacatccaactatcctacaaatgatttcgattttaggcactgaacctttaaaaggtacgggcggttttggggtatgctctaaacccaaaccttcttccgctctcgcacaaaactgacaaaagaaccctcaaaccttctgtcaacgccctgaagtagccttgatttgtttccagtattatgaggggacctgcagtcctgcaggaatgatgcattttggtgttatagttctatgctcacgctttatagctacattaggaggatttctgacgaatggtttttatatgattcaattttatctttcagtttttttatttttaattttctatgtggtgggagaagtatgatgactccacttttacagtagtagaggtagtttttttttataacacaaagttaagattttttttttgacattcaacagagataagaaatgctattgaagcattgagagtttgagactaaggcttaagtatgtctgcaaaaatgccacgccgcctcaccgcccttttgcaggcggtcccaaggggactgcttgcaaaaaaaaatcggtgtcccctgtggccggccgttatgggagggcaacggccgtctgccatatcggcaaaatcgtcttctaggagggcgagggcgatggcgtgactagttttgtaaattttttaaatagaaaattatttttgtaattattttaataataaataaaattaaaaataaaaaaattccacttaactgatcgcttaacgggcaagatgggcctccgctccactggcccaaccacgtagcaagctccccttgaacagagtggaattttttttatttttaatttttttattaaaagttttacaaaaataattttccattttgaaaattgacggaagtagtcgcctaccgccctctgggaaggcgatttttaaaaatcgccctcccagagggcggcgaaaatgacgtggcagacggccgttcgctctcgggcgacggccgtcaacgaaatttgcaggcggcccccttgccgccctccgcgagggcgattttgtactgtgcggggggccgcctgcaaatgggcggcgagggggcatggaattttgcaggcgacccccttgccgccctccgcgagggcgattttgtactgtgcggggggccgcctgcaaatgggcggcgagggggcatggaattttgcaggcggcccccttgccgccctccgcaagggcgattttgtactgtgctctatatttttgtataaatatcaatagttatcaaatctttttatatttaaaactatacaagattaaaatctccaagactggtaaaatacaattttattattttttagggcatatttggattgttaccgtacaaatattttgttaccgtacaaatattttattaatttttagggcatatttggattgttagtgccaaatttttcttcacgaccaaatatttggtaaggtaaaattgcatttgatcatgtttggtttgctgccaaaatgtaaaattgtagtgaagaatgttctacataatctcaaatctagattacgtattaccaatgaataggcttccattttcgtgtgttgtgtgctagtgggaaagaagatatgaagaggttgccttcagattgtcaattatatagcgtcgttttcactgcaatatatgtgaactcaatgagatacattattcattagatgtgacaagacgatcacgcgtgggcgtgattcattttatgtaaacaggcagcgccgaaagttgatagtgataactcgagctgccgcttttcatgtgtgctgttgtggactgtgcgcgctactggatctgacactaccgtgcagcgccgaaagtgtgttgtcgtgagcataagttgttctagcaccatatgaatgaaaagaactatgtagacgagacaaacacaagtagtactgcagtagtaatagcaaaagtagtactgctttacaagtttgtaagccaaaagaaacggtcacataaggactgaagaggtagaacactactgacgaggcctcttacccctgtccctcctaccctgcgccctaatgtgcccgtgggagtacgtgagtcggtccgggggtacggcacggccaacccgtcctgcctgtacaggtgtgacctctggctgctcctgagtgtgcgcctctggagctcctccaagctgagaggagcctagtacgtcgtggtggtctgcaccgtgcaagtcgtcgtcgtagaactggctagtaggaccagtcctaccggcgtgagacgaagaggccccagtaccgaagatcccggctgcaaattctgctggacaaggaccatcagtttcgtacaggtatttaacagtattaataaaaagtaaagtaccgtgtgggcgagggatcgacgctccgtgagaggaagagctggcgaacgcgcccgaagaggtggcgaacgcccctgcggatctcgtggaagcgccggtcgtgcctgcgaacgcgctcgaaggcagacgaggtcctgcgatgaggaaacgtgcagttaaaacatggtgacataatcgtgcaaaagctgaaacaaaaatgaactaatatctgggctgaactgtaccgtgcgaaaccggtgctgtaggtcgcactgatccgaagctaggggcgctcgaaggcaaacgaggtcctgcgaggatggatcatcaagttacgacggggtgatgttttcgtacaaaaacagaaacaaaacttaagaaacctctgggctgagcagtaccgtgcgaaataggtgccgtaggtcgaggtcctgctccgacggtaggcgcgcgaggccgtggttgtaccggaccagctggaggtacgacgtccacggcgctgcgacaggagaagacgcgcatgaccgcacgcatcttctcctgcatccggtcgaaggtcaccctctgctcaacgtcagtcaagtgcaaacctctgttcaacctcacttggactgcggtgatatcggcactgatatcccgtgcggcatcagcctatgcaagatggaaataacaaattcagtagttgtcctatattatgcaagataaatgaaataattgtaagaagtaatacaaattggatgtaccgccacgaagtagtctcggtcacggtgcgtgggatacgcgtccgtgacagcggcaacgtgcggctctggggcgtctggagtgaaggtcacacgcgcacgagtgcgaggaaggtaccaacgaaggtagtcacggtagttctcctccgtgtgtgggaagagctcgttgatcacctcctctgtagctaacacccagtcgtcaacgtactgctgtacacgtggagcccaaagtgcgcctgctagctgtccccgtcgagtcaacctgtgaagagaggtaaattatatggctcgatgaagtaattatcataaaaatttagaaatgaacaatccgaactcacgagtggtcggcagggaggacggtcggctgcacgttgcccggaaacacctgcctaagtccgaactgtctcatcacacgctgcgggcagtgaggctcaacgaaaatgtcgaacaccatcggcaggatggtgagtcagtaagcctggtcgcgtgtgcacaaggacgaaagtcctagcggtgctctcgcagcgacggcctcttctgtgtacggctcccagatgacgtcgctcggctggagacggtcaaactcgaacacgaagtctgatggacgaccctgacctccttctcattgttggtgggtcatcatgtaatgcaccaagaggtatgggaggctcgtcaccttcaactagtggtctgcgagattgctcatctgtttgcttcgttgtcaactcatccaacttgtcccacaactcattaaatttcttctcttggttctgtgcacagagcctcttaaagagctccataagatgcttgttcttgaattgcttgtagaaatttgcacccatgtgacgcatgcaccaccgactccgaatatcaggccacttagctggaagtcccttctcatcccaaccgttctgcaagtagtcaatagcccgcaacatacccgcatgacgatcatgtataaggcaaacgttgggcctcatacgcaccactgcaatgtgcactctctctaggaaccagtaccagctttcagtgttctcactctctacaaatgcaaaagccataggtagaacctggttgttcccatcacacccaattgctatcaatatctgacctcggtatttacctgtcataaaagttccatctatgcatagaacaggtcgacaatgcacaaaagcattgatgcaagcacccaatgagaaaaaggctctttgcagcacactctttgttcgatcatcaaccgatgtaaatgtatgtaggtcatagtacgtattattattcctctgggcaatggtggctaacaaacgaggcaaattatcataagaagcttcaaatgtgccatacctcatctcaatgatcttttgtttggctctccaggcctttgcatagcttatggtgtacttgaatttgttctcgatgtgcctaataattgattttggttcaaagccaatcttaccaacaacactgctgtacatctcacttgccacaaaagctgaagtgatgtttcggtgatacttctccaccccttgtaagtagcacttgtgctcggtcacaatgctaactttccaataatcattccatttacccttatatgcatggacacgccacggacaatcttccttcatgcacctcacttcatacacataatttgttgacttgaccaccctaaactctctctgcaaggaaactgcccaatgcttcaccgcctccttcatctcatccttatgaacatatcttgcaccctcaattacctcgttctccttatactcccagggtacatgatcaccctctgatataacaagtccagagaagtcctcatttgcccaatcagtggccattacatcaccttcctcatcggatgatgcgtcgtcgtccacttcctcattatccgaatcttccctctccatttcatcaacaattataccgactctctccccctcatccgccatgcccatagcctgctcctcccttggttgattttcctcattttgcatcgatggtccaacaacatcccctgcattgataggaccctctacatcttcggtttgcattgaaacatttatatctttctcttgtaccgacacaaatataacgaggggccatgaccgttcaaaagccatttccacataccgtctccaagcatcagtgctgtccatcggcattagttcccaaaaataaccttctgttgcacgactcactacaactgacactgacattgtgtagacttcttggtctattctaaatcctctcaacaaccaactataaattgactgaaatgttctctccgcaggcctatagatgcccttagatgtcattacaaaatctgacagatcaacaccatctggaccaaatctaatatttccttcaccgtgaactatctgaaatgtgaccttacttgacattgtgcctgatgaaaacaataactgcgttaacctcgcatttctgtactacgccctaagttacattctctacaatattgttctctaaatttctaaaattacgttacattctccagatcaaactaaactacaccttacaattaacactactgtctatgtctcaattcatactattatattctatgctctggatctacacatatgtgctgtgtgctacagatgtgctaaaatatatggaactaaaactaaaacgcaacatatatactcaaacataacatattagtacaaatgcaaaagatgtatgggagcatacctatgatgaattgagcgaaccagcagggcttcgccgctccccttctgctgccctcccctctctctcttttgttttttttggatttttagtgaatataataaaatttcacagaggagggactgggctttatagggggagaggcaaaaatcgccctcccccagggcggcaagggggccgcctgcaaaattccatgccccctcgccgcccatttgcaggcggcccccccacagtacaaaatcgccctagcggagggcggcaagggggccgcctgcaaaattccatgcccccctcgccgccaatttgcaggcggccccccgcacagtataaaatcgccctagcggagggcggcaagggggccgcctgcaaatttcgttgacggccgtcgcccgagagcgaacggtcgtctgccacgtcattttcgccgccctctgagagggcgatttttcccagagggcggtaggcgactccttccgtcaattttcaaaatggaaaattatttttgtaaaacttttaataaaaaaaattataaataaaaaaaattcaacagagtgtacggaccacacacttacacgtgggtcccagctaaaccacagggtccccacacgccagtatcccactcccccgcctccataatatcgcgcaaaccggtgtgggcactctctctctcctcgttgtccctcccgtcccgtctctctctctctctctctctctcttcccccgtccccacgtagcccgcgcctcgccccgccccgcccggttccaccggccgcctgcctcctccgcggcggccttccctcccaaatcaaaaccctagaccagccccccatcgccgcaaccgctgcttccacctcccagccagccacagatacggggggccctagctctccgcggcggccgccttccccgggagggggctgcagcccagagctagggttttgggggggggggggggctcacaccccccggggccatggagttcgaggcggacggcgcccggtggccggagccgcgaggcgacgctgccggggcgccgccgctggagcgtggcgatgcgccttcccctcgcttcgattcgtctcgtgccctaaggtaagcggcgaaccccctctctctcttgtctcgagaaataaaatcctcagacgagtgataaagctctcgcaccgtgattcgtctcgtgctccggtagaacttaatttatagggtttgctgtgggatttattattgtaggttgatgtgcttagctctgcttttgtacgattacgaatttggccaagttagagattttcaataaaatgcctgttgagtgtgtggggaatagtttctagtgtttaggcgagcactggtaatagcatgaatatggataaattttgtatacgctgccaataactgatgattggttttatacgaactactagatgctatctagcttttcagaacaaggaattcatattatatgaagtactaaatgccatctaacttttgagaacggggaatttattttatgcgaggacagggcagtgaagaaaagtctgtttgacctcattgtattgaaaaactcacgggatataatccatactcaggcactaatttaaattattatttgaactttgttgagaagatttagggtcaaaacacggttggatgcagaaatatttttgtttaaggtaatataatctatctgattgcatggtttggaagcgtgtactttgatcgaatatatcttttttcagggttttgcatgaaacgccttgatctcctttgacttgttaaagtggaaataagtttgttaacttctcaagcaataaaaaggacctaatttttaacatatagttcactaatatatctaatgcttatttctgtgttctctagttacccacggcagaaactattttagtgttcttattgatttctttgttgatggcagattgctgagagagcttggctcaaatgtaacagaagatttggttgtgctgatgccaaatttgctatcatttctgaaacatgatgatcctgtggttgttaatcaatccatagctagtgggacaaatttatttgctgctgtattggaagagatgacacttcaggtcttttttgtaaaacagatatttattaatgaataaatccattgttgttgtaattactaccgttgcgatgctggtattatcgtttgacgaggtttattttacttgcttctcctaattgttttgggagtatgtctcagaaataaacaaattgtgccaaaggaaatacaaaatattaaattgttttcttggaaaagacgtgtttataacctcagagaccagcacttcttgattgcaatgcatgttttgctctttcagtattattggaggcactgcataaacccagtactttgctgtttgctgttttcatttattctgtttcacatgttcccatgggtcagttttatgcaggacagatacagcctctggctatcataaagtgcttatgaagagtagtactgtctgttctctactgtcagtatgctaaaagtgctcggcaatcgcaaatcttattgtgataccactagagggtcaaaccatttcagatggtgcatccagtgaacaagcctttaaatccttgtgactccattaatactgtgtctagcttgcttctattattcacttttactcccagaaatcattttttctgatgatttaccaatggtctatgttctagacgattggtgaaggagcgtgctttgtctcgtatatatttgtgctagagtagttggaccagaagtagttgcatgtcagtttggtgctagaatagttggaacagaagctgttgcatgccaatttggtgttcttttcttaaatcaatcagttaaagtgactttactacagtaagtcgacaatcttacacaactatatcacttacaaagtgacaaaagattctgcataaatacaacataaactgtaccagctgtatacatttgaagcagtgtgaaaaatgtgtcatgtttgttcaattcatatttaataactagtgctgattgatactagcaaagaataatatttccttttgtaaactgtgactttataaccttgaagaagcttccaggaaaatgttatccactggatcacatgttaaaacattaaacttacatttgtactgtaattataaaaaaaatattactatcctaataggactctatgtgatcaagaacaacttgaagcttctttcagtagttaaaaactaattgagccatacaatgctcatagatttgtttgttagctatttgttttgactattttacaagcaatggttttgtgattatacccgtgaagatttaaggtagtattttacacagtagggtcagagaaaacccatatgttttcatttagttctgaaaatgcaaaacgttatgtagaatcactatgaagtaatgtctccctttcaaaattttctcctgattgaattgatgctacttaaagtgttatcactaagatattactgatagcttgctcttggtactcactttccattttaatgctgaatgtagattaataagtgtggaagggttgatgcttggcttgaagagatgtgggcttggacgaagcagtttaaagatgcagtccataatctgatccatgaggttagtagcatacaagttcatgcgttgcgtaatttcaataatacgttgatactgtggttgttctgttgtgtatttgcaagcactatttagcagataaaatgaaagtacaaaacctacatatatcaggttttttattatactgtttctctttattttatgtaaaactatgatctagtgctctggaaaaactttcttttgtggagtgtatttgtgactatgttgagcacagagcactacgaaagtgggaattattccacagtaatcccatccctgcccttgtgatatgatatgaagaaaaggagccagactacctcttctttgctcatcctactgaaaatacacagctttgtaactaatgactactttcctcgcaaaaaaaaaaatgactactttgaaacttgaattgatggtttagttctttgtttctgctcaatccaagactaatgctattcttcatgtgatatacaacagtctgtcccagttgctactaaactgtttgctgtaaagttcattgaaacatggatcctgtgtttcgcacctcaatccaaaagtgaccggatgcagccaactgaaggtattttaaggcagatttttgcaaagaattaatgggcataatgtggtcctgcaatcaaagtaatgaaatgtattttcgctgtacaaacaggaaggaacaggaggttgtttgatagttcaagattatctcaattccatcccagccttaaccctgctgttctcgaagctgatgcaaacagggctctcatcctccttgtggatatactgcagtcagcttgtgctcatcaaggatccttcctagttggcaccattaattcgtaagactctgtaccagttccctctaccttctgctcgttttgagttgtcgcctccatatatggattggcggatagctatttgtgtcatttataaactgttgtttctgattcagtttcattttatgcacagtagctatttcttatgttgtctctgacctgtcacacatctatagtgatatccccatagtgttgtactttgtgaagtgggtaccgtaacatttatttaggcttttgtgttctttacttcagttatataattggccgcaacagacatgggcagtgatgaggtttaccaatgagcaaagcttgcaactgtactatgtccatgtggttgcctgctactttaagattttaatgttcggaatgtctttttcctgttggaagttatcttactatcagtacaaccttgcaaactatgttgttatcttttggaaatataaatgtttgtcactttccagtcttgcagctattgcaaagaatagacctgtttactacgaacgcatactgccagtgctacttggttttgaccctagtttggaggttgcaaaaggagctcatcctgcaagtctgcggtattccctgaaaacagcttttttagggtttctaaggagtccttgccaggcaatgattgaggtgagctcaccttatagttatatgccatctttaccattttctagagttcaaagtatacaaaatgtactcatctatcttcttcttcttcttctttttctttttcttttttttttgcatgttctcctgtttagttttttaatccttgagcttgttttgttagtgttacatgcctacactagtagattctagtgcacggtccttgatttaactgtttaaataatcataccgaaagccattcatttcagtaaaaaaaaaagtaaagttgtccttgtggtttattgtcacgaaaacaaattaacttagctaacttgcaaaaatgtcatgtgaaatgattgtcacttgattaatgattatctaatgataaattttgatgaaattagttagtgacactgataatagatgtaggacgtatagttgtcttaatggctgctttccttacacatgaaggatggctgtgtataataatcaactaatgacttatatggtccagtttgtgcatttctgttctaattatttagtggatatctggttatcttctttcatctattaagttccatgtaactgtgccatcacatgaatgctaataatacttaaatactcgtagtatcaactagtgagctgtgtgagcttaaaatgcttcttggattttataatacatataaagtagcttgtactgcctcccattgctttttctagttaactaaatgaactgggttttttagctctgttctaggatctggctttactactttcccatgtctatataggatttgtaaatatcatgtttcctttcctgctttcatgttgtttgatggacttaactgtgttcgtgcatttaattgggccttgtatgctccctgttatttctgaaattaattgtggccattcttgtctggacagtccaaggatactctggtaaggcagcttcgtgttctgagccctggtgaagcaacagaacagattattaggcaagtagagaagatgactagaaatattgagcgcgcttctcgtgctagcaaggtaatgcctgtactgctgtatgcatatatattgcagcattaataaatttggtatttgcttttttagttttccttggttgtgcacgttcctttgaggaatgttaaagtgttcttttatttataggatgaaccttcaacgttggatatgccttacggagatgttagtcggaaatatcctgctgccagatcaagtgatgcttttgctacagctgatggcgtagctaaaagagcaagatttgatacctctgctgctttaaacccaccatttcagggagcatctgattattctaatatgcaggttgacaatgaagcgaatgtggatcattcctctgatccagctctcttgaattgtgatatgtctcctgttgagaagatgattgaaatgattggtgctttacttgctgaaggggaaagaggagctgaatcccttggcattctcatctcaacagtagaagcagatgtcatggctgacattgtaatagaaacaatgaaacatctacctgaaacttcaattctattagctaccagcaacaatggccagcaaaagaaaattcaatcttcctccagtcccctgacagaaaacttgccagcaaactcccactcaatgccctacagtacgcagtttgcacttcctgcagatggagtcagcatgtcaatgtcagatgtgcctgttgtgtctggcgttcatgattctaagcgtgacccaagaagagtatgatatgatctatctttaattcacattttttgcagtcaacagaaagtgcatattgtgaaaactgtcaatgtattgcaggatcctcgtcgccttgatcctcgtcggacagttgcccctgcagccactagttccatacatgtgaagggggaaaccaccggcgtgcatcagacaaataacttgtcaaatgtaccttatcctgtttcagggaaggttgaaaactctttagactattcaggagacctatctaaaaatgaagacgtgcagcaaacatcttgtcaacccaatcaatcactcccaaaggaaaatagtgagattttggatgatgccttggaactggagccgaaatttgaagtgcaggcattagcagatgttggatttcattcttctggtgttgataaagagatggtcaatccattgtctccagaagctacttcaaacaatgaattggatagcgtggaattggaggttgatccattttccccagttttgaaggcatcaacgctggaggatactactaatcatgatttgccagttcttccatctcatctggaattaagtgacgatgagaaaatcttgttgcacaaattagcaattagacggataatcgatgattacaagaaaaacagcgttaacacaagattttccctccttgctcatttgattgcccaggtattcttttggtactgtaatatttatggcctgacatattattacttgtttcttctctgtgacatatatgtttagtaattttaatccccaagctaactttgctagtgttctggaaatacttcaatatgtgctgttctcacaccaggtttctgttattccagagtactgctgatgacaatattatggatttgattcagagacacattatataccattatcatgatcaggtactttactgatagcgtactacttctttctttgcatttagcattatcggaggcggttatcatccagtgttcaatcgatcaaatttgctaggataacaaaacctggattaaaaaaaggatttggtttgggtttaggttctttagcatttaaacattggtattggttgtggtctttttatgattgtaatatgagtttagatcattctattttgtcagatatcagttaagaaagaaaactgggattagctctttttttatatatatatttggactgaacttgtggaaccaaatttcagaaggagctttatcctgagcacaacattatgcttgaaatatatttcgaggtgtctgagctggatttgtttgaatatgcataacgttgagctaacgtcatttttgcccattctatcctatttgagctatatatcttttggcagctgttgtgtttctctagggttctcaaccattctagtgattctgggtttggtggactcacatgtgatatcctattggtgaacgtcctgtctgtagtgcgcttgagctaattgaagcttccttctggttgaccttgtgctggttaatcaaccttgatcagagagaaagacacacacacacacacacagagagagagagagagagagagagagagagggagagagagagagagagagagattttaactgtgtcgagtttgctcagtttgtcttgtctctagctgcagttgtcatatgcaaatttgagcccctaaatgtcatcacaatccatggcaccacacgttaggtgcttcgtaactatcattgcatgactatttaacttctgaagcatgtgatttacagggtcatgaactggcaatgcatgtgctgtatcagctgcacagtgtgagtgttgctgattcaccagaaagcaccttacctgcttctaaaaattatgagaacttctttatatcacttgtaagcaagaaaactttattttgatatttgttttgtattttctctgaaggttgaaatttgggtggtattaatatatgttcattctttcgttcttaggcaaggtccttgattcactcgctacctgcttcagacaaatcttttagcaaatttctgtgtgatgcaccatacttgcctgagtctatgcttaaattactggaggatatttgtgtgtcacaaggcaacagccagcaaacaaaggacagtgatggtgatcgtgtcacccaaggccttggaaccgtgtggagtcttatcttagcacggcctccacttcgacaagattgcttagatattgctcttaaggtttgcattttcttttcctttttaactggtagatcttatcataaatcattttgagtgattaatttttttttgacatcttttcacattctaatgtaacgaaaagggtaagacaacttgaattaaacctgcttctgctttttacactagaagcattttggtgatgtgtatatggaaagttacttttgtctgtatgtctgttgcaatccaagattaaacatatttatggctgatatgtttacttatttttgtgaattaaggacaatgttgatatgggtttactatgtgtctatgttcacttatcatgtttcctgtattatgaatttgcagtgtgccattcactctcaagatgaagtcaggggaaaggcagttagattggtctgtaggatcattgcctctatgcttatgttctgttaatttgccatttttttatttagtgctggttttgtaatgctaatccttgtatttttggtaggttacaaaaaaactctatgaactaacatacgcatcagaaagagttgagcagtttgccatcgacagtcttttggcaattgctaataaacatggtgtggagacggacattaatttcacatccttgaaagaatcttcacctgaggtaattcttgatgattttccttgttatgcttggtgctttatcatgcactcagactcaactaggagtgggaactgatgtgccatcctaattgttctatttctgaactcaacagtagcaaatgcaatgtatggttgaggcctacatattttctccttaacgatagtctattctgtttgtatttgttttactgtaaaaaaaaatatggacgtcaggatgggaactgttactgtcccatccaaaatattgtattgtccacacttcaactctagtttgataaatcaacattagtatttttgttgcagtgtatcaaaataagtaaacaccttttcacatttaatgtcaattcatgctcaagcatttgcccaacttactataaatgttctgtgggggttaattatgacacaatcgagtgtagcccccccccccctcgccgccgcacacaccacacacagaaaaaagttagtttagttgacttctaatatctcctcctaatcaaaatttcccctatacttctttcaattttccactgtagtttgactctcaatgatacaagagatcaaatgtcctaattttcttcagatgccattgaaatgtcttaagttttgacatatacactgcattttgattgaacatttgactgatattgaagtttttttttttctgaaagcagtttgaggcaggcagccaggaaacttcggttagtggctcccatatttcagatgctgaaccttctgaaagtacatgcaataagaccgatttggtttcacctaagcaatctgcagtatctgtatctgaggccaaacgccatacttcattgttctttgcactttgcacgaaggtctgtagatgtaaacaatgttagcttgttctgttttttttttctgccggaggtagtaaaaccattttccttcttccagaggcccattcttcttcaacatctgttcaatgtttatggaaggtctccaaaagttgtcaagcaggttctactttcaacttctaaagtcctgaattttgactattggatcacaaccactgtctgctcattacgtcgcaaaatcatgcagtgtatccattggcatatacccaatcttgtaagaaacctgggatcctcatgttctgagatgctggctattattcataacccacctgaaggcagtgaagagcttgttaccttggtattaccatcctttctcttgattcatcattatgcattattgaagcatggatattccttatactcattatcttctcttcttaaagatattgcaaactctgacagaagattcaactccttcagccgaacttgtagcggcagttaaacatctatataaaaccaagctgaaggtttgaagaatttctgcctgctctgtgctctgtgtatcatcatactgcaaattgttttgtttgtcgtcttagtagtattggttatttagtgcttttgctgaatcttgtaattttctctggcaggatgcatctattctcattccgttgttatcctcatttccaaaggaagaggtagtggtctcttgtattttgtttatgcatcttctaactgtctaactgtctagttgcttgttatctgagaaatataaatacttgccttgccatgataatgtttgagaaatagaaatacttgcatgccttgcacaatctggattgagttgtcaggatagctaatttagtcgctatgcaatggcacttagaaattggctggtggcatggaccacttaattcagatcatgcagtgtgcagtttgtaattctctccttgtatatgctactacctccgtctcaaaatgtagctatttctagcacagtactttgtcccaacatgaagctatttcttcagctacttcctcctctcaaccaatcacaaccattctccttcacctactttctcttcttgaccaatcacataccttgtccaaccattcacatctacttttttaatatccacgccaacctaaaaaatgcttacattttgggacagaggaagtagctcgctagattcactactccctccatcccaaaatccaaaatacacttttgaggttttccgtggagattaagtaggtcgatttgaatgaggaatggttgtgattggttaagtggagggagtaggcggagaatttgctatattttgggacagagggactataatatttctagccaaaggttaaaaaaaaaataatttctgctatcatatttgtgataatctgtccaagtccaagcaagtagaattctagctgatgcaccgaaggtctaagcatcgattaagatttcatttctggtgactcataggtattcagtttgtacttcgtggatgctttatcaggctgtagactaagaataatcgtagggtgtcaacctgaaatagttctaatttatttttgagttacacatcaatctagaaagcaaaattatttgcagttgataataaatacgtgccaaaagtcattttgaagttattatatcggattttggaatatgttttatgttccgttgtccttttgtttataatctattcttctcaaaatcatttgtttatgtctacggagtagcaagtactgaatgcttctcatgattgtgaacttaacatttttgtcatcatgatatggctgcattttgctgcacatattgacctgattgttttacactggtcccaggtgctgcccatatttccaagactagttgatctcccacctgatagattccaagatgcacttgctcggatattgcaggtgatcgtatttgtccttattcaacattcagttaatagatattacatagatcttacagaattatgcaattgtttgagtagaattgtaactataattgtttgagtagaattgtaactatggaatatatattgagatcatcatagttggtgacaattaatcatagcatctcatttaactgttgagggaagaattttgccgattcaaatgccagtatagaaggatagggagttactaattatcttgattcttgtggcacatttggcaagtgattgtaaattacttgcatactaacgcgaaaattatttaatatttgtattgacaggaaacaaccatgtcaatgcttattattaactatgcattttgtaagttgatttttattaggatataaaaattttcttggatggggtttaagtaaatttccttttgacagggatctgctcatactggtccggctttaacccctgctgaagttcttatagccattcatgatattaatcctgaaaaggatagagttgccctgaagaaggtgagctattggttatgttgatgtattcattatattccaacatctcaacagcataaattagtgcccagtacacaaattggatgtcttgatggattttgtatcaagagttcaagacagacatgcatatgcacctgtgcagtagatatcctttttcttggttgacatgagttttttctcgtttctgatggaaatgaaaatattttcaggtcactgatgcttgcacagcttgctttgaacagcgcacggtatttactcagcaagttttggagaagtcactgaataaattggtactaacttgactgctgttattctttacctattattcttttacatattcttctctttgattaactgtttggattgttatgtaggttgacaatgtaccaattccacttcttttcatgagaacagttattcaagcacttgatgctttcccagctttggtacagtgatttccattctaatttatgcgcaatttatatatcttgttatatgttggaaggttatttgctatcacttttcatatcattttagaatatatgaatatgattgtctatcagtaagatgtaataaaatatattttccatatagatacaaccttttcttgtcatttttgtttttttattaatattccaaataaacctctttaggcaaaaccatatgaaaaccttaaaatattgatcattatttttttcatcaggttgattttgtcatggaaatactctccaggcttgttaataagcaggttagttatggtacattatttgtttgattttccttgccagctactgattaaccattcacttttctgcattatcttggatacctgtctgtgctatatctaatatttgatgtttagggcaagatttgctcaaactaaatcctgagattctgactatcaattttatattagaataagtttatgatattaattattatgatagtacttttcgaggcaaatctacatatatgatttcttttgtttttaaaactaagcgtttgaaaaaatgttgatggttgggttttaaaagtttgactgaatattgtcctaaacatcaaatactgaccagagggtgcccttaagtgttgtaacttaacatccgtagtttagtcacgctccctgtacactaatcatgtgtatgaaaacacaaacttatcagtgcctcaacaaatcaatgataatgctaacattttcatctgtcacaattcttattgttatcctgtttattttgcgaaaacagtaggatggaatttctttgagtagttcttttgtttgcaatattttttgagtagttctttatctgctgttcttaagcttcatgctatttttcatgctgcagatatggaaaatgccaaagctgtgggttgggttcttaaaattggcatatcagactcagccacgctcgtttgatgttattttgcaggtacaatgttaagtaactgaatgcattcttgcatgtatgttataaaaaatatgcactccttgatatacaatacactactgtactgacatggcttcacaatgctacttttagttacctccaccccagcttgaaatagctttgaataagtaccccaatctacgaactcctctttgttcctttgttaatcagcggaacatgcacagcatcttgcccaggtactttcccaatattattattagtcttgacagcttgctcctttttcgttttacatttttgattttatgggcagtaaatacttaagcatatagttaccaccaacagactgattcaccaaaaacgactagttgacacaaatactagcagagcacccacttctcaactgtttattgccttgttttatatatgagtaaatttcacaaaactacaattatttggtcaaaactatcactttgttacaactttagctgggtattttacaaaactgcaattatttggtcaaaactgtttcattgggtcctattgagtctttgatcagtggcgcgttaatacacgatattctgcaaaaagattccatagtatcacttgtcttaccttttcatattcataacatgccttttgtcattgatttctgcaaatgcagacagattttgaaagttctgggcttcatcaatgaaccgcaccaggcaccaattccatttgtgcctgctgcaatgcaaacggcagatgcaacctcctctcttcctggtgcaactcttatgtgaaatgtgatgtataaactccaatcagatgcgagaaggctttcctgatcacaagtacacacactgccttgtgaacaacgatgatatgtgagtaaaacagagcccagacaaggacagcggtgtcactcaaaagggtctgcgtttgctggacttgtttcaaacaaagttacaggttgtcagcaagggataccgaggtggtttcttaaaggttcattgcgcttgtgctcgaggggctcctatgattttgcagcccgtgcaagttgtacagtagttgtactctttcgtcctgcaattgcggactgaggcttctgtgacaagcaaagaatagaaggaatattgtttaggacgatgatatgacttatcatcatcatgtcttccgccaaggaaatgacatggttgcaagctgcggcaatgcggcattcctttccgagctgcacggagacggcatccgactgattggctaaccatttcttctgttctaatgctaacaatgtctgagtattgtacattaactatttgagtccgctgtcagccgatgttaaacctttcatctcagaagataataatttatagatgttttgattgactagcatatcaaaggtaatagacaatattagcgccgttgattttcttcggtgctgcgttactttcgtaactgcgtagtgcttactactccaaatttccagtaagctcggggctcgtttcctaactcatcgatctcgttttgcacgcgcacgttttttaaactgctaaatatttttcaaaatgttaaatggtgctttttttttgcaaaaaatttctatatgaaagttgcttaaaaaaatcatatggatctttttttttaaaaaaaattagctaatacttaattaattacgcgctaatagactgttccgtttttcgtgcatgaaacttgctctagcgaacacagccatatatgcagacatgcagttgggcaatgtctttccctacaatgatacaatagaaaaacaaattaaatcaaacaaaaaaaaatctaacacatcagataaatccgttcgaaataaatagggtattgctagattttaagcgaactaaatttgtaaaatttaaatttttctaagtgaattgtaattttgcactttggaccatcttttattatctaatctaagtttcactttaaatcatctttttattaacatttgctcttcgtactacgtttttcttttgtcttttttttactgctctattcatgagtccaacgataaccgcgaggacatcgtcactgacttaggacctgtttatatcccttggtaagttttttcacactgttacatcaaatatttagacacatgcatgaagtattaaatatagacaaaaagaaaaactaattacacagatttgacaatgtgatttgacaatgtgatgctacagtaaacatttgctaatgatggattaattaggcttaataaattcatctcgcagtttacaggcggattctgtaattttattttgttattagaccacgtttaatacttcaaatatgtgtctgtatatctgatgtgacacgacaaaaaatttcactcctacatctaaacacaaccttactcatgttgacaatcttcccagtttacacgcatgtcacatttttgcagagggagaagttggaagtacctaggaaaaagtgttagggtctgtttggataatggaaaatgggggatgggattgggattgggaaataaatgaagggttatgattaaatgaaagagggggaatgaatggttaggatttaaagatgttttttggtgggtggaaaattatttaacatttccattagacaaacattgcctcggggtggtcaaaattacaacaaattcaaaaatacctagtctaaaatgaaataattgaataaatggattgccgaaagttaaatttcggtaataaaagattgccaaagtgtaattcacatcgtaaaatcacactttcctaagcctaaatctgtagtactacgtaaagtaacaaaaaaaaaagttgtactccgtatggattgtgtaattttacttcttttgactttaattttgttgttatatatgacttttatcagtttgaatttttttcatgtattttttttcaaaaattaagaatcataaatttatttcatttaattttataatttttgtatggttaaatatcttgttcaaccatttatatgggaaaaaaggagaagtagtgagataatggcattttggtacttttgaaatatgccaaggatttatagatagtctccgagtgtgtgagatagtagtcatattcttctatttcattttatccacatagtatatttgtttccttccttctatttatcatgaattcgcaactctcaggttaatccattactaaagagcttattcaacttattcatataattgtttactcctacttcaaaaaatacatttattcatttttaagctattggttaaatttattttcaaaagtatttgatttattccttttcgaacggtcaggccgttgccgacgttttatattaagaagaaggtgttccattttaaggagaaaacaggaccaaaccttacagtgtctagttaattaggaaaaactgagcgaaaactacaactacaacaccacatcaatagctaacctaacttacactaccatgacggagcccaacataagacatcggtcaagcttgccatagaggcgacacggcaacccacacatgttatcattgccaagcttaccacccaagcgacacatcagtttcgacttcactgcaatgctaccccaacgccaaataaacaaacaaaaacgacacccatgaaggacatcagcccaaattcctacacacagttagcatcaacaaccctataaggagatcgcggtgtgtgtcatcgttgccaagtttcgtcgcacccctacagcaaagcagctccgactctacccagtagtaaccaaacaaggatgatgaatacctgccacaaagcaagaaatgaaaccaaggcggcaaaggcctcgtcaaacacactaggcttgtagagcttcaaaggcattgcaggagcccaccaatggctaccgttgcacgcggaaggttcttggtgctaagagaagtcaacgccaaaacgacacctccaaggagggaaacgacgcctaatggtgccgtcgttgtcataccggcccatgccctagcaaggctttcgccagtgattcccaatcaaatccctacacaactgtcctgcccaacgaccgttgttggaccaccacgctatcccttcagcgcccctgtgcgtatagtaaagtagataatggtataataaagtagataatccgagacgatagtttgtccaattatctaaatcgaagcatgtgaaccgtattccagcttttgcgtgattgaactccgaaattaggcgaatcatattgatttcagatttgacaggctagctcaaagatgtttattaacgtgtgcttctcgacgccactgtcagccgtttggggtcgagctacaatttgagcaaaggacaccaccggcctttgttgtttaactgacagtattaatacgagttatttaatgcatagatcaagagattacatgcctcccatagttccatcgacagtgatactaactatgagttaacaattgaaccagaaataagggccctttaaatcaaaagatttatgtaaaaattttctaggattctttctatatgatttttttatttggccctttaattcaaaggattgaagcttttcgaatcctatgaaattcatatggtcatgggtagcaccttaggtcttgggtttaactcctcatgggagcaaatttcctaggatttaacggcatcgtgctttcagtggtaggtcaatctccaggatttgtcggccaagtcttcgaagatactcataggggtagcgcttacgtgcgtgcgtttaggttgcgtgcgtttaggagtgaatgtacgtgcgttgtgagtctctaggttatattgcgtaattctaaaaaaaaaaggtaaaaatggagattttgtggtaaataacagaaaatgatgttccctgccgatgtgaccaaaaatacacccatcgacatttcgatgcaccgatatgcttggttttaagttattacaataaatacacctacttaacacccacttaccaagctcatgccatgtgaatgtgatttacttcttttgatagaacaccttttctgattctacatcttttgcaaattacaatacttaacatccacagatttttgtacagtgttatgttcctaaatcctaatcggtcatctacttcaacatctactcgtaaatcctctactactccgtaggctgtagaagttgaaccaattacccgggcggccggcacgttccctaatcgcccgatctaaacaatacacaaaaaagtctcgacccgtttcgccccgaccggtcgccgcgccaccacccactccccctcaaacaccggcggtggtcatgccgcctccgcctcctcctccgccgccgccgccgccgtctcctcctcgccttcctctcaccgcccaccgcctccctctcccgcccgcgacctcgccccccgcctcgctcctcctcgcgccgcgcccttcccccacccgcgcgctcgcgctcctcttcccggactcctccgcgcgcctcctcccctccctgccgcccgccgcctcgctccccgccaccgccgtcccctccccgctcgccgctgccgcctgcttcgtgctcctgctgccctcctcccacctcctcttcctctccgcgcacccgtccccttcctcccccgcggcccacctccgcgcctactccctcgcctccggccgcttctcgcccgccccgctctccttcaagcgccaggcctccgcctcggggctgcccctgcacggcctcccgttcggcctcggcgtccgcctcgccggcggggtcaacgccgtggctctgctgtccctctccgccgggcagatctgggtgctagccccagggatggctgcggacgggcgcacggtggagctgcacaagtgcgcggtcgtcgagctcgagccgtcgcggccggtgtacgccatggaggttgccatggggaggctgctcctcggtgaggctggtggtttgcgcgtgttcccgctacaaggcttgatgaagagtgggaaagagaggcaggtgaggaaggagggtgcgggggcagcagtaaggaagagcctgcacaagaagaatggaattcggaatggttttattgtgccaattgggcatggcggtagcgagggaggtggcaaacgagaagctgtttccactcgtgagtatccttaattttccttgaagctttgattctagtatttgattatcttagtgctataatgtgaaaaaggttgatcactatctttgtgaatgacacctaggttaggtagtatttgattgcacttagaaaaagtgcaggatataaggtagctctaatcttcttatagtgttgttgtttttgttatgtctgtgtctaggcaaagcatttgagtgttcacttagggtcgcaatagagcaagtgtagtgtggcggaggtaccgatagaacaggatataccttcagttgatttgtgcaaaactgatgatttgataaaataatatttgccccaacacaaggagcaaagttgggaactatttttcaatatagtatattttttctttggtaaatcccatgtacatgccctttgtagcagaaaactacgggttcacaaatttcacataactacatggagcttgatagtactattaagtattaacacaaaaacacattgtttgatacaggatttgtgaaatttgatattttctgtattataactctcaagtttttctaacaattatataatactttctcagccccattggtggtttcatgagcaaaatgtttttttttaagaaactgataacaattgtttggtgtactactttgtatttaaggctaatatttgtaaaggatgaatggagctaaataattgtctctgcaacatgctgatattttttttaactctaacatatctggttgttaaagtccacttggattttgtttgcaaccttgtagttcaaactgctaccttattccttataatcatgatctgtacaattctatcgattgatcagtaacttttgatggagttaatgaggaataatgttagaattttctttctgacttttgtgcttttagctacttgtaggtgcagacataagttgcatggccaattactagggactgtaaaactataaatttaacaaagagtgcattatatatattttgtctatggctaattttacaacaaagcgaagaaagagaacatgaaaagaagggaaacccaactgtgtaaaaacctgtgatcatgttttctaacaactaaaatcgctgtttatcaaccactcacgacgacaccgagatcttcgacttagctcccacaggtcccaggctcgtcaccccgggaactcgcagcccatcacaactactcatactaggagccacctagctagaatagaaggaagaatctcgtaaatctagactatgatagtgtactcaacttgcagttttccaacagtattaaccatttgttaaactgccttcatcagaggatctagattcgatcacacaacccaatcatatcgcaatacattattctgaggtaatacttaccaatcgatgtttggtttctttcagttgtgtcaatttacaggcatgactaagaacaaacttacagtagaattgctgctatttttgggattagttggttagtttttactatgtgcatgtataggctatttgcttgcacagacttttcagctgcatttcactaaatcaactaatattagtccaaaattactctttcaggtaagctggcaactttgagagtaaaacagacttcagggagctatttctctttcttttcctcatgtagttctgaggatcatcataactcacaaggtgccgtagaagtgaaaaatgtagtgaaagttgtttcaatccgtcctctttccaaggacaagtttttggtccttgattcagctggattgttacatgtattcagtcttcaaaacaaagaattgctctcagaagctactagcaaaagatatagtggaaatcacacacactgtttggataatgccatgaaagtgcagctatttgctgtctttccaagtagctctacaagtgagtttttcatcctggatttgttgtttttgcatcatggtggtttacttcattaataaatgtgttcagagtgcttgtgcagagacagaaatcttttggatttcggatggtgggcattccatacacataatgtcagcacttgatgttgaaccccccaacagtgataatggaggtggtgatggagaaagagaatcaacaaccattaagctcacaggtttgtgtcgtaggtccttttttttttgtaccttaggcctttatttgtcctacctgctattttcaatcatttgattattagctcaaccacatctttagaaactgctcagataggcaagtttctagaaatttctaatttatcatgtaggtttcatattttattaattgtttttttaaaaaaaaattattgacctgttgtgttacattataaagtcatcccaggccattaaaaactgagtagtgttgcctattaagtcatgcgtgttggttaagctttccccagttagcatagatgtgcatgtttaacatcatcaggcttgcaaagtaattgttttaaaaaaccagcataatgtatgaagccctctttttcccattgactaaggtagtgagcttgtttgtttgtttttatcaggccatgatctatcatttatgttgtaactctctttctgtcatgttttttatcttgtgttttcttgcagctattgaagcaatctttacaagtgaaaaggttcaggacattgtgcctatctccaaggattcagtccttatccttggtcaaggtaatattcaatgatatcttgaagattgacattctagattgccatgaatctggatagtttgcttatcttcttctaaacctcctcctaacatcataaatattgtgtttgcaggcaacatgtttttgtatggaacttcttgaattttgttgattatatcatatattcggtaaatctatctgaaaagcttgatgtcattttagtccctttttgctctcattggtttgcctgcaccaacccacacattatctttggtatcaggtgggagatgtgaatgtttgtctagatcatgaatttgcagtttcgatgggtttttggctgaagacagggtgagtttggtgactacaaattgctttcaattatttaaccacttagagtacgatacttatttcttaaattccccccttctcttccatgatgcagtgttggagattttgaagaatgcagttgttcacctgtctttgaagtcatgagtatcattagtctttaatttcagttagcagatgaaatactcgagacttcaacagccagcaagagttgaaaggtgcaggccgttctccatcttgtcaactgtctgaaagcaacattacaaaactataggtctttcagcacagttcacaagccacagcaacttctgaacaggtgaagccagattattcccagaatacaaccacccagttgtttttgcatacacattttgcgtgccaggacaactgcagttctggttgcgatatctggaagaagataaggctgcaatcctatgcccagctcagctgttgtggaacgtggatcatcatcaagtgggtcggttatgaagctacaggtttggtgctccacaaggaggttgatcagttcagagactggaccttgagtccatggtgtcctggagttcagcgagtattttcgttccaagtgccaggccccgaggacttcagaaaccaataatgtatttgccatgttcaatgtcaggttttcacaatgcgcacgctagtacggtgtgagcttgcaaacatttacccgttgtgcctgtttctgaaatcaaaatctagttatttgccccgtttggaaagtttatttgttggctcatattgcagcagaaccttattatttgctcgaagttggattcgggacttcacgtcttccatggccatagaaattgtaacgctcccttttaaattgctagctccagtggcctcatatttcaggtgggatatcttcttccagcatcagaacgtactgtaccaatcatctgcacgatcgcacattcacaatggactagaatggcagcaaccatcaacccatcctttgttcgcccagccgtcaaatctcataggctgttcactctgaattctgaaaaccttacgacggtttgacaaaatttctcaaacaatctagtatatatatacttcaggtggaatctcctccctacatcatcagtagatcatccgaactgtgctgcaagcccgaaatgcatcctaagcttaccacagctgacaaatctcataggctgtttgttcattctaattctggatcctggaaccagacgactgtttgacatatgggtccccatggattgcttacgacttattataagccgtaatgtcttattagcaattaaaaaaataatatgtgagtaaaacttttgtatttatgttcttagagacttaaaggccaaagctgaaaaataatacgttgaataaacatcaaaatcaaattcaaaattaagttttaaaatttaaattttagctttggcttataaaaggcaaaggaaacaatgaagcccatagcccgttaggagtactatgctttccttctcacgccgcgcgagagaggggaaaagccagtgaagatggtggccatggccggcggcgacggcgcggggcggcgtttttcgccgtcgtgaggtgctgctttgtcggcttctctccgcaagacgctcccggcccgcatccgcgccgctccgcagattagcgggcgcatcggcaatgcctgtgacgggggctgctaccccgagtgagggctaggtatttggtcgccgagaatgcttccttgccttgatcagtaactaggggactgggattcgggaatgctggtaggtacgttcttcgcctcctcccgggcttgctttttgtggagaatttccctaatctagtattctagtgataatatgctttaaactgtacatcagtacatgttgtcctaaagttcatattacttcctgcatctagaacaccctattctaaagtgatggatggttcaagtatttccctcttagataatcatgatttgctaccttaagttgtgcgtggcctgtttttatctcagagctaatctcgcacggcaagacctgattgaacgcataggcattagctatttatttcctgcctttcgagtagtaccacactagttcagcttctgaaagaaaagaaaagaagctgcaaataggctgggcactactagctttatcacagaatgtatgaattttctttcttgatgaaaaatgaaagcagtacttgtcctctgtttaaaaaaagttagcattatgccgttttgattatttcatgataaggttaacgttctgtatgtttcaaggagaaattcatgtctcatagtattggtgattcttcttttcagttgctgctcaaagtaataccagaatatgttgtcagtgatattgtgacatgttttttcaaatagtaagacttgagctctactcatcagttcatcaaggaaagatgggactatgaagactactctaagcaggtaaaagtaaggctgtgtttagatccagaggtgaaaagttttggcgtgtcacatcggatatacggacacacatttgaagtattaaacgtagactaataacaaaacaaattacagattatgtctgtaagctgcgagacgatttttttaagcctaattaatcagccattagaaaatgtttactgtagcaccacattatcaaataatggagcaatagacttaaaagatttgtctcgcaatttacacgcaatctgtgtaattagtttttttgtctatatttaatactccatgtatgtgtccaaacattcgatgtgacagggtgaaaagtttttgtgtgggaactaacagggcctaagccaaaattcaaaagctacctagctttgctctgtggcataacctgaccctgtatgcgaaagcatttatatgtcaccttttgctagttgattagttgatcagagcatttttgctgcaaaccatcttctcaagccttcaacagagcctcaacctcctcctgcactatccatagttctgcagtgatttgcatttaatgaaaagatatgtctattcctctcttttgattcattacaagcgtgtggctcagatttgcaatttgcaactgatactacttacataaagccttttatatggacttgtcaattgtaaaaacctattataattcctcagagttcttttcttctgaaccattttgattagtttccagatgcactaaagagggtatttcaggatatttcaccaggtgagctccattgcttccacagagagtagtaatttgacttgaaatgggggatcca

SEQ ID NO: 7139 - DNA, 11031 bp, Oryza sativa
acggctgcgccgcctgcggtgcaggaatcggagacgaagagcggtggggtgttggtcaaggatgtggtggaggtgtcacggtctctgggtgcagctgatactacagaggtattactgttcgcgatcgagtgctatgccatcggtccccatgttttgaaatcgagaggtctcatttggttcattattttttcccttatgattgcaggtggcccggggacctgcagtggctgtggctgcagcagggcagcgggcaacatggtggaattgctgtggggtatttgatgcgttctctggttcggagagatagattaaggtctgtatcgctgtatcatggtttatcttttttttttatgatgatgatgctttgtggaaagaatatatcattaccattactgttagatgtcattggggaggcttaaaataacagatattttactaaattgtttgtttcttttaattttctgtcctttgctcatgctctaggactatttcgatgtttgttaatataagcaccgggcctgatttcttttgtaggaatgaaggtggtactatagctgcgtttatgcctttttattcatgactaatgttattagcagcaagattattctatatgttttataattgcatcactttgcgcttctgtgtgctttgctgcttgttttttcaaatggctaccatatttttaacctagtcagagcaatgatgtcaggacaccctcttttccttgtttctaaaaaactgtccagttcagtctcctgatgtgcctgtagaagggagctgaagaatgttaatgactgatgacttaaggttgtgtaaggcttatcagaccatattagagaatacagttatacaattgtcaactaatctcccaaagcttcatgctattttaacctttcaatgcctttttttttttaatttgattgtcaatacattttttcttgtaaatgcttctgtaaatcattggactgtttaaggttgcaacatctagctgatcaaatagagttttcttagtgtttgcttttccttaccaagaggacagtgaactcaaaactaaaactaccttttgaaatcagatgcccagtgtcagtaaaagctaactgaacataattttgataaaactagctgtatgattacgatcaattttgatatgccacgtggacatatttttttagttttgaatatttggatatgcttgctatatgttagtcaatttgtttgcagagaatctgttagttgcttaagaaacgagatacccggtatagttatcgagtcatttcataagcagtgtttgttccaatgctgataaactaaggaaggatgcacaatggtaacactgtaactacgagaaattgaaaacacatgatttatttgatttgtctgttgtatatatgttatgcacatggaacatgatgccccaagtttacatcttagtggagaatagtcatgctatgcatatgaacatgattggagttttacatgttctaatttgttttccctgttgatttggttaaatcaagttttaatttccaaaatagctgaatgatctctcttagacttttacacgtaattatgttctgttggcaatccaacttggcatccaaagagactaaagtttaccctaccattttgctaccagcaatattgtgatgtctaccacatgaaaatacgaggatgcaccttttgtattctgaactatttctctgctctttttcccctcatctttaaaatggttacctctgttcctaataacaactattttgtacttgtggataacatggataactatcatagctggccaattccatttgagatacagtccagctgtaatgcttggtatgcttgaggttgtggataccaaacctctcaaatttgtgtaatgtcaaagtgaaattggatgacaatcgtataggaaatgactaaatcggaatttttcttgggctcagatgatttatctgagaaagtactaagagcaagtttaataatatagccaactattagctctaaaaaataacacatcatatatagctaacttaataaaccactcatacaatagttaactatagatacgtatactgcaccattattgtgcactccatatttctctcagttcttggagcacgagctgcaatctgtagcccgcctttcatctcctcttatttcttctccacataagcacaaatatgatgttgcaacatgtagagcccgcttacatcatcttattatctttgctctaatgggacaagatgtttatttactattttggtttcgtagtatttattactgagaataacatgtacttctaatcttctatgttgtcttaaaagttctcttgtttttcccacataccaggttggaacttggaagccaagaagacagtagacgcgaagttgttcaaagctgatggtaattgtaactagtctggtttatgctcatatgaatggagttgaagaatggataacatcgagctgatgtttctctctggcccatgtttctacaccgtgctgtgcaaagttacatccccttggttgtggttaatattctcgagtcgcgtagtactctgaaatctacacccttgtctattatcatctaggttatgttcatgtagcataagagttgagttgagtcgtcagcaaagaaattttgttctttctgtttcatacttatttttttttggggggggggggggtgtcatccggtttgcccccttctatggttcggtcaccttgaaaggagtaacgttgaaactatttaggtgttccattgtgtagtcttgctccgtgatagctcgcaggcacatcagactactcactatgaaaaagaaaataatgagacgtgtgggttacattcattgattctgctcacttccctgcccggtatgtgtcatcctgtcaaaatcctggcatggcatctatcgtgccattgttttcatggctccacatggtgtttgctatacgaattttatttagtaaaaccggacaatttgttcgttgaacaaaggggacggtccggaatgatagcgtctctgcagcggctacctcctaccggtgcaagaaagctacagccttgtcggcttgaacgtcacgtgcaaaaatgtagtagcagcatgaatatattagtagcatggtgatttcttattcttatacgtgtatttttgtctgaaacatggtactccagtaacatttaatgaaattaacgacgtttccttggaaattctgagcacaaaattgcatgacacgtctgcgctgagtcagtctggtggtcctaattaactcgggggccgtaatttttcattcctccatcctactagattttagcgggtcgtttttaagaggtgacatgacacagcgtgtgaaccagaatatttcgccctaatcatcagttttccagagccgtttgtggccgtgcaagcttactggtcgctggattgtttgatttgcaagagcaagtggcaaccatccaaccatccaaagctctaacagccacgagctgtgtactatagtactccgtacagcgacatggtcgattcgtgttcatggcgacgatcctggtatccagcctttcggtcacccggacgccactgaagattctttatatcatcggaaaacgatagtcctctacgtagtaaaaggactgcagtaactacggtaatttccttgctgacagaaaccctcgcaacgtgcttttcgccagcgagtggtgtaattttgcatttggcgaaattaatcactccgtggaattcagaagaaaaatacagagatcatgagatttactggagacagggattgttcattcttgcagtattaccatatgagtgaaaggagaagagggatattctcaggagcaaactcttaatgattactcaaaaatttaactggtggctgtggcgctttgtgtctctcactgaccgactcgtgctgccctttataatagccacggaattttagcacaaagaggcagacacgagaaaagggaagatacaagtgtcatcccgcatccaacaaccatggactccttgtatgatatctcctgctttgctgctggtcttgcaggtacggaacttcatttcgatctcgcacttacaattcttcttaagttcctatcgcaaaatggtctggatcgaaaagaggcttgctaatcttctgaaaatctggccgcctccttttgttttgtcgctgcaggcaacatctttgcgcttgctctcttcctgtcgccagtgtaagcacacgttcggtttggttttttcttgatcctttgattcgtagccgaagttcataactgaattttccttgtttcaggacgacgtttaagaggatcctgaaggccaaatcgaccgagcgattcgacgggctcccttacctgttctcgctgctgaattgcctcatctgcctgtggtatggacttccctgggtcgccgatggcaggctgctcgtcgctaccgtcaacggcattggagcggtgttccagctcgcctacatttgcctcttcatcttctacgcggacagcaggaagacgagggtaattcttcccatcctgcaaccaattttgtctcagaaaaatgtacttgtagactgcagtaatagattgctaatgtagtagcctagtactgtacattttcaattttgtctgatgccaatatgccatcaagaaaggaaaagatgatggataatgttttccaattcctccacagatgaagatcatagggctcttggtgctggtagtttgcgggtttgcgctagtttcacatgcgagcgtctttttctttgatcaaccgcttcggcagcagtttgtgggagctgtgagcatggcttcgctgatctccatgttcgcttctccgttagctgtcatggtacgtatgcctctcgatcaagctgagctcttgatcaatatcatctccggcatgtttaatagaactgagggatctcactaacctttgcttgctccatccatccttgtgtctacagggagttgtgattcggtcagagtctgtggagttcatgccgttctatctgtcactctctacgttcttgatgagcgccagttttgcattgtatgggttgctgctgcgagatttcttcatttatgtgagcatcatcttgtatcgctttaaatcacttcatttcttgaatcgacatgcatgtttatgagcttgatggatcttgtactgacagcttgattcttttttttttaaccattttgatttttcagttccctaatgggcttggacttatcctgggagcaatgcagctggcgctctacgcttactacagcagaaaatggagaggccaggattcatctgcaccgttgctgctcgcatgatcaaaaccggagtgaatgattgatcgatcagctggttttgccatggtttggattcttgaaagagtgggtttatggtgaattgtacagttttggctcagtcttcacatgttggtactggaagctgtacttcaaactgcattcttcaaacatgttggaaagttttgcacaccaggggggcaaatgatggattttttttaatttgattccctccttttccttgaatacttggtgtgcaaaattatttcagctatgcacattgagcctcacttcttgttatcaattatgacatgtcacatatgtataagttgcgatgatagttttgtttcgttgctgtttgtaaactgcaatattcttctcgccaaactgtgtgaacaacaaatcaatggccacgtcatatatgtacaagttgagatgataattttgttttgctgctgttggtaaactgcaatcaatggccaatgtttatgacacctagggcaagtccgagatatttggttcgtccgtgaggaaggtgtacgacatgtttgcaccatcctggctatgaatgtacacacactcttatccttataaatacacacacatatcctatccctacgagcacttccgaaatattggactgacatatcttgatattgacgaagtcatcacatgcgcatcgttgccgataggtacgccacctactactaaaataataattagccgtaaataggagcatccatatcaaatatatgatttgaatctagggttctaacataagaaacctaactagttgagctacattttgtattatgttttattgaacttgaatttcacacaaaaaaaataaaaattcatatctcctcgcacaaataaaaaacaattaagcaccatttttggacagctcaaaattttatctcaccctagaattccgatttctacaagtggaaaatagacctaatcaaatgtaaaacagtggtaaatgtaccgggccttatagatctaattaggcccaagcccatccagcgaaacacgtttcagttggcccgtaacgtggaatccatcccgttccgttctcctcctcgtcctcgtggcgttcggaccaaacggagcgcagattaaccaaccatccctgtgttcttcctcctccgcccaataagccgctaatctcgtctccgcccttagaagagatcagcccctcgcagcggatgcctgggctagcattttggttggttcgatggagtctaaatcccccagtttttaatctgtgagccgtctccctgcactctgatgtctgtttcgtctggcttttgattccattgtgattaattaggtcatgatgttagatgcaaatttgtatgtcattgcggatgataatgctgtattgaaatgcatggggattgggggttcatgcaggtagactcggacgctagctggccggcgcaaatatgtgagttcttctgatttttttttttttacgtaagaaggtagagtcagccatttcatcgatataaatgagtgtaaggtacatgaggaaggggggtggaggaaaaaaagagagaaaagagagtaaaagagagaatgtacaaaagttcaaaaagtaataattctgattcaaccgagcacctgcatgtcttcgaatttagggggaaaaactaagtgcaaactacagacatttccatctgtgcagcctacttgttatttctctgattgctgaatgcaaatgtgatttggagggcgggtgggttgatcggttcctgtgatacacagatactgctactcaagcttggtctcttttgtttatttttatgcaggtgactgtgtaaagctgacaataggatgttgacatgttgctgtttagatgacaccagatgaaactgtacaattctagacacaattgtgatgccttctttattgatctccttttgtatttgtgcgtgcatgtgtcaaactattggctaacactaatgctccatgtttaatattctcaaggcccttattactttaaagaaaggtactaaactcatcaagtatagccggagaggaaaacccaagatccgtgcgttcagactttctagcgtaagcgataagccccaagtatgtgccgattgcttgatgtcggtgataccaaatttgattatgtccctttgacctttacgtattgcaggatgaaacatctttaatttggttttctcacaaaaaggaaaagttcctcagactgtcttctgtcactaagatcattcctggacagagaactgtaagtcctccatatccttaaacaacaacagttgcaaaagagcataaacttccatcaagctggtaccttgctatcctactaatcaacttttcaccaggctgtgtttgggaggtttttacaccctgagaaggattatttatcattttccctcatatttaaaaacgggcaacgctcacttgatctggtatggtaaagataaaattatgtaattcactcaatctaagtcccaatcattagcttatgataaatacttattttttttcgattcatagcataggttgagtctatgatagcatgcactgcagaggacattcctagtatgaacttctttctattctgcaggtttgtaaggatcaagctgaagttgaagtctggttttcagcacttgaggggttaataagttcattccgcaaaaaatctttgattaacgaacacaaggatagagtatcattttctgaagtgagttatgctcgaccttcctacaggaatttctgtgcctctgtacgcaactatattcatggttcagttttgctatacagttaccattttagaaggaaaaaatgactcaagcatcgtagatatgcatataacgcacaaataccataataccgtaagttttttcgagaaaagaaatttagttcaatttataatgaaagttataggtttatacagcaaaagtaaaagtaggggttactagcttacaataatgtacatgaaacaaaagcacctaaactttaggagtgcagaccctctagacaagatggaacataaacttttccaggatgatgagtccaggctaagactgcctcagctccctaccttttgttttgctctgaacaattaactcatccaccaaaattctatgattgttactgaaaaaaatatatgtacatactaaaagcatacatcattaaaatgttactttgatcaatctagtttttagttatgtactctactccgctctgtaacatgtgggagctaggtatccactttgaatcttttatctatctagattttggttaccaactcttctcctctttctatcaactaactctgctcctcttcgagaattataagcccctatataattaggatgtatagtatattctgagacagcaagtctttacaaatattctaatatagtgcgccttccttcttttttccaggaagtaacttattatcaagatcgccattcctatgattcaacactagatattgcttcaaatatttcacgcagttttaactcagctggttactgtggaaccaattcatttagtttcagaaaatcagatgtgggatttgatcgtctaaatatgataagaacaagtgctgcagacagtagccgggttagtatttctagtgcccttagttcttacagtcaaggttctggaacagatgacatagaatcccttggtgatgtttatgtctggggtgaagtatggactgatgtaaccccatcagatgggcacacaagctcttcatgctcaaaagtagatgttttgatccccaaacctttagaatctgatgtcgtgttagatgttaatcagatagcatgtggtacgagacatgtagctcttactaccaggcaaggagaggtgtttacgtggggtgaggaatttggtgggcgcctaggtcacggaactgatgctgatattagtcgccccaagcttgtcgagtctttatcactaaccgtagttgatcttatttcatgtggagaattccatacttgtgctgtgactacttccggtgatctattcaattggggggatggttcttacaatgtcggactgcttgggtgtggcactgaagttagctactggcttccaaagaaagtctcagggccttagaaggtcttcaagttctatctgttgcatgtggctcatggcattctgctttgaccacatcaagtggaaaactttacacatttggtgatggaacatttggtgttcttggacatggtgaccgtgaaactttagcatacccaaaagaggtagaagccttgagtggattcaaaacgatcaaagttgcatgtggaatttggcattctgcagcaattgtggaggttactaatcagacaggtgcaaatgtgatgtctaagaagttatatacctggggtgatggagataagaaccgccttggccatggggacaaagagcctaggttagttcctaaatgtgttcaagcgcttttagagtacaattttcatcagctggcttgtggacataatatgactgttgccctagctacatctggtcgtgtgtttaccatgggtagttccagcaatggccagcttggaaatccaaaatctgatggcaagcagccttgcttagttcaagatagattggctagtgagttggttgaagagatttcatgtggagcttctcatgttacagttttgacttcaagaagtgaagtatatacatggggaatgggtgccaatggaagacttggtcatggcgatctcaaggacaggaagaagccatgtcttgttgaagcacttaaagatcggcatgtcaagagtatatcatgtggttcaaatttcacaacatgtatttgcatacataagtgggtatcaggtgcagatcaatctgtctgcacgggttgcaggcaagcatttggtttcactagaaagagacatgattgctacaactgtgggctggttcattgtcatgcttgcagttcaagaaaagtgttgaaggctgctctagcaccaactccaggcaagccacatcgtgtgtgtgattcatgctttctaaaattgaaagccgcagagaccggcagcaacaattctaacagaagaaatgctgttactcgtcgctctattgatgggagagagaagcttgagaggccagaaataaggccttccaggacaacagcaccagcggaatcagtcaagtatacagaggtaaaagctgcaagaaatgatatgagagcatcccaaatttcttccttgctacagttcaaagatcttagcttctctgctcttcaacccacggcgatgtcaccagctgtaactatgtcacctgcagtacctgcactctcaacaccatctccatacacaaagaaaacaaaatcacctgcacctgcaatcccgcaattccctaaaactgatatagataacttgcagaagtctaacgaattgctgaatcaagaaatgttgaagctgcaatctcaggcaagaatgaaactgctgtttattctgtaccttgttacagctagctattctgataaaccattgtgttttcaataggttgatagcttaaaacaaaagtgcgaggcccaacacgagcagcttcagatatcagataagaaaactaaaacagttgtctctatggccacggaagaatatactagatgcagtgctgtggtcgagtttgttaaatttcttgataacgaggtatagtaaaatccttttgataatattgtggttcagatcttggatgttattagggttcttctctattgaatttattttctttact

SEQ ID NO: 7140 - DNA, 31088 bp, Oryza sativa
aatgacttacattgtgaaacggaggaagtagcacattgagtttcaccaaatcagccaaaaaagatccagatcaaagcaagcatttaatatgagacagaacatcacagaatcgaaaaacatgattcagggcaaccagaaaaatagagaaaccatggatggtgaacaaaaggctatcaaaatcaacaagaaagaccagaaaaatgcagaccatctcagatatagagaagagagaatgttaatcaattgagttaagttatatttcaagtttgagatatatcgagggcataagcggtaacataatttaaatgtacattctactatcctggatggttggatgcccacattagcaccactgtaccaccgctaaaccacaaaaagctcaagctcagtatcctaacttcttacactgcggcagttacataaatgactacatttatatactgcaaaaatttcagttttgcaacccgcctgttactcgactacagtatggcaagcgctcaacgcaacctaagcataaaagatacaaacataaaacataaacacgaaaaatctcaacaggagtgcacggtgcttacaatccaattccgggtcttggcgaggcgacgagcaagagcatggatgcagtaggcgacatccgcccgaggcctaccgatggacgtcgccgctgcaatctctgcaacacaaccaccaacccatcaaacaccaaacccaacagagaatggggaaaaccccaacagcaagtaccctccatcccaccgaacaatctcaattctcaaatctgattccacacacactgaactaaattaagcagaaaatcgcaagcgaggatataggagattggcagattggtagtgaggacgaatcaacgtacttcgcaggtggcgctccttgggcgggcactcgacgtggttcgtggccttcacaatcgccacatccagatcctacagaggggaaaagaaaaacatcgcaaactaaaataaatcccaatggatgcgtacaacacagatccaaacgcctccccctcctggactcctcgtcccccagtcggttgcggcaaatcggatgaactgaaccagtttgcgccactggattgggggagggtgcaaaagctcgacgcggaccttgaagtcggagttgagattggcgaggctgacggtggtggtgtccttgagcgcgccgtacgccttgcgccagctctgcagcgccgacattctctgctcctcctcctcctccgctcgctcgctcgccgccgcctgctgccgcctcctcgacttttttttttctctctctctcccccctttgcttctgattatttttttctctcagccctgcggcctgattcgatttccggctacgcgtccgcgagattgctcggtgcacggaacggcaaataaataggaaggcttcgtttttccgatattgccaaatgtgaaggcgcgttggcacttttcatcacaccttctaaagcctgacgagcagaagctataaaaaggatttcttttaaatcgaggagagatgaaactttttaaatactcggatttaaattagaaaatgaatcacttctcgaatttaaaattccaatggccgcctgagacagcgtgtccagatgattggtttgttggattgttgattaattggtggaatctcatattttagactgtaacagagtactaagtagtagtatttttcaagcctaattcgaaggcaataagctagagtcaattcaggccggctgctgctcctatcaaaagcggtagtgtagcagctggtttggttaccaggcagttccatgaaagtgtttaggttggctggtccaacattgtcaaaaaggcccaattaagctacggtttaaaaaatttgggaaaattggaaccatgccattataattttataaaatttgagatatgtcattctaactcacatgtcattgactcatgtaggtcctacatgtcattgagataccaatgacatatcttaaactttgcaaagttataatgacatgtttccaaattacccttaaaactttggttaaacctttcttctgcgcatggcttgactcgtgagcatgcgctaggcatgatagaagaaagaatctcagcacagacaagtcattcatattttatgctgtacagaacgaaaaatgcgtggtggtttggctgtaaagacgattgacaactccagtgtgtcctaacaccggtggtcctaccgcagcagcatgcagcttggtttcttccttggaaaggtttggtaccagagaaaggtagggagaggtgagttgccaccgtgccagttcacaggcacgtctcacctgtgacaaaactgcggattcgtgtggcttggaagatttaactgcatgcacggcgtcggattgacagggactacgagagaggagagtgattcgctgctgattctgaagaggaggggaatgcgggggacggttgcgttctccctttccaagtcggtcggggtagctgggttgtctcgccgggtcccaggctcgccaccgctcaccggacttggatgtgaggacgaagcagacggctggcgttggagtcgaccggcagttggtccgcttgcatatggcacagaaacacactgacacgcattcggcccgttccctcgatgcgtcgttcggaatgggccaaaatcccggccctgtatttggtgatggcctgggatttcagtggacttagcaagtcagaagcctgtgagagcccaataagccctacgctgtggacaaacttctgccgtgcgttttgttatacactcttttctttgccatcgacggtttcaccagtggcgcgacgcgatccgcgtcaggcgcatctgacggatctgcttccttctggaccgaaaattgtgcgcatgtatgctatcccgatgcagcgtcttgctattataactccaatcaaactacgaattctggtagaggccctgacgatctacgtgcgcctcagcgagggccccaaagatcaattctccgccctcgccatccatgtgatggaaaaagtgcaccaaggtccctcaacttgccatcgaattataaaattatcccccaaccacaaaaccggatatccggtgtccctcaactaaccaaaaccggtcataataggtccctcggtggttttaacccggttttatcctatgtggctgctaactcagcgtgggacccacgtgggccccacatgttaggctgccacatcagcgcatactctatttccccctcttctctctgttctctccttccttcctccccctcgctctctgctctcgcacgagcggcaacgcgtgcggccggcgacggtggctcccgagtggcggcgcgcgggctcgccggcctccccgtccccctagtgtggtcggcgatggcggcgtgcggttgcggccatcatgcggaaatcgactcgacgacgccgccatcaagtcgctgccgtcgggcgtcggcgatggcggcgcgcggctgcggccggcgggggaggcggaggaggtatgcgcggacgacctcgccctcgtcgttgatgtcgccaccgatgaagaggtccgcaccgctcaccagttcgcatgcctcgtcgtcgtcgacactcgccactccggtccggccgcggcccagcgaacaagcgacgagaagccggcggcgcggcgcccccgccgcggacgagcgacaagaagccggtggtgtggcgcccccacccgaagccgccgacgacgatgaggccgagcggcgcagagtcgtcgacgccgccgctccccatccaggtcgcgctcagggtcgccgcgctgaaagcggcacatccagcgcctgatgagctgccgcgcctcatgacgttgcagttcctcgccggtcagctctcccctgtcatggtcaaattgcaagggatcgattctcctcaactcgggtacatccaacctgtcgtttgattgcgaatccatgtagacgaagctatccagctgcttggtgggtgtggcgccgccatacgacggcgacgaggctaccgactcaccagtgaactacgacctctcctcatgcgaacacatcctgtctctgaagatgtgcgtcctcgacgccatccatggtttctacatctgggcactcgccgtgctcccatcggcgacgattggacgacacggcggtcattgctgcggccctctcgaatccgcttccaacatcatcctcgtcaccgtatggtacgccgccaccgctcctcctctgcctgacgacgaggctgacttaccgggagacatttttgacaccgggctgaccagcacgtcgcggccgacgacgacgtacacctgcgcgagctccggcagcgtgcgcgcgcgaagagggaggaggtggggacgtcgacagcgagcacacggagagagggaggatgcggcgcgggagcaagccggggctccgagtccgccagagtccacctccacggcgcccggccctgcctccacctccgcggccaccgccgcggcgcccaaccccgccccgcctccacctccgtgcccaccaccgcggcgcccggccccggctccgcctccgcgcccaacgccgcggcgcccacccgcgcggggccgtttcgccggcggcggcgacgcagcgccgtcggtgccattcttgaccggccgctgccctcgtcttctcgcgcgtcacagccgctgccgcctactcctctgtcgcctcgtccccagccgccggccggcttgccccagagaagagaagagaagagaagagtgagagagagagaggaggaagggagaggaaggggaagagagaggctgacgtggcatcctgacatgtggggcctacgtgggtcccacgctgactcagccgccacgtaggataaaatcggatacaaaaccactgaaggacctatagtgaacggtttttataagttgagggatgtcatatatctggttttgcggttgagggacgattttgtaactcgatgacaagttgagggaccttcggtgtactttttcctccatgtgatcgacgaggcgttgcgggggttcgcggcatccaaacacctcagccgcagcccctttcccaatcacctaaggccgacggcctgcatccccttctcctgccttttggagggcgcggtggataacctcgtcatccctaccgcggtcttcaacaaccatagggacgtgtgctatctcaggacagtagcagtgcaaggcacgctaccgtgccttcatcccaatccagcaaggattttggccctaaattcatctctaagtcacacaccctacagtgctagtgaccttaatctcgtgaccttccttcttttacgtgggaccacaatgcaggggaccaagagtgcccagcccaagaaattaattctcgcaactacccttctctcgaactctccacattgctcccgttctccttatcccggttgcgagctcgccgagaagcactctgcctcagccgccgctccggctcccctcttccctccaccagcggctagcgccggctctcctccctccgccgccggcgccggctttacttctccggcagccgcggttgccggctcgcgcgagttcttgaaccccatcgcccacgaggtggtgctcaagatcaccagcttcggtggctgcagcggcctcgtggcggcggcgacgacgggggggcggcgtactcgcgtcggcggcagagggaggaggcggcgccggccgccggtggtgtcggtgacatgggaccgggagtatcgtgactagaggcttgggcagccgcgctcacccacgtggcctgaccccctcgggggggtcaggcccgagggtgacgtggccacccctccctctgtctccccgaggggtcgggccgctcccgtttcggccccgagggctggggcgccccgaccccctgtggtgttggcgccacgtgtgcgggttaggtgagcacagcggcgctcacctaaccgcatttattgcgggttggacgagcgcgccacgccgcatttaatacagcgcagcgcgctcgcttatccggtccgtgaccggtcgcagtatgtgaccagtcacagatcggtcggatcgcgggttaggtggcagcaggcggcctgtcacacgcctcgccccgtcccgtcggaatgatgagagcctccaggcactcgtccctagccggagccggtgtgctaactcctggagttagcacgccagtcccggctagatacattccaggcttcatcgcaaccattgcaaagaagtcattgtatgaagaaggacagacgtgcgacatgctaaactgacacgtggtggacaagaatgaccggtctgtgactggtctgacgccggtcacgtcatcagcagacaaaccgtgctcccacgttgcatctgcttccagcgaagtggaggtaggtatgacccatcccatcggagggtcattcggacagcggccattgcaaatctccgcccattaatggaggaatgacagggtgatcccctgtgtcaggcgagtgacggcgctgggcctcactcaaggacaagctgtgatttagcttccaagcaaaggcgcgagccaagttctgatcaagatagggtggatccccacccaaaagaagggtaggtagaagtggtgcatgtggtatccccttgagatataaaaggaggaccttgcccaccgaagaaagagaggggagatctagaacaagaataggggggacgactctgagaatacctgagctcagggagatccagaacaagaataggggggacgactctgagaatacctgagctcgtagaggacagaaagaggaagaggggttctagagcctgaactcttttgctctccagctctctgtaactccttcacacacagatccaccataacacaggagtagggtattacgcttcttagcggcccgaacctgtctacatcgcccgtgtcttttgcattggctctctcgcgaacattccacagatcgagggtgaagaacctcacttagcgcccccggccgaaccggcaaagggggacctgcgcggtctcccggtgaggagccccacgctccgtcatctggcacgccaggtagggggtgcgtgtgactttttaagccctcgtcctctttcgtgtgccccaagcttctcccgctcagcccaatggccgaacgggcagtggcgcacaacctctctccgagcgctagcggtgacgtcggggagcagaacccgcgccgtcgagctcgtactccaccgcccccctctcgccgaagtcttgggtgggaggaggcgctcgagggggtcgaaagatccgcgacttcgccacccacgggcgatggagaaggacggcgagacggggagcgtcgcctcctcgtctacggcgatggcagcacgccccagggcgcgctccaggctgcgggcgcgctcctgcgtcacccgcccgtcgtccccgatccagagactctagcccgacgttggctggatgacgtggccgacttggtcatgacggcgcagcatcgcctaggcgccggcgggcggtcctccgccaccaaggcctctggcgctgctaccgccggctccgtgtcgtcgaggcggagggcgcggcgagcggcggccgtcaaccgccgttcgtccgccattccctcgtcaacgcctccgacccaagaagatgtgcgtggggggccggatgcccgcctcaatatcgagcgccggcgcaatggtcgtcgtgttgcccacgcaacggagggcgcttcctcgtccggagcgccacttcggcccgggcacgggggccaccccccgtgtccccggttggcggtgtcggctatcgagcctttgtggcgagccttcggaacgtccgttggcccccaaggttccggcccaccatcaccgaaaaatacgacggaagcgtcaaccccgccgagtttctccaggtctacacgaccgggatcgaggccgctgggggtgacgacagggtcatggcgaatttcctccccatggccctgaagggtcaggcgcggggttggctaatgaacttgccacccgcatcggtccactcttgggaggatttgtgccagcagttcactatgaacttccagggcatatatccgcgcccaggtgaagaagcggacttgcatgcggtacagcgaagggacgatgagtctcttcgctcgtacattcagcggttctgtcaagtccgcaacaccataccatgcatccccgcacacgcggtgatctacgcgttcagggggggcgtgcggcacaaccgcatgctcgagaagatcgcctccaaggagccccagaccaccgcggagctttttcagctcacggaccgtgtggctcgcaaggaggaggcctagacctggaactcctccggttccggtgtggcagcttcggccgcccccgagttcgccgctcggtcagggcggcgggacaggaggaggaagaagaggtcggcccatttcgacgacgagggtcacgtcctcgccgtcgagggcgcttcgcgggccacccgaaaggggaggcttgcgagcgacaaaaagaaggaggctcgcgctcccagcagggaacgcccgaccggcaaatggtgttccgtgcacaacacctccctccacgacctcgcggactgccgcgcggtcaaaagtttggctgagcggacgaggaagtgggaggaggagaggaggcaggagcgccgtgagggcaaggccccggcgcctcccaccggcaaccggcgagatgaggccaggcagaaggccaccgccgaggatgtcgacgataacctggggttccaggagcctgaggccaccatcgccaccgtcgatgggggagcgtgcgctcacgcttctcgccggagcctcaaggccatgaagcgagagcttctggccgcggcccctacccatgaggcgacgcgacgagcgcggtggtcggaggttgccctcaccttcgaccagaccgaccacccgccgtgcgttgcccggggaggacagatcgcgatggtggtttcccccaccgtttgcaatgtgaagttggggcgtgtcctcattgacagaggtgcagccctcaacatcctttcccccgctgcctttgacgccatcaaggccccagggatggtgctccggccgtcccagccgatcatcggtgtgacgccggggcacacttggccgctaggtcatatcgacctcccggtcaccttcggtggttccgctaacttccgcacggagcgggtgaacttcgatgtggcggacctcagtctgccctacaacgcgatcctggggaggcccgcgttggtgaagttcatggcggcggtccactacgcctatctccagatgaagatgccgggccccggtggccccatcaccgtccatggcgacctcaaagtcgcgcttgcttgtatggagcagcgcgcggaccacctcgccgcggtgtccaagcccgcgggtggcgacgagagactcagcacctccgtcccagccgccccgaggcagcggatgatcacatgcgacgaggtctcggtcaaggaggttgccctgggcgacggcccgtccaagaccacacgaatcagtggtcttctggacgacaaataggaagacgtgctcgtctccttcctgcgggcaaacgccgacgtcttcgcctggagaccggcggacatgcccggggtccctagggaggtgattgagcaccgtctcgccgtgcggccaggcgcaaggccgatccggcagaaagtgcagcggcaggccccggaacgtcaagccttcatccgcgaggaggtggcgcgacttctggaggccggattcatccatgaggtcatccatccggaatggctggcgaacccggtcgtcgtccccaaggcgaacggcaagcttcggatgtgcatcgactacaccgacctcaacaaggcatgtcctaaggacccttaccccctgccacgcatagatcagattgtcgactccaccgcggggtgcgaccttttgtgttttctagatgcatactctggttatcatcagattcgcatggctagggagaatgaggaaaaaactgcattcattaccctcataggaacttattgttatacgacaatacctttcgggttaaagaatgcaggtcctacttttcaacgtactactcgaatttctttgggtaaccacgcgcaaccaagagaccttactctcggatctagcggaaactttcgaaagtctccgctccgcccgcataaagctgaaccccgacaagtgcgtgttcggtgtgcctgtgggcaagcttctcgggttcttggtctctgcccgaggcatcgaggccaaccccgagaagatacgagctatagagcggatgcgcccccccagcaagcttagggatgtgcagtgcatcacaggctgcatggccgccctaggtcggttcatatcgaggttgggagagaaggcgctacccctatttaagctcctcaaacgctccgggccgtttacctggacggaggaggccgagcgggccttcactcagttgaaagcgtacctcagttctcccccagtcctggtcgccccggggccagatgagccgttgctactctacctggcggcaaccccgcaggtggtcagcgcggcgttggtcgtggagcgcgacgagaacaaccctcactccgcgcatccccaccctgtgtcgactcgacccgggagagagcagggaggagaggctcccgagccgaacggcggcccgaggcccccgacagccggagctggccctctgcccgcttgtccgacggtgcctgtcgccctccgaccccgaggtcgttggcacagaagccgagtgcgccccgcgtggcctctcggacgaagagcgccctgggaatgcggcccctggcgaagaggatcggccccgccgaaaggtgcagcggcccgtctacttcgtcagcgaggccctccgggacgccaagacccgataccctcaggcccagaagatgctttacgctattctgatggcttcgaggaagttgcgccattatttccaggcgcatcgggtcacagtggttacatcttaccccctcggccaaatcttgcataaccgagagggtactggacgagtggtgaaatgggcaatcgaactctctgagttcgatttgcactttgaaccacgccacgcgatcaagagccaggccctcgccgactttgtggcagagtggaccccagctcccgagcccgtctctgtccccgaggccagctcgggccccgcgcagctgcctcacaccgcctactgggtgatgcagttcgacggctccctgtctcttcagggcgccgggcgggggtcacgttgacctcgccgagcggagacgtcctcagatacctggttcgcctcgactttcgggcaaccaataatatggcggagtacgagggactccttgcggccctcagggtggcagctggactggggatccgccgcctcctggtgttaggcgactcccagctggtcgttaaccaggtctgtaaggagtaccggtgctccgacccgcagatggatgcttacgtgcgccaggtgcggcgtatggagcgccatttcgacgggatagagcttcggcacgtgcccagacgggataacgcggtcgccgacgaactctcaaggctcgcttcttcgcgagcccagaccccaccgggcgcctttgaagaaaggcttgcccagccgtcggcgcgacccgaccccctaggggagacggacgcgcctgaacggcccccgaggcccgtcggagtccaggcctcgggacccgaggggagcactcccagctcccttagattgatcgcttggatcgctgagatccaggcgtacctcacagataagactctacccgaggaccgcaaagggagtgaacgcgtccagcgcatctccaagcgctacgtgctggtagaagggaccctgtatcggcgcgcggctaacggagtcctcctgaagtgcattcctcgggaacaaggcgtcgagcttctcgccgatattcatgaaggtgagtgcggagcccactccgcctcacgcaccttggttggcaaggcctttcgccagggtttctattggccgacgggccaccatatattgcgagactgatcaagatcagcttcgcagagacgacctcgactacttggaagagcgaaggcggcgcgcggccctccgagccgcgcgctaccagcagagcctgcggcgctaccatcagcgccacgtccgggcccgatcactctgcgtcgacaacctcgtcctacgccgcgtccaaacgcgtgttggactgagcaagctctcaccaatgtgggagggtccgtatcaagtgatcggcgtcccccggccgggctccgttcggctggccacgggcgatggcacagagttgcctaacccgtggaacatcgaacaccttcgtcgcttctacccctagtgggggtcgggtgtcaggtctcgggctcgggccaaccccgcacccccccgggcgtgcagggttggccgggggctaccacatgcatatacttaccttttttctcttccatatttcaataaaaacattttcgatttcctaaggactgtgtctgtgccattgtttcctttttgaagaatcttggcttgaattagcacgcttgtgctcgatcctgccctcggtggctcgggccgtctaaaatcgccaaaaggggcccagaaccgagccgtgccccggggtgtggtgaactccgggggggaatcggcaaaggcccacaatcgggtcatccataaccctcggtcaccacgctcccggcctggccagtctcgacacatggatctccccaggcactagccccgacccccgccgtttgaggctgggacctgggcacgagcccttgttcaagccaagacacagaaggaccgcggcacagaccatcctcgtctcatacacacaacaaatagaattgacacagaaatttcctctttatttgattgcagattaaattggtctatacaagaagggggcccgaaggcctcggaagaagaaagaaagagctatttaagattggcaggggcctgggggctcacttcgacgcgcccgggtcgccagcctcgtcgtcgctgtcatccacaccaccgtcaccgccctcctcgtcggagtcgagggcgaacgcgagccgaggggccgtaccctcgaagctgtggacgatgtggtcggcggcgtcccggacctgcgcgcgcgcgccgtcctcggttccgggagggaactcgtccagcgctgcccacggggagaagtcggggtccctggcctggtagcttgccagtacgagctccactgccccccaggcgaggtctctcgaggatgacttgatcgtctcctcgagctcctcggggagccgctggagggtcccagccatctctgagaggcgctgggcgaggcccccctggttggcggcgtacttcgcggtccgctcgccccagaggcccgcctgccgctcggcgcggtctagacgggagacggcgtcccgaagcatgccgggccctacctcgcctgccaagcggagggcctcgacctccccggcggacgagtccagcgcgccctgcagatcggcgatggtatgttcggcggctgcaaggcgggcggctaggtcgccgtcgcccgcggccgccccgccgctgcgcgctctcgcgtccagctcctttgcccgcacctcgggctcagcggcccgccgagccagtgcggccctctcggcgcgggcgccttccagattgcggcgcgcctgctcctcctgcgctgcctcgcggaggaacaggctgtccgccagccgctgcgccgcggcctcggcctcctcgagagctcgctcccgctcggtgagcgtatcctcgcggaggcggagtgcggactcctcttcggcgcaggcggcctcgtgcgccgccagtgttgcctcccggatggcgacagcggcctcgcggtccgccaggtccctctcctttgcgctggcgcgctcttccagcgccgtggcgcgagcctcaagggcctcttcgcgccgccgggacgccgcctcgttctccgccgcccgccgttcccaggcagcggcggcgtcaaggactccccgagcggtgttgagcttcttctctagctccgccgcccggctcccgtattggaggcggaggtcgtcccgtacctcgtcgagcacggcggtggcgatgagagcagtctcccgctcctcctccacctccttggcgatctccgccagctccctccgacgggcctcgagctctgaggcgtgccggcggtgtgccttgcggcccgcctccaccatggcctccaccgagcgtcgcccctcttcgacgcgcgcccacgccgcgtcgagctccgcccgctccgcctgcaggacctccatctgggcgcttaacccgtccaacaccgtggtgttcgcggcggccaaggcctgcgggaggggctccgcgctcggtggggcggcagaaggcagaggggagagccgcctcggtgtgggcgccgcgcggctcggcccgccgatcgacgtgccggactcgggggcgtcccccgaagctggctcgtcccgaacatcgtccgaggggtcggacccgagcggtgtgcccgcggcctcgtcgtgggtggcttcggaagtcgtcgtcgcctcgggcggagtcgggtcgggggcttggtaggccgcctggcgtgcgcgcgccgcctccgcctcccggacggactcctcggcccggcggagtctggcctcctcccgggcggcttcctcagcctggcgaacccggacggcctcccgggcagcttcctcggcttcccggaggcggtccgcggcttctcgccggtcagcttcccgcctccgggcctccgcggccgccgtctcctcggcctcggaccggccggacttggaatggcgggaggggcacgacgggatctcgctgaggcagaagaaaaaccagaggacaaaaagaaacgagtgagtgaaaactcgccttgggagatgggagaatgaatacggccgtggtaggcgcgggaacaaacctgcggggaggtcggttaaacgaccacctcgggggcgagatgaggttcccccggcatgactcggtcccccccatcttgcggagccgtttcttctttcgctccccctcgggctgcgacgtcggcacgacaccctctgggcgcctgctgctggcacgcactgccccgccccctcggggaggagatggggaaggggtaccctcctgcttcctcttcccccgggcgtcggcagggcggctgccccccgggcccccgtcgcggggcccagaagcatgaccccctcccggggtagattgtttccccctgcggctcccgcccgcgccatcgtggcctcggggggctcgctcccccgacgccccgaccgcctacatgatggtcaggatgttggcgcgatctggatcgctgcagagggggaggactccttgggggatgagggatgcctccacggagctgagattcagcacccgttggaccaccatcttgaagtcctcaggggcccagtcccatctgcccccctggtgggtcctcatgtagtcctcggacccggtgtactcccaggcgccccgggcgcgccgctggagcggcgcgatccggcgacgaaggtagtcgccgtacaccatggcccccgtgagcccctgggatcgcagacccgccaggcggtcaagaacggcgtcgtagccgtctcccagatctaccggcgcccgccagctggaggcctgcgccgggggctggctcggaagtcggaggcgcgcttcgtcggcgaggggggtgtagaaccagtcgctcttccagtcgtcccacttcttgcggaggacgcagggaatgtagcggctcagcaccggcccccgcggctggaagtagcagccaccgactaccgacggcggcgacaccggctatacggtgaagaaccaccggaacagccgaagagatgggcacaccccgataaacatctcgcacaggtgcgcgaagatggccaacgtcattaccgcgttgggggtgaggtgcgccatctggagatcataaaactccagaacatccatgaagaaagaagagaatggcgggaccagccctgccattgcgaaagagaggaagaagacggaccgccccgggtagtgtggcgccgggcgtccctcgcccagctcgaccacctcccggccggtggcagattccggcataaatcggcgcggcagcccggcctgcctctcgctcacgatgcgggaaggcggcagcacgctaccgtcgagcggtgcggagccccgtgccatgacgccggcggaggaggagcttgagagcgagcgagtgcggcgagggtagggcacaggaaacgaagagttggagcgcaagtggcgaaggcaaggggaatagtggcgagaggaaggaaacgaatctcttcctcggcgtctttataccctttccaacgctatgcccggctcctcgcttcccgcgcccactatctcgccccctcgtttctcgcgcccacacctccactaattccgctcgcccgtttgcggcgcacgaggcagatgtgcggccgtggcagccgagatgggacatatcgtgcgcgcgttaactacgctcgccgaccaaagcgccatcatcatgtctccaggcgaaacgaatcagctcgtcccgattcgcgcgctgctcgagtaatgtagcggtcgcgaagaggccgctcattattttcagttggttttcccttaccgatgcgcacgatttgcgatggctggctttctgcccgcctgtagagaccggccccacctgtcaccaggcctaaggagtggcgtcacgcccgagcgcttccctcgaggggggcgatcgccctggcataacgccgggggctactgtcggtgacatgggaccgggagtatcgtgactagaggcttgggcagccgcgctcacccacgtggcctgaccccctcgggggggtcgggcccgagggtgacgtggccacccctccctctgtctccccgaggggtcgggccgctcccgtttcggccccgagggctggggcgccccgaccccctgtggtgttggcgccacttgtgcgggttaggtgagcacagcggcgctcacctaaccgcatttattgcgggttggacgagcgcgccacgccgcatttaatacagcgcagcgcgctcgcttatccggtccgtgaccggtcgcaatatgtgaccggtcacagatcggtcggatcgcgggttaggtggcagcaggcggcctgtcacacgcatcgccccgtcccgtcggaacgatgagagcctccaggcactcgtccctagccggagccggtgtgctaactcctggagttagcacgccagtcccggccagatacattccaggcttcatcgcaaccattgcaaagaagtcattgtatgaagaaggacagacgtgcggcatgctaaactgacacgtggtggacaagaatgaccggtctgtgactggtctgacgccggtcacgtcatcagcagacaaaccgtgctcccacgttgcatctgcttccagcgaagtggaggtaggtatgacccatcccatcggagggtcattcggacagcggccattgcaaatctccgcccattaatggaggaatgacagggtgatcccctgtgtcaggcgagtgacggcgctgggcctcactcaaggacaagctgtgatttagcttccaagcaaaggcgcgagccaagttctgatcaagatagggtggatccccacccaaaagaagggtaggtagaagtggtgcatgtggtatccccttgagatataaaaggaggaccttgcccaccgaagaaagagaggggagatccagaacaagaataggggggacgactctgagaatacctgagctcagggagatccagaacaagaataggggggacgactctgagaatacctgagctcgtagaggacagaaagaggaagaggggttctagagcctgaactcttttgctctccagctctctgtaactccttcacacacagatccaccataacacaggagtagggtattacgcttctcagcggcccgaacctgtctacatcgcccgtgtcttgtgcattggctctctcgcgaacattcccagatcgagggtgaagaacctcacttagcgcccccggccgaaccggcaaagggggacctgcgcggtctcccggtgaggagccccacgctccgtcaggtggggttcagtttctgctcaggggtggcagcagcttcagtccgccgccatgcggaggcagggaggggtcggcgcggccaggggcgtggcggtggcagcggcggatctcggtgcgcgtggcggcagagctcggcgttgacctggccaaggcggcgaccgggaggagggcgcgctcctcctcaacgttcttggcggcggctcaagaacgggcagcgtggtcgacgccgccgcctcgcctcggcgttctgtgttcttgatttttcttgtgtgattttgtgtgacttgattttcttttgtgattttgttggtagctcggcgtcggatctcggcacgggagtggaggaatcttttcttggttttgtgtaatgtaatgagatttgatttcttgtgggaatgggggatcctttgtgagtgagatttgggttcttgagatgggtggtagctgctccgacgccattccaatcgatgccgaggccgccatggattttgtcctcatggcggcaaggccgatgccggcgcgggcaaaaggactcggtggcggtaggatgaatcgcaggcgcgggaagggattttttcgtgggcgaatctggaatttctccgagtgctgcgtgcgcgaggtcacgggcggccaagcatcgacgcccacagcgctcgctcctcgtgtttttctggcggcgcgtggattcgaccgagcaaggttgcgcgttgctctgcttggggacgagcaaccaagtttggtcctggttccacgcgacatgtcggacaaaatcctccgtgtcgccccatagcaccggtccagggtagagcactgtgaaaggcctcatctatgataacatcaacgagttgctcatcatgattccactcgctgatcaacgagttacttagtaacgattgtcgatgtagattgcacggatggcattctcaacaactactagttccatagaggtcgtgtcagtcgtggcctacgtgaccaccacaaacaataggggaattgggcttgacgtcggagctagagcattttgtcaaacacatggtgggcgtcaccttggactgcttgtcccaaccgaattttgcaagtcttcggcattcttctggactttggtcatccacgcttctaccaccgtcttgagagatagcaaatcagcgctcgtctgatctgcctccacccgccttcacttgaactcctcaatccgcctcaaaagcgtgtcaaatttatcctcacttgccatggtagcttgtttggtaggcttggtgagctctgacaccagattgctagcaacccaaatcaaccaatctcagcaccaactcaactaacaatctagccgtacaagtagcagcaaagtctagtacataggagatatttggatggggaacaaataggaagatacaagtggtggaaggtgccagaagcttctagaacaagtagtggtaaaagggaggtagggagaaatcgacaagggagcccccgaccacccaagtcgtcaccaccgccaagagcttccgctcgccaattgatttgttcgatgatttcctggaagtgctgctgcttcttatgtatagttgtctcttgggttcgcttggacttcttgaaaagtagatgatccactccaagttgcagcccagctggttcctattccctccgtcccaaaatataaatatttttgaactctgacacggtcttcaaaatgttactttgaccaataatatctataaaattaaggtgttttaaataaaaagagttgcatattatgatagtttgttcaatgataaatctagtaacatcaattttacatgattgattttttatatatttttgctattaatagtcaaagtttaaaatgttttgacgtgtcactatgctaaaatgcttatattttaggacacggagggagtaacacaaagttatattaacttatgttggtgttcaagccccttcctagggatgaagttctccgggatcaagttagttatcatgcaaacaatcacgagaccgttgaaaatttaaggaatacatgaacacatgatcaaataggtaaactacgcaaatatgcactctgttatcaagtgcttaattattccccatttttgtgaaatgatcaaatctgaccatgtatatcacatccatgttgcctgaagatgcggtatatgtaccctctaattcgcctgcgccaaagaaggcccaaaaaagagacgaaggacgtcatcggtaggaaaagccaccggcgaggaaaaaaaacgagagagacgacgacacacgcaccatcagacgaacacggacacagcaacactgtgaacacacacgcacaccgaaacaaacagaataagcggcagcccgaccgcgtccgtcggtgccagaggtatcgatcggccaatcagtcgcggtagcacacgagcagcgcgacgcagcggaagatgatgcggagcctcgcctcgttcccccgcgcgaccctgcagccgccaccgagctggctggcgcccctgcgcttcttcgccccgtggctcctggcgacgacgagctccatggtctccgcgcggcgcgcgctccttcgtcgctggctctctctgccgcgagagcgagtgagctagctagcaactactagcaaatgcgtccgcgcgcgagagccagctaattaaccgggcgctggcatgccaaaaaaacactttgacgacggtgtgggtgcgcgatggagtcggggctgcttgttgatgtgtttatataccgcgcggcgcgcgctagctctgatcgtacgtacacttggacggacgctggaaggttcaatgtaggtcgcgctaggcgctagctaggtgcagttccagtgcagctatcgagctgtacgtacgtgcaatgcgtacgtacgacgccttgaccgtgggtagctcatggtgagttccgtgcaaacgcatgcaccaacctgcaaactttcctggcccgatccagcaaccagatggatcatcgatacgtcggctcgtccatccggcatttaaagtcaaaccgcctggtgcttgattattaacgtccgttcgttttgttcagggaggttagaaacagtccaggatacacgatcggatcctgcagctaatgttgccatccgccatcggccatccgatgccgggtatgccgatacagccgtcaacccgcttgttgttcgtcatcgctgaccaatgcgtcgtatcgcgagccattaattaccttttctttgtaggtttgcgaatacgtcctgtctgcttccatgccttgaccgagcggcaagaatctttttctttcatctgcagtgcagtgcaatcaaccatcgatctgaacgttagtatcagttcgtcagggttgctatgatacacgtctactccctccgtcccaaaaaaaaacaaactctggttttcgtgcccaacgtttgaccgtccgtcttatttttaaaaaatataaaaaaattaaaaagacaagtcacgcataaaatattaatcgcataaaatattaatcatattttatcatctaacaacaacgaaaatacgaattataaaaaaatttcatatgagacggacagtcaaagttggacacggaaacccagagtttgtcttttcttggacggagagagtacacttccatatggttctgaaaatttaaggagcgcaactaatccagtatatatataacaagccaccggccctatccaagttactctttgactggccacacaataatacaatggtcttgtttggatgctccgagctattaaatagccctccagaatcttgctatttagaagtattaaacatagattaccgataaatccgattccataacccctaggctattttgcgagacgaatctaatgatgtatattaatccacgattagcggctgattactgtagcatcactgtagcaaatcatggattaatataccttgttagattcgtctcgtaaaatagcgtaggggttatggaatgggttttatcaataatctacgtttaatactcttaaatagcaagattctgaaaggctattaaatagccctccagatccaaacagggccaatatatcgatgctactcccatgagctaagcacgatccatccattttggacatgcatatgcaggatacatcgcatcaggacgaagttaaaacggctacgggatttggccggcacctcaagtttaacgtacgtcctataccatcgcatcgatcactcgtctacgggacagaatcgctacattggcgcacaagccagttgactgaaaacctcggtgggcacaaacgctaacgttggcataacaaattgtgtgaccacggctctgtgtgtcttttaaaagccggtcaaagaagagcgcttgccgttgttgcaatccagagaaaagtgagaaaactgttactactactaaactggcttatgaactcctagtagtcaactgacagcacactcaagcctctctgcagtctgattattcaaccagcgattcgtgttcaggtgacgtgccatttagtcctgcaaatagagagagacgctactgccagagtgtgctgactggcgagaatttggtagggtttcacatgcatatctacggctgtgtggttagttcgtattccctttcagaaaacaaaggcgaaatgcttgcaagttgcaacctctatagatagattttaaagaaatgcaatccatatcatgtacgtgtctgtaatctgtacaaacaagagcttgttgttaattgttgcaatttgcaaacatgtatgccgggccggccaaagagtaggtcggccaaatttcattaagaaagagagtgtttttatacaggttttgcactttgagtctttgacaagaggctgtcaaagctgaagggagagtgttaaaaaccctcccaaaagataaatttgcaaacatgtaatccagataaattgttaatggctgatgagctcctcattgccaacccgtaacacatttacaatcttctcttgctattcaaccagtggtcattgttcgtattacgtccgatgatttagcccaacaaatagaagaacccaaaatccgctattactctctacagtattggtgctgctactaattaaccggtaagaattaggtagggatacacatgcatcatctacagtatgtggtcgcaaaactgccgacgcctgcgttagtttgtgttattcctttaggtgaggtgcttgcaagttacaaacctctatagactgatttgaaacaaaatgcaatctacgatcatgtacttgtctgcaatctttgcagacatatcaataacacagcagatcattgatgaccagaagttagcctccagatcattaatttgggggaatctgacgatctcagcacatcaggatcttgcaaaaccgaggacagaaactcagatatgtatggccagggccagacagaaccaagttagtgtcaaacaagttggaatgttagccatacgtatagctaaacaaatcccagagcaagattcatgaggcattataggccacaaaatttttagaggcgttgtcccccagatcgatcttgcatcacacttcgtgcaagttgagaaaccgtggcatgtgctctgtggagtacttgcagctacccactctaaaaatattaccagtacatcaaaatgtatgatatattattggtagtttacagctagacaatagaaggcttcttttaaagaaaaggagctagagatttgggcgcttctcctctatataagcacgccaaatgcaacaggcatcaccatgctaagcagaagcacttaagcactaaacacttgtgaaggagggctgtcttttttcttcagaggtgtgatctgatttctccaacagtatgggcaatccaaggagccaagggagaagaggaggcctcggcagaatgttgaaggagcacaaggcgaggctgtacatcatccggcgatgcgttgtcatgcttctctgcaaccgcgactgatcagtgatcatactgatcatcacgcatttttgttgtagtccgggtcctccgggatatggacggacaacttctttttgttctggatttcacttccagaatctagggttaacaattctttgatcgatgtatataatcatgtatggagggctagcatgttattttccaatattttcaccttttaacaccggtgatttcgcactctactttgttagattgacataacagttctctttttgatcgttcagaaactcgatctgttattctggatccttcagaaaaacaaaagtagttcccggatagtgttttatctgaagttctgctacttgtttttctttcactttctgctccaaagaggaaacaagtctccataataattcacacactagtcaccagcaaattagaatactgtcatcaagttgacaatgaatattttgtgcataagttgggaaacaagtttacacactagatactctttgttgtcttgccaacaaagcagtgcaatttgcagcagtggacaacagcaactgaacctgaagcttcaaggcagtagtagtctctagcttgaagaggcttgtagcaccatgttctgtactttcatagttgttccccttcgcatctatccttgtggtcttccttggtactttctgcgtttggatgttacgtttggtgctgttcttttctctaacaagaattgaatgaagattaaaatttttatggtacatttttcaaaccgctaaatggtgtgtttcgtgcaaaagctttttatatgaaagttgctctaaaatatcatattaatctattttttaagtttgtactaattaaaactcaatcaatcatacgttaataccacctcgttttgcgtaaaaaacttaatcttcatcttcattttcatcttatcttgattgcctgatccgatggctatcaagaccattttagaccttaaccaaaaatctagccatgttgaaggatttttttgtgcgaaagcatgaatgatgtattgttgaatactatatacatgaatacatccaactatcctacaaatgatttcgattttaggcactgaacctttaaaaggtacgggcggttttggggtatgctctaaacccaaaccttcttccgctctcgcacaaaactgacaaaagaaccctcaaaccttctgtcaacgccctgaagtagccttgatttgtttccagtattatgaggggacctgcagtcctgcaggaatgatgcattttggtgttatagttctatgctcacgctttatagctacattaggaggatttctgacgaatggtttttatatgattcaattttatctttcagtttttttatttttaattttctatgtggtgggagaagtatgatgactccacttttacagtagtagaggtagtttttttttataacacaaagttaagattttttttttgacattcaacagagataagaaatgctattgaagcattgagagtttgagactaaggcttaagtatgtctgcaaaaatgccacgccgcctcaccgcccttttgcaggcggtcccaaggggactgcttgcaaaaaaaaatcggtgtcccctgtggccggccgttatgggagggcaacggccgtctgccatatcggcaaaatcgtcttctaggagggcgagggcgatggcgtgactagttttgtaaattttttaaatagaaaattatttttgtaattattttaataataaataaaattaaaaataaaaaaattccacttaactgatcgcttaacgggcaagatgggcctccgctccactggcccaaccacgtagcaagctccccttgaacagagtggaattttttttatttttaatttttttattaaaagttttacaaaaataattttccattttgaaaattgacggaagtagtcgcctaccgccctctgggaaggcgatttttaaaaatcgccctcccagagggcggcgaaaatgacgtggcagacggccgttcgctctcgggcgacggccgtcaacgaaatttgcaggcggcccccttgccgccctccgcgagggcgattttgtactgtgcggggggccgcctgcaaatgggcggcgagggggcatggaattttgcaggcggcccccttgccgccctccgcgagggcgattttgtactgtgcggggggccgcctgcaaatgggcggcgagggggcatggaattttgcaggcgacccccttgccgccctccgcgagggcgattttgtactgtgcggggggccgcctgcaaatgggcggcgagggggcatggaattttgcaggcggcccccttgccgccctccgcaagggcgattttgtactgtgctctatatttttgtataaatatcaatagttatcaaatctttttatatttaaaactatacaagattaaaatctccaagactggtaaaatacaattttattattttttagggcatatttggattgttaccgtacaaatattttgttaccgtacaaatattttattaatttttagggcatatttggattgttagtgccaaatttttcttcacgaccaaatatttggtaaggtaaaattgcatttgatcatgtttggtttgctgccaaaatgtaaaattgtagtgaagaatgttctacataatctcaaatctagattacgtattaccaatgaataggcttccattttcgtgtgttgtgtgctagtgggaaagaagatatgaagaggttgccttcagattgtcaattatatagcgtcgttttcactgcaatatatgtgaactcaatgagatacattattcattagatgtgacaagacgatcacgcgtgggcgtgattcattttatgtaaacaggcagcgccgaaagttgatagtgataactcgagctgccgcttttcatgtgtgctgttgtggactgtgcgcgctactggatctgacactaccgtgcagcgccgaaagtgtgttgtcgtgagcataagttgttctagcaccatatgaatgaaaagaactatgtagacgagacaaacacaagtagtactgcagtagtaatagcaaaagtagtactgctttacaagtttgtaagccaaaagaaacggtcacataaggactgaagaggtagaacactactgacgaggcctcttacccctgtccctcctaccctgcgccctaatgtgcccgtgggagtacgtgagtcggtccgggggtacggcacggccaacccgtcctgcctgtacaggtgtgacctctggctgctcctgagtgtgcgcctctggagctcctccaagctgagaggagcctagtacgtcgtggtggtctgcaccgtgcaagtcgtcgtcgtagaactggctagtaggaccagtcctaccggcgtgagacgaagaggccccagtaccgaagatcccggctgcaaattctgctggacaaggaccatcagtttcgtacaggtatttaacagtattaataaaaagtaaagtaccgtgtgggcgagggatcgacgctccgtgagaggaagagctggcgaacgcgcccgaagaggtggcgaacgcccctgcggatctcgtggaagcgccggtcgtgcctgcgaacgcgctcgaaggcagacgaggtcctgcgatgaggaaacgtgcagttaaaacatggtgacataatcgtgcaaaagctgaaacaaaaatgaactaatatctgggctgaactgtaccgtgcgaaaccggtgctgtaggtcgcactgatccgaagctaggggcgctcgaaggcaaacgaggtcctgcgaggatggatcatcaagttacgacggggtgatgttttcgtacaaaaacagaaacaaaacttaagaaacctctgggctgagcagtaccgtgcgaaataggtgccgtaggtcgaggtcctgctccgacggtaggcgcgcgaggccgtggttgtaccggaccagctggaggtacgacgtccacggcgctgcgacaggagaagacgcgcatgaccgcacgcatcttctcctgcatccggtcgaaggtcaccctctgctcaacgtcagtcaagtgcaaacctctgttcaacctcacttggactgcggtgatatcggcactgatatcccgtgcggcatcagcctatgcaagatggaaataacaaattcagtagttgtcctatattatgcaagataaatgaaataattgtaagaagtaatacaaattggatgtaccgccacgaagtagtctcggtcacggtgcgtgggatacgcgtccgtgacagcggcaacgtgcggctctggggcgtctggagtgaaggtcacacgcgcacgagtgcgaggaaggtaccaacgaaggtagtcacggtagttctcctccgtgtgtgggaagagctcgttgatcacctcctctgtagctaacacccagtcgtcaacgtactgctgtacacgtggagcccaaagtgcgcctgctagctgtccccgtcgagtcaacctgtgaagagaggtaaattatatggctcgatgaagtaattatcataaaaatttagaaatgaacaatccgaactcacgagtggtcggcagggaggacggtcggctgcacgttgcccggaaacacctgcctaagtccgaactgtctcatcacacgctgcgggcagtgaggctcaacgaaaatgtcgaacaccatcggcaggatggtgagtcagtaagcctggtcgcgtgtgcacaaggacgaaagtcctagcggtgctctcgcagcgacggcctcttctgtgtacggctcccagatgacgtcgctcggctggagacggtcaaactcgaacacgaagtctgatggacgaccctgacctccttctcattgttggtgggtcatcatgtaatgcaccaagaggtatgggaggctcgtcaccttcaactagtggtctgcgagattgctcatctgtttgcttcgttgtcaactcatccaacttgtcccacaactcattaaatttcttctcttggttctgtgcacagagcctcttaaagagctccataagatgcttgttcttgaattgcttgtagaaatttgcacccatgtgacgcatgcaccaccgactccgaatatcaggccacttagctggaagtcccttctcatcccaaccgttctgcaagtagtcaatagcccgcaacatacccgcatgacgatcatgtataaggcaaacgttgggcctcatacgcaccactgcaatgtgcactctctctaggaaccagtaccagctttcagtgttctcactctctacaaatgcaaaagccataggtagaacctggttgttcccatcacacccaattgctatcaatatctgacctcggtatttacctgtcataaaagttccatctatgcatagaacaggtcgacaatgcacaaaagcattgatgcaagcacccaatgagaaaaaggctctttgcagcacactctttgttcgatcatcaaccgatgtaaatgtatgtaggtcatagtacgtattattattcctctgggcaatggtggctaacaaacgaggcaaattatcataagaagcttcaaatgtgccatacctcatctcaatgatcttttgtttggctctccaggcctttgcatagcttatggtgtacttgaatttgttctcgatgtgcctaataattgattttggttcaaagccaatcttaccaacaacactgctgtacatctcacttgccacaaaagctgaagtgatgtttcggtgatacttctccaccccttgtaagtagcacttgtgctcggtcacaatgctaactttccaataatcattccatttacccttatatgcatggacacgccacggacaatcttccttcatgcacctcacttcatacacataatttgttgacttgaccaccctaaactctctctgcaaggaaactgcccaatgcttcaccgcctccttcatctcatccttatgaacatatcttgcaccctcaattacctcgttctccttatactcccagggtacatgatcaccctctgatataacaagtccagagaagtcctcatttgcccaatcagtggccattacatcaccttcctcatcggatgatgcgtcgtcgtccacttcctcattatccgaatcttccctctccatttcatcaacaattataccgactctctccccctcatccgccatgcccatagcctgctcctcccttggttgattttcctcattttgcatcgatggtccaacaacatcccctgcattgataggaccctctacatcttcggtttgcattgaaacatttatatctttctcttgtaccgacacaaatataacgaggggccatgaccgttcaaaagccatttccacataccgtctccaagcatcagtgctgtccatcggcattagttcccaaaaataaccttctgttgcacgactcactacaactgacactgacattgtgtagacttcttggtctattctaaatcctctcaacaaccaactataaattgactgaaatgttctctccgcaggcctatagatgcccttagatgtcattacaaaatctgacagatcaacaccatctggaccaaatctaatatttccttcaccgtgaactatctgaaatgtgaccttacttgacattgtgcctgatgaaaacaataactgcgttaacctcgcatttctgtactacgccctaagttacattctctacaatattgttctctaaatttctaaaattacgttacattctccagatcaaactaaactacaccttacaattaacactactgtctatgtctcaattcatactattatattctatgctctggatctacacatatgtgctgtgtgctacagatgtgctaaaatatatggaactaaaactaaaacgcaacatatatactcaaacataacatattagtacaaatgcaaaagatgtatgggagcatacctatgatgaattgagcgaaccagcagggcttcgccgctccccttctgctgccctcccctctctctcttttgttttttttggatttttagtgaatataataaaatttcacagaggagggactgggctttatagggggagaggcaaaaatcgccctcccccagggcggcaagggggccgcctgcaaaattccatgccc

SEQ ID NO: 7141 - DNA, 24012 bp, Oryza sativa
cgcgaactcgaggaacagctggtactccccgcccgccgcggcgcgtgacccgaggcaggggacgatgtgcggggagcagagccccgacatgacgcgcccctcgcgccgcagctgctccgccccgccctcgccggccgccgacttgaccgccagcagctcccccgacgcgtcgtccgacgcgagccacaccacggcgcccgacgcgccgcggccgagcgtgcggagccgcctgagctgcttctgcatcaccgcagccgcatccatcgatctcacttgctgtgttcgagctttcgaaggtcttggaggttatcaggtatttgtattggtggctgctgcctctgcctccacccgcgtctcgtgcaacacgtgcgggaagagagcgagcgagcgcgtcgcgtggtaatcgcgcgcgcagtaggaaggccgctcgctcgcgcccgtcaacgcctaggcgacggcttgacgagatcgcagccgctgctgcgcctgcgcccggaggattggtcaaatcctggcgccacggcgggcgcggtagatgggcaggatcaccctccgtttcggacgcgcggactgaccgaccgaccgatcgatgcgtcacggatcgtccaattggcttactcctatgcgcatattcgttcagcggttcaggtgagcacggaatctgcttcgaagattaactgcacgctaatcttgtgtccgtggtggataagcttaggctatgcgtgccgtaagtgactcctctttttcccttcacttttccctttgggatggacttcctttccccattcgtcgacttcgtttcatcgggagaaatatattcactgcaccggaaagccacgagcccacgagccatgttgtgaatataaaatcaacgtgaaaaaaaagtcgaatcatacggatgcagtgaggtaatcagctgatcaatggacgtctaatagtatagcccaccactaactccaatttatctataaccaatctaatagctcattcatacaatagttacatactacactattaatacctggtcccacctgtcatacacacactacgtcttggagttcgtgctacagcaggctacaaatctgtagcccgttgcttttctctctcctcatttatcttcttaaaatatgtttacagctggcttatagtctgctattttacctgctctacgagcaagtttaatagtatagcccactactagccgagaaggctattgggcgatcagtcgcgcgcgctcctctccgcgcgacgcgtgactggacacgtgtcgcgtgtggagagagggcggcggacgcaccgcgcgggagactgacttttccctttttttttctttttccatgttttccgtttctgttcggttggctgtttttttcccttgttttggtttctgttcagattggttttccttttttttttcggtttctcttctgtttttttttttcggttttttagatgtatgaatacaaagtttgtattcgtaagtatgcaaagtttgtatacacgtatgcaaagtttgtataagtgtatgcaaactttgtatacgtgatgcaatttcttgtttttttatttttttaatacgtatgtatataaagtttatatatatcgtatacaaagttcgtatacatcgtatacaaagtttgtatatgtcctatataaactttgtatacatcatatataaactttgtatatgtatatatatttttatgcaataaaaaatattcatatatatatatatacacgtatatacgtgtgtgtatatatagtatatacataagtataatatatacagagaagagaagagactagaggggggcgactaaccgtgcgcgcgcggatgatcgcgtatcagcgccctccactactagctctaaatcatctatagccaatgtaatagccaattcatacaatagttccttactatactattaatactggtcccacctgtcatacacacattacattttgtagttcgttctgcagctggctacagaattgtagcccgctgctcttctctctcttcttttatctctttaaaatatatttataactggcttatagcctgctattgtatctgctctaacaacagcagccagcagccggaggcaggagcccggcagttgaccaagcgttactgcacttggccccctgctctactgcggtctcacttggctgttggaatttccaaagggacccgttccctacgagaggtctctcaggtcaaccactacacaaaaagctatccaaaatcaaggccgtttcacccgcccttccttcttctcgctgacaaaaaaatgtacgaaagttctagtatgtcattttcgccccgtgcatatctccttgcgtctgctgaaacaggcaataaaaatatgttgacaattctattgctaccatcgtaccaaccatatcgctgtcgctctccaaggttcacacttgcgcctaaaaaagattcattggatactttggattggtacttcgtcaactcatgcacctctctcattcctccagcacgtaaacatttgcctgtctgttgaagagtcatatcgcgcttcattctctcataaaaaaacgtttttgagctgcatgtcgacgatatgagtccgttaaaatatctgcagcactggaataaaagacgcaaaaccattccaagattcaaaatcggatagggttcccgtgattaatcatttcataggcaacctgttgaatttaaaaaccagacacggttttcttatggcgaactgctcttccagttgcagctttgactgtgcacttggtacctaggcggttaagccacctaattaacaccctcgatttttttctccgggccggtgaaatgtcaaccagtctgaaacatgtgggtgtactataccattcatatctctcttgtgttgaatatttgtggccaattgaccgtgcatccctctcttttccaccccaaaaaaaaatcattgttgctcatcctcccaaaaagttgggtaatatcccagatcgatctacagcttagaacgcacaaggaatttgtggacacatgctagtgtggaaatcctaaaaaggaacgtgcgttcccatttcaattttgtgcagttgtgccatccggaaatgactataggtggactggactataaatctggaacatgcttaactgtgagcgtgctctaaacatacaatacgaaatgggacggaaggaaccgacgctgtaatcctcttgacgatgctctgaaaaaatcggcctggatatggtgtattggtatcggatttgttttccacagcacatcagcacgctgtgcttgacctgggagaagggaaaaaaaaacgcatttccatcttctaaaaaaagaagaaaaaagagtgcatttgcgtactgcttgcggcgccttggattgcctacctggggtcacagttttccgttgttatgcctgccatgaacatttttaagccatccacatgacattattggcatagacatctagaaatctagaatggatatatgagtgttatcttttgggagagaatggatgtatgattgcatatgtatgcccctttgaatgataggaatggaaaaacaaaggaaaaaacatatgattttgatagaaatacaaatgtaaaacagagaattacaaaacatagaaaaaaacataggaataactgtttaattgaactaaaaaatgtaggaatcagatgagagagatagtatcggaggaaattttccaagaagttgaaactcttactaagttttcttcaaaatctctatgggattatcagttccatagaaatttttgaaggataaaatattatttaatcttttattttaaaggttttcataggaaaattttcgataagattgaaatcctctaaaatttctatatttttcttataaattaaagtggtgctcaatcatttggttgctttccctaatgacgtactgatacttcatctaggggtgtacgacagatgtagtggaagatggatgacgaaacccaaaaccacgaacgcagtggtaaccagccgttgggcattctgtttccatttaccactaccaaagtatcatcaagtgccagtttaatactcctaacatcgacgccggagcgtcatacatgcatgagatcatgtcatattgtcattcttaagcgtgtcggtgtgtgcatgcaccgtgccgtaatgtaactccagagttgacattctactcacacggtcacaccgtggacgccctccggaacaagagcttgcaaacaaccggtggtcaatcaacgggcgacacgctgttactctgctagtaccggagccatcacggtgatgccgccgccatcaccagaaaattggcgggtcacaactcacgaccacgaaggcaggcgaaaagcgccagcatatccgcatttgtgccgccgaggtaagatcgcatcatgccatgcggatgtaaagcaagatggatgatggtgatactcactcaaaaccgcggacatgtgcgatgacgcagtggtaagtggtaaccagcggcagtttctgcgaatgcctgaattctgttactgtctgttcgttgccacttgccagttcattatcttccatcagaatattatatatactgacatactgtacattgtagagtgatatgtgacaatgtgcggggcacgcgccgatttggataatgaggagcttcggagatttgtcgattctccacgctgtggacacgccctaagaaaagattctggaaacaaacagagaacagccaatgggcaatttaccatcaacagagtagaactctgcatctggagccatcatcagcccatcagacttgcgtgcgcggtgacgccggtgccagtcacgtcacgtagacgacaaggcggcggcaggtgaggtgagcgccacgagggctgagggcagttgctccgcagtccatgctgcatccggcggccgtcccacgcctccaaattcgctttcgtttttaggccgcggccgcgccgacgagcgagcgagcgagtggcagcatgcgatgctgcctactcatgggacccccacggcggcggcggcgcgcgtggccgccgtccgtgccgggatttctcgaagattcgccgggaccggtcggtggaacgtggtggaatccctcatcccgcggtcgcggcccttcgttttccgctcgtcgcgagtcgagaagcgcatgggtgcgcagggttaggagggggcccgcttggtttgttttccccttcggacgctgcagcctatgggccgcgctaaacggcgctaatttgtcagccgctttctgtgaggaataagtttactttgggtccctcaagctgtcgaccagtctgattttcgtctttagtccagaaaaccggatgcgacacgtccccgaacttacaaaaccatgcaaatgagatccctaggcagtattgaccccggttttcgctgacatgacgcctacatggatcctttgactaggtctttgtcccacatggcatcgacgtgatgcttaagtagcaattctattccgaaaaataatgaaaaccatatgatccgcgtgtcagttaaacaacaaaataataaaaaatggtgggcccatgcgaccccacatgtcatccttactcccatcttctctctatcctctctcgctcccacctgggcggagcaaggcgaagcaggcgatgggtgggcgtggagtggggttggtggcatccggagtaggtcggccaagggagacggtggatgtactacacccgagctcaaggaggagcagggcgaggccggcgtccatccccatgcagtttgccaggtcagagccagagatggagacgaagatgaaggggggaagattgagagggaggtggcagcgagggggttcctggcgacgaggatggtgtgggaggtgcgcgtggtggaggcggaggcggagaaggtggcgaggaaggtggaggccgaggcgaaggcgctgaggcggaacgtgaggaggaggatcatgtcgtcagcgaggttctcatgcggctgctgctctggctcaacgcggtctacggcgcaatggagtcctcgcgctgcaggacaccatcgatgcccttgagcacatgttggtggcacccgtggttgccaacgacgccggcaagccgtcgacatggagtagcggcgactggagcatgccggcataggcaaggggttcagcttcataacctccgccggtgacgtcgaaccccctggtggcatcgaaccacttcaccatccccttcaccctctttggcggtcggcgggggagaggagaggaacatgcgtagcgatcagcgggagagagagaggagaggagcgtgcgtggtgtggtggtcagcagcagagaggacaggagcgtacgcggtgcatcgatcgacgagagagaggagaggaatgtgggcagcaacgggagagagagcgtcgcgtgacgtccagtgggagagaggagaagagcgtgggcaatgcagcagcgggggagagagcgccgtgaagctcaccgatctccccgcctctccctctttgagaagtagataaggtagatgtggggtcaagtactttaaatttattttgtttgactgacatgtgggttcctcatattttgtttatttctttaacttttcaattttgctcttttttttttcgatcaaactgccacgtaagtgttatgtcaatgccacgtgggacaaagaccaagtcaaatgagccacataggcgccacgtcatccaaaaccggtgacaatactgccgagggatcttatttgcaccggttttataagttggaggatgggttgtatctggtttttgggggttcaaggacgaatgtcagactaggcgacaacttgagggagctagaatgaacttattcctttctgtgaaggcgacggatccaacacggcctggtagtatctgtatatgggccgcagcgtgcaaagattgggtagcctggaatcctatgggcctcctccctctgggcttcaattaacaggacattttagtgtcgcggtgcgatcggatcgagatcatctcggtgtcatccaccagaatttcgggttcccaacaccgattgaattgcagttttgtttcgggacataataatcgttaaatggagcatccgcgaggtgagtggaatacgccttcccaattttcaggggtcaatcgaacactctgcagagctgaaaagatggctcagccgaaaaaggaaaattaaaggtccggcagtgtagacacaaagactcacacctgctgccgttcgagctttgagaaaaagaactgaattggggccaaaaaaagcatctgctgggctttgcgagatagctaaacaaagttaattaccatgtggacctactaaccaaatttcattagcaagcagctgttctgtcgcttccgtttcaacaaggaattattggcagaagaaacgatcgatacgatgcctttcaccctgggttatgcgtatccttatctgaatatttgtttacgtttcggcatctaccagacgtgtcctcgacgcagcatccagcaatcctaacacctcgcagacattcgccgcggttcgttgggcaaagcagcggtctccggctgttaaggaataaagcgctcgttagaactgtgctgaagtgaactgaactgaaaggatacacatgtctctgcatgaaagaaaaggctgtacttttccagctagccgtcatcttaacctccagacgaacagaatctctgaaaactctagatggtctgaaaccaaacccccggaccccagccgggtacgtatgttttcttctttctttcatgccttaagcatcacgtttgtcacaaaaacttaacgtaattcggctgtccatatgcatcccatggaagcaaggaacaaaaccagctatgtcccgtcagtaaaatagttcatattatttcgcgttctctatcgatcgcgtgtatatatataaggcccggatgctaacgccgaatcggtgcgcctcctgaatcaagtagaaatagtactactacgcaagtaacgtagatcagcacgtagatagcttgcgaagacgttctgaaagagtgcagagagtttttgctagctctcggtggtgatatccatggctaacgcggggctgaagccggtggccggccttctcctggttctcaacttctgcatgtacgtcatcgtggcggcggtcggcggctgggccatcaaccacgccatccacaccggctacttcatcggtaaaactagctcacattttgatttaccgtgtcgatctcgatggtgtcttgttatcgggcacaacgaaccaaaacttgctctaaattgagattggtgcctaattatgtttgtcaatagaaagtgcatatattttgaagctagatttgtgactgtttgagcgtatgtactgcatgtacgtgtaggttccgggatggcgctgccggcgaacttctccccgatctacttcccgatggggaacgcggcgaccgggttcttcgtcatcttcgcggtgatcgccggagtcgtcggcgccgcggcggcgctcgctgggttccaccacgtccgcgcgtggagccacgagagcttgccggcggcggcctcctccgggttcatcgcatggacgctcaccctgctcgccatggggtaaattaacgcaactaaatctgaccctgtcccatgcatgcatacgggtatactaaatcaatttccttgattcatttgttacgttttcagattggccgtcaaggagattgacctgcacggcaggaacgccagattggtaagatcgaacaacatcaaacacagtttttttttttagttcgtcgtgacaaccgaagacacgctattaactgtgtgcatgctgctctggtcttgatttttgcagaaaaccatggagtccttcaccatcatactctcggcaacacagctgttttatctgctcgccattcacggcgggaggtagaagaaggtcaggtttttctgattaaagttgtgaaggtgaagacacctttgtgagcattattgggcatagatcatggactttacgagcctaatttgatttcaccggtttgtgagattaagttcgacatggatcaaccagatcgaggcgctgtttgtgcttgtctacgaatacgtgtgtgtgtgtgtgtgtgtgttttatgcagtgtgtgactagcacttcttagtaattcgtgtgccgaatactcgaactcctgtgtgatttgttgattatttggatgcgttgatttatactgtattgatttcgccgtgtctggttaatcgatttgattatgtggacgtgatggtttacctgtttgaaattcagtccgaatggctatctccgcacgacaatcgtttatcccgtgaataataggggactgctatatgacgggataccgtttggacggtatacccctgtaattcatcccgtggaaagacgtgcgtgctgcttcgtacgatggtgagcacaccacgttcatgtactcctcccaaggtatattttacttgcctagtgatctgtattatttttgtattatttttttggattattattgtattatttttttattgggccatgctctgttacgtatttatgggcactattggttgggttttttatatatgcatgtaccaatgatgatacttataggtaccgagaatggtatctgtgagatatcaatatattgatgataggtatccaaatgatacctgtcatgtatcgtgatgatacctaggaggtatcaatgagtgataacacttataggtgccgagtatgatacttgtgaggtatctgtatgttgacgataggaaccaaatgataccttccatatatcgtgatgatacctatgaggtatcagagagtgatgatacttataggtaccaagaacattacacatgaggtatcatagatatccaaatgatacctaccatgtatcatgatgatacctacgaggtatcaatgagtgatgatacttataggtgtcgaggatgatacatgtgaggtatctgtatattgacgataggaacccaaatgatacatggtatgtatcgtgatgatacctaagatgtatcagtgagtaatgatacttgtaaataccagggatgatacctttcagatagcaatgtatcgaagatttgtttttatgtacccaaatggtacctgacaggtatcgtgatgatacctatgaggtatcaatgattgatgatgattgtaggtatcagtgattaaaaatacttggaagtaaaatttcaaagttacactaaacgaaacaattgagatattaagcaaatttaactaaaaaggattaaaagaaaaaatgacgaaaaaatgcataggtggggccaacattgagtaggcagtgccatctgacagtcgtggacctcgtggtaaagcgaataaaagtcatgcatgcgcgtgtgcgtcgtacttgttgagagggatggtgcgaggaggatgatcccgttccgatcgctaccaacggaataccggtacctagcatttccgataatgtattcctaaacttttaaaattaaacacaaatgagatcctaaaacagtttggatgatggttttaactaacgtgacatccacatggttggtttaacttgatcctcgtctcgcgttatgtatcgtggtcatggccattagccgatggcaatgttgtcttcttgccttgctttcttctgcttggttagttggtcttaaacaatttagcatcattgctttgtgagatcaaagcttaagtcaaaccaatcatgtagacgttacatcagtagaaatcattatccaaaatgtcttgggaccttgtataaactgattttaaaagttaagagatcagttatatctggcattacggtttaaggtttaaggatgtgatttaaactcaactcaacctaaaataaatgtattcctttatccagcccaagacttaaaagtagtatccacatatatatatgggccctattaggggtaagtctaaatgggcttggctcaactacataagcgagttcaaccaaaagaatttttaggacgaccttatgccctgtgaacaaacaagtatactactctctatctatttttaaattataaacagctacaaatcctgtaatttggattaatattcgttcttctctggattgaactgcttccatcatgtttattattcatgttactaagatatcaaaaacatgtgatggatctaaatcatacacattattttagataaagatctaatctaattgtacggttagtacttaccaaattcatatagatgcggtcaagttacatgttcgttttattataatgtttgactccatataataaaaatgtatttcaggttctacgaattcttttttaccttatcactgttattgatagttcaagctttcaatgtctatatataacatgcaatttaactacaaccctccgttttcctcatttttaaatatatggtgaggttgatttttttatacgtccatgctaaaatattatttgcttaaattatatttattgacaaaagaaatcataaataaaaaaatatttatttatatagtttttctaataagacaaataaccgaacgttgtgttcaaaagttaagcaacacatatattcttaagcatcacaaaaatagaggtagtattatttctacaacttcatatatgtccataataattttataatagtattagacattttttttaaaaaatattgtaataacatgtgtgtacacgatatgatatcaaataatggttcaggcccctcgcatgataatagcactaatccagtttatatttgattgatatgaaaaacctcagattaaatagagaacaatcaatcccgagattaccggcgagacccttgtcaagatggtttcgacgagatctcctggcgagtaggcttcacgtcctccaaattgtaggctatgttggcggtgttgacgctatgatttgataccttggacccctcagggggtgtgtatttatactgtttattaccttaatctccaagaagaaatcggaaacaccaaatccagcacgatatagtacaatcccgattctctccgagtagtactctattattcgcttccccgtgagaattatttccataatctctgtcgattttcttatcatatatagagacgtgtcatacatatgaaggtatgccttattcataatcatgacaacatcttttatatagccaatccgcatgtatatattcttaaacgagatacattcagagaatactaaagtgttagtcaaacaataaaaagaaaaacgaatatgctactagcaccctttcagtcggcaatactccatttgtagagagaagaccaatgcacattaattaattatttaatttgtgaaactggtagtatcgtgccacgttctgagcaattaaggatcccataacgccagacattaagtcggccaacccttctcatgcaatgaaggttttgaagcatggagtagttatcatacttgtcatatcatatagatgttatatataaaaattatatatctaacagatgatgtttttaaattaaattctcatctattcatgaatcatcttttttctctctcttttttatccacatatccccttgtttcattctcgattattgtgtagagatggtttatggcatgagaaatgatttatccatctttttacttcttttctcgttagctttcttgtcgtatcaggtttttactcgtgtgacaatgtatttaatgctatgaacactatatacgagttggaaatgacctaaacctatctcacatctcaactctcagcctttaccaactttttcttagaaaaagtgttcctagtacgtaattttaaacacaacccaaccaataaacagacacttaagtccgtgtggagacattggggatgtttactttgaggcctaaatcaaccttattaaattttaaatttgctacaggacatctaaaatttgtgtaatttgccgatagacatcgtgaaaacgtgttatggctgaaagacagtaaaaaaaaaggtaatttgctggaggacacttccggctcaatcggagagaaatttttttcaaaaagacaagaatgaccctagggtcaaaagctttttgagccgagactaaagtgaaaataaaataatggtgtatgctagtgatgtactttgggctatggcaaatttagagttacataatttccaaatttttactctaacaccatgtttgaagcatgtggctagaggggcattctcgtcttttttaggaatccatctcttcaattgagccgaaagtgtcctctagcaaattaccagttttttagaatgtctttcagccatgacacgttttttcgatgtatatcagcaaattacacaaattttgggtgtcctatagcaaaatttaccattttagaaattctaaattttgacattattaatattttttgacacgacattattaatatttgattgaattgagatgtgtagattgtatttggtttgttacctttactaagtttttctttttttaaaatagattctatagttgccaaattttgatagtgtagatggtcaaaaatttggtaggttcattttggcaacagagtgaaaaaccctattttttgctactagtaatactggagaagtaatttaggcccgatttataggaaagcccataggtaatttagggcgtgttgagagaaaaggaaataaaaatattgagaagatatataaaacaagatgagacattaatatattattaattaatttttaattattaaactttaaaatggattaatatgatttttaaagtaacttttctaagatttttttgaaaaaaaaacaccgcatagcaatttgagaaggggacacgtaaaaaatgacacaaatcttctccttttcataaaaggcgaacgttgccttagagaacaattcgatagtattacaaaaatttctatgaaagcacttgaaataacttgatgggtatcttgatctttcaacatgaaaactggaggagagtcatgcaacgctgttaccatctcacttttggagaaatcatcttttgtgggttggaccaataatagtcccggtccaacaaaaaaacagggactaaaaaccatttgtagtcccggtttaaaagtgcaacgagattatatgatctttagtcctggttatatttatgtcagacgttgtcaggacgcctgggatctttagtcctggttgatatcaccaatcgggactaaatatctctctcacatcctacctcgggatgctttcccacgtccttatctctctcgagaccgagagacccacgtctttatctctcgatctctatatgttcgctagttctccctcgatcctctttctcttcactcactcactctctctctctctctagcaaaggctggccaagagaagtggtagctgggcggggtcggtggtggctgggcgggagaagcggcggcggctgagcgggagaagaagcatcggccgggcaggggaggtggcggcctcgccctccccttcgccagatccggcaggagggaggcggcggcggccgggcgggggcggcggcagtgaagtgacagcgactcgaccagaggagaatttgttttttttaggatttgtggtgaatttgtttttgagaatttgtgatgctttttttgaatttgcgatgattttttaaaaatttatgatgtatttgatctatgatttggggatgtagtgaaatcaatatgcaagcagttaaaaacaatgaaaaaaagaaaaaaaaactttagttcaggttgctaacaccaaccgagactaaaaatttgtggtcccgattatataactgggactacaggggttacgaaccgtgattgaagatactttctccagtagtgctagtgcctattgccatacgtgatcaacgtgattaattcacgattattcctcaaactaaacatgcaatgatcagaagcaccaatagtttccatcttttgtggatctccctcgatcttccatagcgcaaaattaaaaagagagtccggccgtgaaacgggacactgtttttatgatgttcattccaatgttccaaccttgataaataagacgctggagggagaacgtgtggcacttctagagcagtgcaggtgacgatcagaaggacaccgctaccccgctgactgccgacaatctatctagactcaagctagcgatgccaattgttcttctacacagacaatatgagaggtggttcaaggtgcgtctgcaacctctacttccactttgatttaggaggctacatcaacatccatggcttcgaggaaacggttagtcgtccataatttcatattagcatattcatggttttaagttaaacagttaaaagagtagattagataatctacactacttcctccgtttcacaatataagttattctactattttccacattaagttattctagtattttccacattcatattgatgttaatgaatctagatgcggaggaagtactaatttttttttttgaaattactatagaataaacattcatatagagatttttgaaggaaagttagtaatagcttcaacctcttggaaagtttttttttctatctctctcatctgatttgtgtgtttttcctgttggtgtattcaaataacaacttctacattttccttctattttaatttgcacccatgtatttttcacttacattgaaatcaaaattatgttttattatatttttatatttgtttaatcctacgtttcgaacaaaccttagttcttgccgagctaaaagcaaatcaactatagacgagtaaatgcatcttgtgcaccatcatcaaaatgtttcttaatgatgaaaatgcaacagtggatacatcatcgcttaaaagcagcgacaaatgaaaaggaacagcatcatcacaaattccatgagaacaagtttctcttctcatttctctgctgcctggtacttctcgaagtgtgtgtcaatctatgaaggctatagtatgactacttgtcttgatcatggccgtgatgcttatgctaggctgctttattagttcttgctttagagcaggtaaaatagcatgctattagccagctgtaaacatattttaatgagataaaagatgagagagaaaagcagcgggctacagatctccaagatataatgtgtgtatgataagtgggaccatatattaatagtatagtaagcaactattgtatgaattagctattagattagctatagatgaattggagctagtagtgagctatactattaaacttaaacctgctcttatgataaagtgaccttgacagaaaatatagctaattatttgtcgcgaacaaatggcctaattaacaatggtaatggaatgtttgattttgctaccttccgttgctaggaattcctttatgtcattttcgttattattgtttactgtaggtccgatctgatccattctctgtgatgatacgtgcaacatggaacgtagacggatgagcagaagctgcacgctactacaccatttccctatccttttcaaacttcaaggacatcttgaatcttcttattcttcttccctccctccctcccctctctctctctctctctctctctctctctctctctctctctctctcttctcttctttttgcacaacccattgttaatttgaaattgaatactgtaatactcaatttgttttggaaattaatttgtactaccgtaccgaacgcatactgacgtgcattgcatataccatatggtactaggaacaagtttagtactacctgaatactagagcatatatactaaaatactcgtgtagatcaccagatcttgaatcggtgctgaacagaatcgatatttttaaaagagaactatcaacggaatcttgtactcagatatttttaaaagataacatactgtaaaataatgccagattcaaatactcagatctttttgatcggcaagttggtttttgtccagtttcgctgagactatcaagttgaacatgctcaaacagttgatgacaaaagcatcgagtcatcatgctatgactacttcttggcgcttcaagggttcaaaagtggttttcagaacacattcgacagacaaagcaaattcacttcaaatttgaacgaagcaaaggagaaacaatggtggtggcatcaatacttaacggtgctcctctgatctcttcgtttgattggacacccagtcctgccaagatgacaccttcatgctactacgggctgacagctgagtctctggatccagtttaccccatggatgacacacatcactgagaagtgagaagtctcatatgcctgggccacgttgaaacagacgttcgtattatctgagccatccatctgtcggcatgtgtgcaaattggtgttttccgtagcgctctgaattgtgtggctctctttgaaacagccagcatctaaacacaataatacgagtagcacaaggcaccggatcttctgcacggaagaactgttttgcctcgtcccaagttgaaatgtcatcgtccctgtcattcgagtattaatcgactgtcaatgtaggcgttagcttacgttgcagttggttgcagcgaccattatgttgaaataaacgtgtttatgataaagtaataagggttcagaacacatttaagcaattttctttcacttttttggccctgaacaattcaatagccaatagtagagctctgctgtggttgtgcagccgcagccagcgctgagctgagcagcacctaaatttatataaacagcagataaatccacacctactccattcaaacaaagtactaaagtacaggtagtatagtacaatgttgtgagtacaagaggcgaagtccggtgaggtgccaccgtgccacatgcaggcgtggtaacctggtgtccactctgcatccccgcaaaatggaaaattcaaacacaactcgacgaaatgctatccagaccgtagatgtccctttgtttcaatgcttgctgctttctttctttcttaggggctgtttagttcgcgaaaagtaaatttttaagtatcacattgaatgtttgaccggatattggaagaagtttttggattcgaatgaaaaactaatttcataactcgtctggaaaccgcgagataaatcttttgagcctaattaaaccatcaatagcacacggggttactgtaacacttatagctaatcatggactaattatgctcaaaagattcatctcgcgatttgcaattagtttttatttatatctatatttaatgctccatgcatatgtccaaagttttgatgtgacgtttttgggaaaaaatttcgggaactaaaccaggtcttaggccttgttagttggcaaaagtttttgccctagcgtgtcacatcggatatacgaacacacatttaaagtattaaacgtagtctaataacaaaacaaaatacaaattccgctagaaaactacgagatgaattttaagccaaattaatccatcattagcaaatatttattgtagcaccatattatcaaatcatggcgtaattaggcttaaaagattcatctcgtaatttacacgtaaactgtgtaattagtttttttatctatatttgatactacatgcatatgtccaaacattcgatgtttttcttgtgggaactaaacaaccccttagttcaagggcgatgttacgaactccatcagtcccaaaataaaaaaactcaggatctgtttggctagtgactgtagtttagcacaacaaactttagacgtggcacaatttcttaggttagtatttggttgagtgccacaagttaagttaaaccatactttattagcatattggtccacatgtcatactctcattttctaggcagagtttaccatagttgtgactaacaaactgttggtcacactttgtgtgcttgtcatagttatgacaaatggagttgtggtaaagttagtctccatctaaacatccccttaatctagaagaggatgtgatttgttctagcacaacgaatttggacgatatggttgttacatccccacctaggttttgttttattatggaggaagtatagtattgtgagagtttactctggtgtatatttctttccaatcacgtactactaacccttggtatgttgatttcgtttgtttcatagggattcctggcgtgaattgtttattaaccaagaatcgaactatggctgtgttattttcccttctttttcaactcatatctctttttttccgcatgcacactttttaaattactgagcgtgcgttttttataaaagctttctatagaaaagtttatattaatttatttttcaatgtttaatacttaattaattatgcgttaatgtgtaataccatttcccgtgaggttaggtggagttttcaactccacctcccgaactcagcctgtataacggttgaatccaactatcatgaatggttccccaaataaacatcaaatttgatcccctgcattcctttcaatggtacaatttatgcttgcggtgctatgatgcgcgttgcttattttttaagtttctgtaaaaccaaaactataactgttgttctttgttttactgatcaaattatgattatatataaaatatgttattgaacttttgattatttactcgattactttatacttctaaactccaacaatattatcatttacaatatatgttaaaataaaaccaatttgccaatgctaaaatgcgtaagggcaccaatgtatatggtaaagtgatccatatagatggaacccacataaatagtttttacccatagcaatctccataatgtatatagatacaatatatcatatgtatatatatacaatatattattaggagaagagagaggagtagagatagataatataatttattttatatgggtagaccatatgtatacgggtatcttttattattttttctatatggattagttgcacaatgataataggtggctgaatgaaatattctattgcttatgaactacttttacaccacctaaaagatgttagatgttggtggactcagtgtgattatgagaatccaccacaatgccaaacaacctatatgttgtattactctccgaaacatagatgaaggtgctaaccaattcttctcatttgacatctttacttacgtacaagagcgaaggtgggaatatctcaatcatagggctcaaccatggaatataatttttttgggaaaattttaactgaaaattagtactttgctaatgcaatttttttgcggtgtgtggggctcgatcctaagctgcccccacctggctccacccatgcacttgtagaacgctagtccatctgcactactcgttcaattccaattctaaaggattgtaacaaggggttatatggagaacatcacgtaggcactaaaaaaacatttatttgagaaaaaaaactaaaatattttagagtttaaatccctagcacttatattctgttggagctataagcattctaattttgtgatttagttggttctcaacctatagttttgtgatagttttatcactaaatttatagttttatgatactcagtcttaaatatatagttttataataaatttgatgctaaatctgtaatggattatacaacaccttaaatcttcatttttttataatctattatattattaagacaactttgaaagaagacaccacgctcgctgtggaggctagaaattcctacattaatcggagaaaaagagaaaaaaagctacaccttagattataatagatccagattaaagggcatagatttatcataaaattatattattaagacagctttaaaagaaagcactacgttcaccgtggaggctagaaattcctacattaatcggagaaagagagaaaaaagctacaccattagattgtaatagatccagattaaagggcatagatttatcaagaaaaaaaaaactatgacacaaactatatccagtacgaatagaaaatatactataaaacaaactctatcgggtacatacgtacatagagtcagagtcccagtgtttggcctaggatgtctccgattcagagtgagcaagaaaaggggaaaaagcagagtccaaagcaagttcatctacactccaagttcatgcagacatatagctgccactataagaccacatgcgccgatccatcttatgcagtatattttatcaatttgtcaactaaaatatgcacaataattttaggcccacattaatctcatgtgaaaaaataacaatagtagtcaataaagagggatcagtttatttgtataattttattatatgtgaagactagaaattctcacattaatcatagaaaaagaaatggagagttcaactaggaatgagatttagaaataaaaataagaaatatcgaaaacagtatgtgtaggaaacaaaacgatattaattaaaattcaaaataaaaaataaaataagttccaatgttagaaaaaaatgagagttcaagtaaaaaagatacaatttagaaataataataaatcataataaaaaaagaaacattaaaacaacaatctatctaaaacacaacaatagctaataacaataaacagaggaaagagggcgtcgggcgaggcgtaatgaagtagggtggtagtggttgatgagacatataaaaactataaaataaaattcgaatgatgattaagagaaggggcggcgggcagaccgtgaagcgtgaaggcatagggttgcgacagttgacatgatttctagaaagtaaaaaaaaaacaataatgatcagattcgattttaaaaatctcaataagagtgtgcagccggggggggggggggagggggaaggagtacagtggcagcatttgacggaatttataaaaattataaagacgaattctataggacaataaactataaaaactaagatctgattttcaaaaggtctcaatgaggatgaaaatggagtcatggtaggccaaataaaacgtggcacagaagtaagggggtggagacttatctgatttttaaaatcctaaaacaacaagatgactgttttaattttttaaaagaaaaccatgtgtaaaaaaattatataattctgtaggaaagctagccgcaaaattatgcgggccatccagatagtcttattaaaatatatgtagttttgcaataaaacaataaagaagtaaaaacttagtacacatgaagtaaaagaaatatactcctcctagttaaaaatatttcacgttggcagaacttcatttttctgatgtcaaataaatttgactagaggaagtatattataagtttttttacaacgtgtttgttaaaaatatgacgctacacttttcacttgatttcaatcacttttttcctcctataattgttttctctcctatttatatgtatgcttccatctcttccatcccctcttccacgtgaaactacttttaatcataattctcttatacattgcgtattagaaaattacatataaatattgaaacttaccatacaagttttaaaatttatataataattacaatgtaattgtaggtaagttatagagtgttttttaaaaaaatgtgaagctattaaatataactacactataatttgtatttatatttttataagaaactgtctataattgcacattacataaactaaactaaaaaaacgaaattcaaagattgtgaagatgtattatagtcttatacaatcaaaatataaagataaaaaacaaaagaacttaaaaagtaaaacaaatcgttttttaacgaaaaaaatcgatataacgggctgcctatgtgctgttagtatatatcgatattttttttatcctgaaaaaaacaaccaggttgatgcgtcatcggtgtaaaaacctaaaaaaaagagccgatccccctccctccacatcgaatcaaatccatctcttttctccccttccttccttccgcctcgcctccccttcccctcctcgccgcctcgctcccctccgccgcgccgtcccgtcgaatcccgccatgccgaagggtgccaagaagcgcgccaagctcaagaagaagcagcagggggaccaccccgccggctccgatgacggcggcaacaacaacaacaacaaaaacaacgccgccgaaaacggcagcaatgactccagccgccgccgcgacgccgccagcgacggcaaccaccacctaccgtcgcgaccaaacgttcctcatggtatggatggcatctacccttccctccccgtcccccgctttaagcccgtgtagatctgtctccccccacggcacgccgctttccgcaccagcggggagaggaatcgccttttccccccactccctcttgcggcgagggtggcattcccgtgctcttcgctggctctccggccacgttcccacctcctctttcgagctgttcgccttttctttctcttttgattgcttcctttcttccgctatattacgatggatgcgtgtgtgtttctgatgctgtggtgtgtgggtgcagtggatgtgagtgaggactccatggagagctccgaggagatggtgacgccgagggccgccgcgtccgaggcggacgaggaggagaggaaggccgccacgtcggaggtgcccgtggaggtggtcgaggccggggaggaggtcatggtggacgccttgccgcccgaagccgccgcaggtgcgcaggagcaacagggtaaggcggaggcgcttgtggtggtgcaggaaccggaggtgaagcgcgaggagttggtggccaaggtgcatccgatgcatgacccggaaccgcagggcgaggaggtgctcatcgtggaggcggctgcggtatccgcggtgcaagaaccggaggtgaagcgcgatgaggtggtggtcatggagacggctgcgccgcctgcggtgcaggaatcggagacgaagaacggtggggtgttggtcaaggatgtggtggaggtgtcacggtctctgggtgcagctgatactacagaggtattactgtttgcgatcgagtgctatgccatcggtccccatgttttgaaat

SEQ ID NO: 7142 - DNA, 10734 bp, Oryza sativa
gtccgggcggcggcggctcccctccccctccctatcagatctggccggaggagggagggggaggccggcgggggcgacggtggcggctcccttcccccctccctcccagatctggccggaggaggaaggggggaggccggcgggggcgacggcggcgacgactgtgcaaggcggtcggcagcgtctcccctccctccctcacagatttggccggaggagggatgggggaggccggcgggggcggcgacggcgacgaaggcgcggggcggcggtgaagacgacgacgacggcagcggctcccctcccctctcagatccggccggggagggcggcggcggcgagccgcgtgcggcgatttttttgttcgttttttttttttgcattttcgcaggcgggccgttgccccgactgctaaaatcgatgattttcacagtcgttgtgatgcaggcggacctccctcccgcctacgaagattagttttggccacctgcgaaaattagttttctagtagtgtatgcctcacacatgtatttatgttaggcttgtatggcttctaattgagaaacaaacaatacatgtgatgtattttacatgattttcaccatcggaacaagatggcgactcatttaaacaatttgtaagataagtgactaaattgcacttatatcacaagttgtgataccacagaatacattttactcaaagaaaaatcagtgtctttatatgcataatacttcctaactattctatctatcctaaaattaactactagtcatttaggattaactacctagttatagttatattcaaatttgtaatactagataacgatattttaagatgaagagagtatacatattttcttaaattagtctaagctatttatatctgttgagttctttactactacttccacccaacatttcaaacatttcaatttgaagattgtccaagaatataagcattcatacactactgcttactctcagttaaatttatctcatcgtactcccaaccaccttttcaccctaactctctctcgttaaatgtgggccgggcactaaaatcttttttcttcaatcttaatctttgctaaataatctagaaatgttcgatgaagggagtagttagtttttgttgttatgttaacgttgataaaatagtaaattaaaaattaaaaagatgatactccctccgccacaagccgtatgttgtctcgttacggtcaaaatttgactaacgattatcctattttgatatactttttatgacgtaaaattgatgttgttatattcatatttaaaagtaatttgtatcatattgatatattagtaaagtgattgttttaaccttgtcttagattggcatgttagaattgaggagatggctatgtttttaaataatttgtggcaaaagtacaattttacccctacacgtctatatttttatggataatcatacctcttcatatttctactattgttaaataaggttatagtataaaaagatctgaactctcaaataaaattagatttgtggttcagatcgattaacttctactactagtagggagtaccatggtaggactcaaataaaatacgttatatttatatgaagtagtgtaaatgagaaaaaacttgttctaacgagcttagctcaaccaaatccgtcttctatcagtcaatctagaaggcctgggtgccacccaagtgcaaattcttctcttggctagtcacgcaaaatagagtttggacggcagataggctggagaaaagaggatggtaaaaccaaaatatttgcccactttgctgcactgttgacgaatcgtccttacacctcctggccaaatgcagactcacaaagaggatatgagcagaaatccagagatggactgggacttacctccaaatggacgattgggaaaactgccactcagtcgatcagtggtggaccctcgtaacggaatccccaaacaccccgcacaaacccctaaggaccctggtgattttaatctcgtgggaaatctggtgcgaacgaaacacaagaatatttcgcagcaatgcatctgcgccgtcctcaattttagcaaagatcaaggagaaaggaagagcatggatcaaagcaggggctgtaaccctgcaggagtttggaactttgggagatatcacttaatatccgccttttgtcttccttttgcgggttattgcttttttctggctaaccctgtatatatcttgttataatttttttctactctattaatatatacaagacaaagctttttccttctttaaaaaaaaacgagcttagctcagctcacgaactgagcaaagttaactagccttaatcaatcgagctgtagcctcgttatccacctcaggtgtggctgctggcttggcttgtgggcttgtggcagcgtcggtgtgggggcgatgattttgcactcgatgctgtgaccttacttggaagatgctatgctgctattcactggcccgttcgtttttgacagccttttgtggcgtcaaggcttgatttgatacacgatgttcacgatgatgtctccagccatcgtgccttggcgccttgcttctgtcgctagcagcggtcagggtcttggcgtcgaacatgccatcatggctcgccccgacaaaattgacggactcacgtcgcatgatgcttactattaaccattcaatggaagattggaagaactagtgtactattatggtctgtgaatttccaactaaattaaaaataactaaacaaactcctcgcctgtttggtttctatttgaagagaaaggtaaaccagagtggttagcgtctttctttaatcccactggccttttgtttctcttcaagcaccgctagatttattctactacatcatgggagtgatacatgtagcttttggcaaaagcgaccttaggagaaaatttggattggaagctaacagcagcattaacaatgccacgaaattgttgtccaaacattactacggctcctaaacaataattggaattgactatcatggatggtgctcctaaacagtatctatctttctcattgctttcgtgggacacaaatcaagaaaagctaaaaaaacaggatagcgacttgggcaagcaattagtgagaaccttgattgttccttcttcaggagaggaatacacgttacacagtcctcccagtggcagcaacttacagagtacaagtgtaagaaacttaattattcttacaaaatctcatagtagtaattaactacacagtgttcacatttctataccctttatttatatttttacccatgcagaaatcataaaaaggtgttaattaaggagtatggactagtgaaaattaacagagtacagtctctactctcccggttggtcatgccctctgtgtaaaatgccttggaagaatattgtatatacgataatggcttaattcacaagaacctcatcggaagtactcgaagttgaagtcgccgaccaccatgctccggctgacgtcgaagtcgaaatgtgtcatgccctgctcttgctgcccatggcagggcagcccgaacttgtgctccatggcgtccccctcgccgtagcccacgaaaggctcgaccttgctctcggtggcccaatgcagcggctcgctctcgagcgcattgttcacctccggcgcgcccacgccgcagttccagttgctgctgttgctggagctctcgccgtagcccaggttctccgacacgtcaagcacgctgctgtagtccacgaacccggccgcgtccttgccgccgaggtggccgtacaatggcatgcccgtggcgtcgaacccgctgccgaagctgtcgatcaccgggaacgggtcgaacacctgctgctgctgcttcagggcgaagccgtcggcggtggccggcggcttctggtcctgcgtcgacgtgtccaatgccgccgccgcagcagcagcagccgtggagatgggctggtgggtgctggggtcgatgccgcgctgcctcagcttcttcttgaggcagctgttccagaagttcttgatctcgttgtccgtcctccccggcaagtgcgacgcgatttgcgaccacctgcatcggattcgcctcgctgatcaggccacttatcgctaacaaatcacctccacacaaccacattgcgacgaaaatagtactggtacgcattattgccggagcggcagtacgtacgaacctgttgcctaggatctcatgcaggccgacgatggcgtcctcctcctgctgcgagaagctgccccgcttcaggtcggggcgcaggtagttgatccaccgcagcctgcagctcttgccgcacctctggagccctggagcacagaagaagatcgttgcacggcacgggtcagcgatgagacactgagacacatgcatgcaaagagcggatcgagcagagcaggagcagcttacgacctgcgagcttgggaacggagctccagcaaccgacgccgtagcggtagatgtgattgtagagcttctcgtcttcctcgggagaccagagccccttgcgcagcttctgctggacaccggcggcagagcacgcgtgccgtcccattcccgcccgacacgcgagcagctacctgccgctgggttcgttgcccttgccggcgtgtatctgtctatcgatctctctgtcgatcgaggcggccggctgggcgcccgatccagggggtatatatggggaagcgtgccgagaactactgcacacacacacgtacggtgcgcgcgcgcgagggaggcagcagatcgagcagcgatcaagtggcctttaagcaatcaaccaacgagccacggagccaagcgtctctctacctagtactcctcttctctgtgtgtactacctggtgcgtgcggcttgatatcgtgcttccgctacaatggattggagcttaagatatctccggttcgtgagagaaattaggagaggagaggagcgcagacactgggccagcgagcgaaagcgagcggcaagctagggccccgcgggaacaggacggaaaggacggaggaaaaaaaaagcagggttagttggagattatgactaagatttttccatcaacacttggttagggaagaacacggtacagccatatcactattaatctcactattaatccctccaggaaacttgcaagttgcagctacacgaccgaagctataagcgaggcagcgaaaaaacacacgcctcgtgcagcgctcgtacactgggagggactaatgggcgggcgatcgccgctcccctatactctatacactcctccctcccttcccctctccctcctctctttcttctcttcctactatagtacaccacacaaatttttttaaaaaaacaaaaagttagaaaaatttatgtataaaaatactatatataaaaaatttgaattcaaattcaaatttgaatcgggtatgtaaactttagacttataaattttaggtgtatagaaatactatatatagaaaatatttgaattcaaattcaaatttgaattcaaatttaaaattgaatcggctatgtaaacttttgacttataaactttaggtctataaactttaggtgtataaactttagatgcataaaaatactatatatagaaaatatttgaattcaaattcaaatttgaatcgggtatgtaaacttttgacttataaactttgggtttataaactttaggtgtataaactttaaatgtatagaaatactatatataaaaaaattgaattcaaattcaaatttgaattagatataaaaacttttgacttataaacttttggtctttagatgtataaacttaaggtgtataaactttaaatgtgtaacttaaggtgtataaattttatgtgtataaatttactaaagtagaaaagtaatacggtgccaaaaaaggaaacaggtggagagagggagggaagggggattgatcgctaccccccccccccccccccgcgtcccaggtgatcaatcgccgtttaggatttccgtactcggttgctatacctatatagcccgtggggccaaatcaacagggtaagatcgtacggcggccatagctctgccgctaattaaacacggcttaattagtctgctgtgctacgcaatgcagatggcggtctttggccacgtcttcaattgattgtgcccggctcggtcgacactggccgtaccgaccgcgtgtgtgcctgtgtccacgcatggcaataggcgaactactaccgctgctgccgactgtcgcgttccatctatccgtgttgatttgcaggtgccagccccgtgcgccggtgcgcgggtggcgcggtggccaactgtgcgcggcgagacagccgaaggtaaagctgccatccaagttgcggccggtcgggggacgtcacattcgtgcgtgtaaatacggcattgtttttcatagatcgggttaaactgatcactgtccacgagatcctgaagaggatagcagccgacagttggaattgcagcgttggccccacgtctttccacgtaagagtccttttgtggggtactggtactactacttgtagtaggaaattttttacacggccgaatcgatacagtacctagaacattctttcagaatttctactttgttatgttctaaagaaggcataaacacttaaccaggttgcttatcgcacagtgtcagtttcatgcatgagaacatgtacaggatacctgtcgtaggatctactgacatgtgggtccgatatgcgtccgtagacggaagaagaagttgatgattttttttttcttccaagtagagagtggatattctgtaacagttaaaatgtcgaagcataaaactatctttaatttaggtgcgggggtaaaaaccttgctcgttctagaaagacatgcaaaggtgaaagttacacgctgaaaggtgaaaataacgcacacgctttggtctcatcagctgcaagaaagcagaaatgagagagcaaaatgaccacagggagaggggtacctgattaaccgccgagcctagccaaagttactgcagaacaaaacgggaacaaacaaaccaagcaaagcagcacagcagtaggccctggccatcgtaccactaggaaggaaaaggtgagatgcagatgttcagttcaacgtaccagacggctcgatcgatcagtcgactccatcctaaattcgagtactacgtacttgcagtgcgtggctcgatcaaccgtgcaatcattcagctttcagtacactaaaagcgagggtccctaaagcctcgggccatagcaattgcatgcaggacagggcagcccccgcttaacccccagcacttagcctcccacgcttgtgcgctaaagcatacgcatgatcgagttgtacacgtcaacctttttattttcttttccatctatctggaggccctaggcactaattaagagcacgatactaaaacgatcaaacttgccataatgccatgcacgcgttgcaacgaatttctcaataacggcacacatcatccgtggtgttcatgctgttcttgcatgccaacgcagcttgtagcgcgaaaacgatctgaaaaccacttaatttaagtgctctggcctgtaccgattaattagctagtgccgtgaccctcgttagagtggcttgaaggctcgtgccaaatgatggcagctagttctcagcagtatgactgtgcagggagatagagataagaggccaagagcagtgctcgatcgaggctggctacaaccgcaaggataatgatgtagcgaggggtgtgtccgttccgtccaggaggggagggggggcaaagctagcgtgctccggagaaagcatgcagggttagcgtagcgcggagaccaccagcaccacccgtccaccgcgcgcgcacggcctcggcaacaagtttggtggccaatcagggtcaggcttagcttccagcctgctccatgtacatgtcgagttcggtttagttgggaaccctagtatccctaacggccgcgcacttaattttttttaacttgctcttggcgttgttttgtgcgcgctgcaactgcaaatgcatgcagacacaccaagttgcaccaatgtgctcatgaattgtaatgcattgatcttgtgccttcacagatcgattggaataacgggaaaattgtgtttgcagtgaatgatcagatctgtgaatgctactgagcatttgtctgattctcccctcttttgacttgagagactgctactctgctaggcaatatcagtgatcaatcacttgcctaacggtgtctacaaaagctaattgcttggaaataacaacacatgtgtgagtggctaagtggtgatagcagtgcggagtcactataatgctggaggcacaattttgcatgtcaccggtaaaaaaaggcatatttttcgccagataaacctgcatgagtgaaactcaagaaatgtgcgtcaacgtagtagtgttaaccttctgataaaatgggatgatctacatgttccataggcgacaatgcttcttctccaattcttctgacgaagttacccgcgtaccaggaccagggtaggcagcttttccctttcgaccgagcttgcagcagttgctaaaagacaagctggcctctttttcacccacaagaaaaaagaggctcacttgaagaaagttggacaataacacaaaaaatatatttgttgacaacttggtactgttatcatcctctccttcctttttgtactctgttttttttctttcttcaagggaactccaattgtagtaccaagggggccgggggcaactgcagtgtattcttgcagttgacgttgattatttcagagttcagacaagtggacggctaaaagaaggaagaattaggactaccgactaccgagctacgtagccactataaggcaagttgttaccgctgcaacttccgcagcactaactaagacgacgactacgtggtagtatgcgggatgcatgggcgacatgtaaaagaatcgcccggcaaagtagtcactaatcgatcaattgggaattacctcaagtgcatgtctctattgtggccaaaaggatcctccaggattctcctacctgaggcttgatcttgacatgcctcctctataaaggaaagtactactagtaagtaaaaccccaaaggtgagagagcgagagaagaaagaaaaaaaaaacaaactaaagaggtggtgcatcatggtagctcctctttgaagttatgcaagcccaaagctagcagctaagtggctgcattacacatcacatacacatgttactactagtttactcatcgccgagcgacgacgtcaccggccgatatctctgggctcccgaggttggtgcgcccggccggcgctgccgctacgtagtagtagtaatactagtagtacgagttagaggccgttgctgtcacaaaaagatggcgtgatgtgcacttgccttgcatgactaacctgcatgattgaacttgctgctggctagctgcaatggaaagcgcctgctcaagccatgcagaactgaactgtgcactaattaattctcccctcacctaattcagctcgcctctctctgttttttttttcattaggaggccggacttgctgcatgcatgcctggctgtctggatagtgcgtactgttcctttcctacccctctttctcgctctcacggcacactgacaagatatgggctaaggtacgtagctaatagcctaatatctagtagtagtagcaactaagctagagccatggaggttacgcaacggaagccaagcaacataactaatcagtggtactctccagtactgtccaactgtcctgatgcttggagcttggaaagtttggatgctagctgcatttcagagtaaggagcgtccgtacacgcagtttactgaattttccgttcttcagttcagaggattgtttcttcccgtcgtcctctgcttcgtttcaatattggtgccgtccgatctaggagtagaaatggaatccgtttctagtgcattccgagctacctgactaatcattccagcgtgattgctttcaaacggaatcctaccgggcttgaaatcgcgggcgcaatgcagttatcttcgtagtgcgtaccaagctagacaatagtattgcgcgtacgtcatttctacgtatcagcctaatagcctattagtgatcaatgcatgcatcagatgcatcttagaaaaaacttacgggcaaagcaagaattaatcatctggccgtgcgggtgtaatccgtatctagccacgaggaaggccgtacacatgtttcattgcttaatataacaaacttgcagtactgcacccacggcgaacgttgaaatgcaacgtgaatcgttctgccattatttgatcatccgtagctcgagtttctgaatattattgggtactccagtctccaaatgaagtttttgcaaaacaataaagtgtagcttcaggggcagaaaacaacgaacttccagtcgttaagtggaggtggccttcagctccacaaagctgcacattttctgtgtctgccctccgggctgcggcttcagaatgttctgccggccgacatgcacgtcagaaccagcatggactagtcgtgtgtgtgtttttagagaagggtattttttacccggcctctacatccaaccggatatatacggccattgaaatagggaacttagccctgcaaacaacccaatctgaaattcgctccatagg

SEQ ID NO: 7143 - DNA, 29484 bp, Oryza sativa
cgcgcctcccgttgcatcccgcgcgcgcgtgccttggtggccgaccgcccggtcgccgccgccgtcagcctctgcacgcgcctgtcgccggtgtcgccgctccgctccaaaccgtcccgccgtcatcgccgtcgtcatcgcctcggccccgccactccgcgcgcaagccgccaagggacggaggcagagcccctcctccctctgccgcgtcgcccccgctcccctcctccttttcccaaagaggcaaggggcaagccccctttctctccctccttttccccttttcctcccgccggcgtcatcctccctccgccctgtcgccgatttggccgctagccggagcgccagctcgcgccttgaccggccaaagtcggtttccaaaccgacattgccaccctttaaagcccaggcgccctcccttcctctttcccccccattcctccccgtttctcgtccgcgccattgccgccgccttccgagctctgtctcgcctccgccattcatcgccaagcgccgggagagctggtgcgttcgtggacgcggaaggggactccgggcgcgccctctccttcctcttccccggcccgaggccggagagattactcccgcgccgtcggcctctcgtcacagcgccccacctcatctcggtagtgcctccctctgttcttcctcctcgctccatctcctccccttagactcgggtagtagcacgagtagcctccccgtagctagccagcgccgccccgaccgttgtcgccgctcgccatgtgctcgccgccgtcgccgcccgtgctccgtagcacccgctcgtcgccggcctcgctcggcgtagctccgcccaatccgacgctagcaacggattcccgtagccgcgtagatgctctcgccgccgggaatcggtccctcgtgacctcgtcgcctttttcctcttccctccccgccggttgccgccgccgcaatccgccgtcgacgcactccctccggtgaatccgagcagttagctcgtctcccctcgtcctgagcaaccacccggtgtgctcgctctcgcctgtatcgccgtggttcactccgccgctcgtcgctgtcgtccgccgtccgttccggccggcgtcgtcgtctacctcccgccagcccgcgtggcagccacgtaggcgccacatcggcgccagctcgcccgagatagggtcgggctgaccccggtcagcccctcccgtgcgcgcgttccaccgcgagccgtgaggctgcgcgtgggcccgccgcatccgttcctccgcgaaccacgcgcgtgcaccgcatcccttccccgcccgcgcgtgtgcgccgcgtgctcgctccgcacggtgaaccgtgtcaccgacaagcgggtcccaaccgggaccacgcgtggtgagcccggtccaccggctctctctctccttccctcccgcgcgcgcgccttgggccgccttgggccggccggcccgtttagctcggccgaaccgctccgtttctctcgggccgtgccctagccgcccgaggaaaagtctattttccctccctcttttcttttcttttcttttctttttcaaaaaaggatttaattaaatccttttcctttagaccaaaaatccaataatcttagaaattcaatattttcccaatcgtaaatccgtttgactccgttcaacttccaaaattcctcaaatctcgagatctatctaatggcacgcttagaggtcattaatagagctttattttcgccgtttgttgagttgtcccgtttcgcgtgtagtttcggagcccgaagacccgcagtgcgaggatttcaaggatcaagctccagatctcgagcaaggcaagccacctttgaacatcttgagcctatatttgaactaaattatgttgcttgaaaaatattatgcattgataggattgcacttaatctgttgtctcgtctgcaaggcagattggcggacctacctaatttgttgcatttgatccttcctttgttgattgatataccatgtccccttgtaactatctagttgcgtctcgatattcgtgcaccctgtgcgagtatcgacggacgccttcaaacttaaaatctgagtaacaacttgggtaaaacttgggttttacaaaagacttggaaaacccgacacctgggtcggtgcttgcgaactaaatgaatttccaaaaccgcggaccggggaacgtaccgggtgtacggtttcccgctcttgcacctaaggaccgtttccttggaatttcatccaaacataagacaagtacgaccacatgggtgaaatgggacacccctggctgagtaactagcttatcaggggagccttgatgccgagagacatgtggattcgccggggtggtgtcggggaggacccctgggcttcctggcacagtatggtctgggacctaacctgttgttggtctgggacccctctcgtcggcatatggtaaacctgtgtcggctttcgaaatgccttgtcatgaaagcttggaggtctcccgacgtggctgatccccacgggctgggtgatccgggttagtaatgtcgtgtgggtaaagtgtaccccctctgcagaggttaacaaactattcgaacagccatgcccacggtcatgggcggatgtgaggtgattcctagcttagttttgtttgactactgcttgtgaaattactgttgtggaaaggggttcgatgtttgaaaaatctgcagctgatgggatcagctaggcccgggtggccgtttgaaagttgttggcccgggtggccgtttgaaaagctgttggccgggtgccaaccttgtttcaattctaaagactgatacattgcacatactccgaccggacaagacgcactgtctcatccgtgtcgtttgagaagcactcacttagtcgtttttagaaaagagttcaaataaaatcaattgcaaaaacaacagcctctccttgaagcctgcattaaacacttatttcccatggcttgctgagtactcccgtactcacccttgctctatataaataatctcccccccagttgctgaagaagatgaagcggatcctgctgatgaggaattcttctaggagcaagccggctacgatgagttttagggtttcggcctagttcccaagtcgcgcctgtgttgtttggtccaagtcctggcttccgcttcccttttgtaatgcagttgtgagctcgggatctgtccacagcccaacatgactgtacctctactctttaataaagagacctctgtgctgtggtaatctgtcttcctgtgataccagcactgtgtcctgggactggtatcgattaacagttaatttggagcgtcacgggctagttccggtcggtactagttcggggcgtgacacaatcaacacccaccagaagccacaacaaagaagcctacatacgccaagacaaaccgccggatatcgatatcagagatacgcctggatcgaccctatccggtaccttcagaggccggccatagggatctagtactgtctctgattccgtcgggcgctagctcgaggaggaaggctaccctgttgtcgactacgagtcagatcgtcagaccgccatgtcgacaacagttagataggctaccccaaatattgtactggtgtgattattataaataagagcaataccggctttggccaacaggatgtagggttattacctgacaattcaggggcccgaacctgtataaaaatccatatctccgtcttttttacctcagtctcgcatatatcttagcgccgacgatccccatactatgcaaataccagaattgcgacatcaaacgtcgacactcattcacggtactttaaatagtcactttactagtgtttggtttgctatcaatatatgccaacaacacacatataaattatatattaaaaaaagatggcactactaacacttacttcatccgttttatattgtaagttgtttgattttttttcaaagttttttatgtttgatcaaatttatagaaaaaaatttgcaacatctacaacactaaattagtttcattaaatttaatattaaatatattttaataatatatttgttttatattaaaaatattactatatttttctataaatttgataaacttataatataaaaatggagggagtaccaaggttttagtattgtcaacattttaacatgtagctaaccagacataccctttggatacgtactaccaaagagacgtgccaaggtgtacggggagtcaaagaaattgcgtcgccgagggaggaggatgtacggcagttattagtatagctgcaacttatattgttagtaactgcgaaaagaaaaattgttattacacgtacactgtagataaacctgaactcttggattcggatccaacacggaagccatcacacacaccatagatttgcagcagatccggatctctctcacacacaaacacaaacacgactcacaagtcacatgtgacagtgcaggattacagggcattgacatcggcgagacgctgacgtctaagctgacgccggccggagcacgggcacctcctcgctcttctttcgtttttttgtctggcgtcccccgcctcttggtcctacactcctactaactcctaacctggtcgctttgcttcccctccgcggccaggcccaccgcgcggccggccgagacaaggcccaacatactaagcccactgcaacagcaaaaccgtataagctcgcaccgtgccgtgccgggccaagccgccacacctccggtgcactgaagactgaacagcggcgtgtagacttcgcctggtggcaagctctaggtccccatataaaaaccaaagagtcctgcgaggcccatcatcacccatggccacgaacagacgaactgatcaaattccaatcagaccatatgtagtaatgccggtttgccggtctagcgaacaacgtgaagatctggttacagcacagtattacatcctctgcttgactgcttcagtaacaaatttcaggactccgtcgatcacacggtccccaggtggaaactgtgtcttaatcaacgagatagatgatcaagctagataagtttgttaggggctaatagatattcatggcgacaaattcatcaacatttatgccaggaagctggaaggctgaagaatgcttgcttgcccggttctctaaaatactccagtgctcggttatattctagcctctaggcaaggtcttacagttttcatctgcacagccttttcttcagagtgtcacgcagagactgatcatcagggacaagatactccagtcaagatccgtcagaaaaagacagctcgaagatacatagatgacacggaaacagggatccccagcttgagaacctttccgtcggcgcagcatttacctccctcaccggcaataagatctcatagccgcaagaaactgacatgttcccatccagaaaaaggcaacccctgttgtagaacagagtcctggagaatatggcattgcctttatgtcaatggatcatcccagagaagggaaggccaacttgcaaaatcagaatgctaacaagccattgttaatcttgatatctgcaacataaaatgtaacatcagatttaattcgggaacacctagtagtgcacgtgcacgaatagtgggtcagtgaaagattatccctgccacaacataggtaactacgacgataatcctttagccaacatactgatgtggatagcatatgtgaaatgaatagtttcaggtgagcgttgacagcatagtaaatctaatttaattaggatatagatctagcaatgctgtttcagatatcgaaagagagaatatacccgtcttttccttccctttcatcaattgcctcttgtatcagctactatgcaatatactggaaactacgtgatataaatgttgcaataaataagaaagatatgttttgagatttgatacactcctttcaacccagaaagagcaggtaagtgtacatccttgattgacgaccatctcgtggttaccaattccatcaccgagatcacagcagaactgccatggatataaattgatgagtacagtcctgagaactgcaagctgtgagctgatgaatccaagatctaacatgtctaccatggaagagcacctgctgcctgtagtccaccgtgatcaagtatactcttcaagacaagacagaagaaaatcctccgatgtcccaaacaggttcgtgacttcctttcacccaagtacaaatagcaaaggtaaccccaatactcccaatcatccgttacatactagcggaaatggcaatatagttaccgcacaaaatttccagcgggtgcattcttctccttctatgttcacatcaatcaaagaaactccctgtgcagatgagttcaatgagcaaagccatgctgcacaacacgtaccatcatttgcaaggcaggctatcgttagcgtcatcttgtacatctcaataggagtccttgtatacatcacaaatgttgaaggcttcaaggggaggtccacactgaagttagttgatggcctttacttcaccatcataagcttgtgcaccataggatacggtgacatagtcccttgcactaccttcacaaaggtgttcacatgcttgtttctactaatcggtgttcgctttgttgacattgtgctaaatgagctgttgacaaatgtacttgacaagcagagaacagtcttacttagcacaatggatgataacaagcttaatagggtatttgacacctatatgattgatgctgaaaagaaaagatcaagagggaggatgaaagtactacttgcgttaggggttgttgtaggcaccatctcaatttgtacaatcatagtgcatgaggtggagggtctaaattggattgatagcttctatttatcagtcatttctgtgacaacagttggatatggggattatggcttctcaacaccagcaggaaggctctctgcaacagtgtgtttgttagtgagcactttggcagttgccaaggccttcctgttcctaacagatctaaggatggatagaaggaaccgaaaaactacaaaatggatcctccagaagaaaatggacaatgagccactggctgcagacctagaccatgatgcttctgtaaggtattgcacaaattttccatgaaaccatatacctgcatatgttgtttaacaagtacgttttcatgttttgcaataagaataccaagagttcaattaccaaaaatgtaagaacatttttctttgttagtgatgaaactagggccagagtacagttttgtttgaacattgaaaaatgtttgataaagaaacagagttgagttactcaaataaacatatagatagggcattagggcaaggtcacatgcccgtgatgtaggtgacaccatgaaaattaacacctcacggtccttcatgaaatttactttcgttaccttttgtttttttctttattgtattaatctgaaagtaatttataatgttgcattacagtgtgaccttttgtattcaaggcagttatccagtcctaactttgtggtctttttctttttatgccacagcaaatcggactttctgatctacaaactcaaagagataggaaagatcgatgacaaagacattgcaatgatctcagaccagtttgatcagcttggccttgcaaagtgtggaaagatcactcttgcggacatcattggaaaattataagtatgatttacagaatgtatatgaatacctgatatcatagtgatagttgctgtcttatactttgttaaacagacactaaagcatgcacatgtgtgggtaacctattaaataacctcgctattcgaagtactctgtttcttggttagaagtaaaagtccatgtgctggttgaatgaattcaatcataacttcagcttcaggatttcttgcatatttgtttctagattgtattgatatttaggtatacaagcaaagaggcaggtagacaataaacaattgatattaaagaatcataagatcgtctcatacaagaaaatagtgataatctaagctatgtgcagtgaaatcaaaacaatgacacaacttaccatgttacaaataaaagaaacagggtttgatgtcatcaatacattgctttatatacttcgctatgacctcagtcctcagatccagcctcctttactgtattatccacaatctttgcaatcctgaaataatgggtggttatgaagcttaagtatgtagtagccatgcagtaactgtataattaaaaagtatcatgccctttgaatacgctgtgtttctcttcctcctcctcctcgactcacctttctctagtttcagttacaagcttcaatacgtcagacaatttttgccacttggcatttattggcttctgaatgtccacctgttctgctagttgggaactgatatattgttcaatttcacattctaatgaatccagctgaaaaccaatatggtctagaaaagcatcataagaagaatggttagttatgctgtttggtgattcaagatcactggaaaatgagaagctatcggacgtctgaagttcactttgctccaactggccagtcatgcctgaatgcaccacatgttgcagatcaaatgccttttcagatgatttcgcaggagagctagtagtctcatcagcctcatcaccaactttactagagaaaactcttatgttgtcattggattctttgccattagacatccctggatgcaatgcatgttcaattaacatgttctgcttcactgaaattgcctgaatccaacaaagtagaaaaatagtaggatcatttacataatagaatttcaaatgcatagatgaacataaatttgaaatttgcttccttagtaggagtggtatatgtgagatatcagatatgttcttgttaatgaccaactctataaagaaagagaatctgtaacttttcgtacttgacacaatcagcagaattgccaatttagcacatcaacagtacagcatgtaactgctgattaatgttttggcaattggcagtagctaggtaccataagcttttggcacaaactacataatatattcgttttcctaagaagaaatagcatatggtacatagtaaaaaaaaaagacatgacctcagtacctcactgattttcatggaaagcttatcaagcacctcaatgcgctgttttatgctttcaagagctttggtcagcttcttcttttgcacaagtaaatccactgcctcattctctttgcccattcggatgctgaccgcagctcttttcttaagattctcagcagcctcagtcaaccgcacaagccttaccctcgtgctatttgctacaagaacaaaccacaaatttgagtgcagcagataccacagtggctgtccactcaattcgcatgcacatacacaaacaatctcaccatttgactacaagatcctactcaattccaatcaaaattaacttgacatggatcataacgtactatcacaagtctggagcatataacagataagttcccctgtccccgaaggattcatcattccacaactccccaactactgaaccagtagagccgatctgaatagcagccacgggatgccggaatgcgtatacctttggattgggtgaggtcggcttctgcgtggagctgtaggagctgctcccgcagccgctcgaacgtcggcggggccgggtcgccgtctctggtagatgccgccagcgcgaaccgcggaggagttgccctcgcgcggcgcctcccccatgccgccgcgggagaaggtggaggcggcgctaccggcggcgcgacggcgaaggccatctccggtgagcgtccagatgggcttggcactgaaagcggaaacttagaaatacgcgacctccttaaggcttctccgtgatgggccgaaatttcggcccatccaacaagtccttaccggacgacgtatctcggtgcagtggtctactgcagtactgctaaataggaacgccccaaaattcttctgaaaaatttcaaaacatttctcatgtgaagctcttgaattattaggttctgatcgagaatttaagtagatcgcatgaagggaaaattctactcctgaataaaacattttttcacaaaccgcaagttcgtagctaccggtcaatccaacttaccaaaatagttttttcgtacctggaacagaacacatttctgtacagatataaagagggagataagttgcctgaatttcatggtccagtccaacctgacggtccatttgggcgacggccggcccgatcgctcggcggacgaacagcgtcgttgctatatagcatccactgccagcacagtgccagtgtccctaacccttcttcttcctcaactcctccacacacaatgtccatacatatggagcttgcaatttgaagcattttcaagtttgcatgcccatgagaaggagaagcagttgtgtactcacactgaatgcgcgaatgctgtcgctacttcttgattcaaaggtcatttccgctctgtcaaattgtgcgatgcattatattgcctatctgttttgattgaagtttgaagttattgttggctgtgattgacgtttgtaggttcagaccagtgttcttgcttactggtattcagatgctataataaaaggttataatacatatcttaggttttggatgtgttctttgctttcatgcttggcattactctgtgcacttatgcgctgtctgtcagtgtgcagaatacatggaaacctgaaattaagtgatagttaatctgtcctggataagtgtatattgcaggctttatccacagaatgaagtgtatatggcaggctttacctgaaattgtgtatttgtgcgtctcctagtatgactggcactctcgaacaaaatgaagtgttagactgttaggtgttttactgaatccacacacaacagcggaaacatttcggatgacatcaatggcagtatgttctggaataagaacagatgtagcaaacaaaaaaataacactaatgagctgcgcatacgtgcatatatagacagacaaacctgcagggttgtgagctgcaaatgctcaaattgatcactcgaataatgcacacagcagtagtataggtgcaagcattaagtcgtacatacgttttcttccatcacatacacatcaccggtcatgactcagcagacaagctgttcttacatgttttctcatggtcaacttattccctgatcaatctcccgaaagattactgtttggattccatgacgtctccatgaccaatctcaccattgccatgctcgtgatcgttgccctcgacgacgaagagatcgcctaactgctcgtcgttgatcagagaatcaagaaacgaggagaagtcgtcgtcacccaccatggcggaagcggaacccatgtcgaagccaccatgaactgcatcctcggcacagaactgatcgccaaatcctccttcgaatccctcggcatcggcggcgctcaccatcgctgcgaagtcaccgccaccgtcggccggtcgggcacgatcgtcgctgcactcaatgccagcggccggcgaggatgccgtcctcggcggcttggccggcaccgccttcttgtaagaagtggcggcgacggcagcggcggcgttggagtgatcggcggcggccgtcagcggcttgtgcgtccgcgggtcgatgccctgcgcgatgagcttcttgctgagatgcgagttccagtagttcttgatctcgttgtccgtgcgccccggcaacctcccggcgatcagcgaccacctacaagcacatgcacgggcggtcacctcaccggaggagcagtacgacctttgcacacgagcgatcgccttcggtgcatcaagaattgcttaccggttgccgaggaggcggtggaggcggaggatgaggtcctcctcgtcgtcggcgatggggcagcgcttgatgtcggggcggaggtagttcatccaccggaggcggcagctcttgccgcagcgcagcaggcccgcgcgccgcggcagcgtgcgccaccggtcgcacccctcccgcgccacgaaccgcgccagcacctcgtcctcctcgggcgtccacggcccacgcttcagcgccgccgccgccgcctcctccccgccgcgcagcgccgccggccgcttccgcttcatcgtaggatcgatcggcgattaatttgcgcgcgagctagcttggcctcctcgagacgtctcgatttgcttaattgcttccggcgatggcttagctcacaaccagatgagacggtgtgcggggctttttctcgccgtgcaccgcagcgccacctccccggagaggaaatggtcggtgggggtgggtttgttctcctcggcgtgcggcctgtggcgttttgcgggaaacgggaagaattctcggggacggatccatcgggtattcgggttggggtacaacgtgtcacgctttttatccgaaaaggcactgcagatgcaaatgtacatcgtcgcgatttcggcaattcggcgccgcggtgatagtcctcacggggaaaaagatctgtagcattagcaataaaatttggagcaaactgaatagatggaattatgaggattatttctgtctacattcataaattacatggctatgtataacttctgtgaacgaataatagcctaaaattaaactccaaggcttcgtcttttttcaactccaaactaggtttcctttttgttcgttaacacattttttaaaatgttaaatagtgtgttttttctttaaaaaataaaataagcctatttttaaattttgtaataatttatactaattacagatgtgctaatggtttgactcattttgcttgtgctaaaaagctaaaccaagttagagattcaaacagaccctaactacagttcaaacttgacagttaaacttggtggtcaatactaaaatactttgagatggtctttttggacaatcggtttagtaatgggtccaaaattttagcctataaattctacaaatttttttatttgagtaattttactttgggtcacctttttattaccggtgtctcgctttggatcaccatttaactaatgtttacattttgaaccaggtaattttacctttgtggcactttgaaccatccctcaactcttttatccatctacatcaaaattatcatatgtcaaagaaacaatctacatacatttgagggggttttgacgaggagaagccgacgtacttgaggtcgttcatctgctcgagaagagagtcggggtagtccaaagttaaggaaaggcaagattacttggtccaaaatgaaaacattggtttaaagggtggtccaaaacgaaacatcggtaataaaatttgtcccaaatatgaaatttactcttttttgtttttatattttttgttaaaatatttttaaaatattttttcaaacttttgcaaatctatagcacgcattaggagggcatttcctagagggcttctttatgacatggtagatggttattgacgtgtacgtctatatatgaacgcccctcatatttgtatccccagctgtgagagatcagcgtcgagagggttctcgtggtccatagtggcggaagagaagagaagggagccgatgagctcaagctcaccaagcatgtgcgagaaggaggcggcggcggtggcggtgggcagctagagtggatgaggccgcagcctacagcagcggaggaggagaggacggaggtgatggagaagatgcgcccaaaattttaaggtgtgcttagttccacgataaaattggaagtttgactaatattgaaagtttgaagaaaaaagttggaagtttatgtgtgtaggaaagttttgatgtgatggaaaagttggaagtttgaataaaaagttgggaactaaataagggcttagtctataaatttcaaaagttgaaaggttgggctgatttttttttttttttatgttttgaggttaagagaaatgattgagttggactatgaaagatcccatggcctatggcccattaccaccctttcaagctcaacaagttcgagatggcccaacttgttgcagccgatcgagcctatcctaccctagctaagcatgactcgaaatgaacaagacgtgccagcaggagtcatgctgccttgtgtaggaagcacccgagccgctgaacaatcaactggagtattgaaatttgaaaggtgctctcgtggaatatttgcacagctggtggacgtgcgaggactaggagacctcgaatcgggctacggaaaatcccaaaacgctagcgacgtcaacgtgtgcttttcttggcttccaagcaggtctgcctcctgccttcctgcctcctatggtgtccaccagttctctcctggtcaaagtatgtaaagtttaactgggcgttcggcttgactagaaagggatagattattaatgaataattaattaattattaactattttcaattttaaaaatagattcctttttattttttaaaaccttctatatataaagtttttttaaaagaaatatatacttttaacaatttaagaagtgtgctcacgaaaacgataaagttgctcagtcaaaatgtggaatcaaatccagctaggtgaaggccttgccatttgcaaattgcagtggcacattcatgagggtgtgtcgctaaggtgacagtgacctgaagaattcctagttctagatgtattgatctgctctaccgtaaaggatactccaggtttatattactctctctatttcaaaatataagaagttttgattggatagaaaatattttttaagtacgaatcagattcataatagtatgatgtgttccatctaatcaagatttttttatattttgaaacggagggagcattagtttgctcaaagctcgtacgaaattgaccgttggtatctgcatcagaaaacatggatcggtattttacacacgtgtatgtgtggcgctaggcattttttgcgatcacgtggaagattcacacgtataacacgcacgtaacgtatgtacgcgcagacgtcctattgcccagctagccagcatcgattgcctgaacgtacatgcatcgggacgccacgacgaagatttcggccccagttgaaaattcagctaatgatcacgcagaaaaggaacagcagtacgtacagctgaagaaaaacaacacgggtcttgggctcgtcgcgctcatacttgtggttgtgtaatctttgcaaaatcctggcgtaatcacatggctagtacatcccgccttccccgtcagttccattttccaagcaccgaaaaaacaggagtgcgcgtaacagtcaaaatcctgcacaggaaatgcctatatatgcaggtacctcctccacccagtgatgtcacccagctcgagcaaataggctgtagctagccggccggcgagaaaaatggacgagtcaggcagaggaacaggtgatgatcatggccgggagacgaaggatgctgcggcggcggcgtcgtcgtcgtcggggaagaaggtgccgctgttcagcttgttccggtacgccgaccgcctcgacgtgctgctgatggttgtcggcacggtgggcgcgctcggcaacggcatctcgcagcccctcatgacggtcctcttcggcaacgtcatcaactccttcggcgcgaacaccagcggcagcgtcctccgcagcgtgaccaaggtgagtgcccgcgggcgcttagtgatacgcgatggagacacaccggccggtagccaaattaactttggatcttctttctcctccaggttgtcctcaacttcatatatctgggaattggaacttcagtagcttcctttcttcgtaagtaaaagtcctttctctgattggaacacctctttagtgaagtagagagaagctcctgcccttttcgctgaaaaaaacaaagaaaaaaaaagaattagtggaacctgtagcttcaaattatggatgtgaaacatataaatagtattcagcaagggaatttgtagtaaacagtattagaaattctttcaatatctaatttgttcctattattcaatgagtctccgggtatccataagtcaataagaaatttcatttaaagggtctcagagtatccatcagattccaaagcaaaattaacactttttattcaaagggtctcagtatccataagtcagtaagaaattttgtaggatagtgtgaaattaggctttgtttggtaaatgggattgagaaataatatcccaccctccaaaaggtaatattgcatcctagctatccattcttcacacctcatttaatcctagccatttattctttacacctcatttaatcctagtcattcatccatttccatttcccaatcccacctgccatatcccatttgccaaacacacccttaggataagtaattaatttgctcttgcatggatgcgcaatcaccaatacataatattcattattaacatcatggttgtcagttgttactacatgttagaattcggttattctcaactgtgatacactaacacagtataaacatcatcatgcacttatccggtgagaagtaccaaatgcgttccctaaccatataatcctcagcatcttcgatctaatctgttcggttaaatatatcacatgctaatggtacaactgccagtaaaaaactcaccttaatttgtcccagaggtatcatgctggactatggcaggagaaaggcagtctgcccgcatccgttctttatacctgaaagccgttctgaggcaggatattacattcttcgacacagagatgacaactggtgaagcagtttctagaatgtctagtgataccctcctaattcaaggtgctcttggtgagaaggtactaaatacctagtagctccgttgtaaggaacatactattttttattaaattgctactgaaaaaaaaacatatattttcatcacagtgcaaacaaaagtgtggatagacacaagttgatggcaggcataattatttgcatatttaggaagatatatcaaacggatatagttatcatatttactaactgtattatttcatatattcaggcagtaagttacaccttgtgctactgttgctgatgtgttcttggatttttaatcttaacctttacagggagggaagcttgtagaactgttatcaagcttcatcggtggctttatcatagcattcactagaggatggcttctcactcttgtcatgctaacatcgctaccgttaattgctattgccagtgcagtttctgcacaggccctaactagagtttctagcaagagacaaacatcatatagtgatgctggggacacagttgaacagaccattggatctataagaacagtgagtttcacatatttatatgaattgtttaatgctataacacacttctttttttggagtagcagacagtaagtttgataaatatcctgtgttaacaggttgtgtccttcaatggtgagaagaaagcgatagcaatgtaccgtaattttataaagaagtcatacaaggctactattgaggaaggcattatcactggttttggcatgggctctgtcatgtgcgtcgtatttggcagctatggattagccttctggtatggtggaaagctaatcattgagaaaggttacacaggaggaaaaatcatgactatcttgtttgccgtgttgaccggtgcatcgtaagtttcagcaaatcctccactgttgatatcaaaatacatgctgtttagtgcactacaataatgaacccccaatctattcatgtattatttggattgatggaaatataacaagaaatttatatatattacctcaaaatcaagaaggctggttagcatgcaattttagaagtgcaaatggcagttttgttcatttctcaggtgttttttagaaaacttctcaggatttcaagatgattttcagaattaccttaaattattttcaatattttcttgattactatttacaaaaagacaatgctaattgccaatgcatgaaagtaacttgtttcttgtaaacagaatggaatgaacttaaagtttgatggtcaagtcaattgcttgactatacataatccctaggccctattaccattttaggcagacataccaattgctaaggagtagttattaattccagttagtaaaaggggatcatgaactgagatatagacataagtacctaatagctaaatcaaggtatccttagcaattgcaagagcaggtttaatcaatatgttctgcgctaacaggagaagtagacaaacgctaggcttttggaatcgtcacgaagagaatattctcctgagaagtacattacatgttatatgcaaacgattgcattgggtttcactgctttacctacattacttgctatttctcctaaaatcacattaaagttgaaagatttacaacaaaatagccattaaaattttatcatttgatatggtatataatgttctgaacatggcactttccaattgtttgtgacagctcattaggcaatgcaacacctgcagttgctgcagttgtggaaggtcaatctgcagcatacaatttgttcaaaacaattgagaggaaaccagagatagattccgatgataacaatggcatggttttagaagatatgaatggcgatattgagctaaaggatgtgtactttcgttaccctgcaagaccagagcagttgatattggatggattgtcgttacaagtagcgagtggaacaacaatggctatagtcggagagagtggaagcggaaagtcaactgttatcagcctagtcgaaagattctacgatccacagtctggcgaagttttaatagatggaattagcatcaagaaactgagacttgattggataagagggaagatcggtcttgttagccaagagcctctgctttttatggcctccattaaagataacataatatatggtaaaaaagatgcaacgcttgaagagatcaagagagcagcggagcttgcaaatgcagctaacttcattgacaagttaccaaatgtaagaaaggaaaaactgaatgctccaagttctcaaatttaattgtatattaatgaaataatcagctaacaatgttttcatgtcataccagggttatgatactttagttggccagcgcggtactcagctctctggaggacaaaaacagagaattgcaattgcaagagccatcctcaaagatccaaaaatccttttgctcgatgaagcaacaagtgcacttgatgtggagtctgagaggatagttcaggaggcactaaatagaatgatggtagaaagaaccacactcgttgtcgctcatcgtttgagcactgtgaggaatgttgattgcatcacagtcgtccgcaaaggaaaaatagttgaacaaggttgaattaacttgaaatgcactgtttttctattatagaaaatttctgcggtcaaccttaaatgattcattataccaaaacatgtcctgcgtacacaggtcctcatgatgcactggtgaaggatcccgatggagcttactcccagctaattaggctacaagagactcatcgtgatgaaaggcataaactaccagattccagatcaaaaagtactagtttgtcattcagacgatcaagaactaaagattttctcagcaagagcaacaggtattccttcaagagccccttaggattgcctgttgatatacatgaggatggaatgacaagcgaacaacaaaaggttgaccactctgacagtaaggccattaaaaaaacaccatttggacggctttttaatcttaataagccagaagtgccagttcttttgttaggttctatagcagcatcagtgcatggagtcattttgccactatacggtataataatgccaggtgttctaaaatcattctatgaaccgccagatcagctgcgaaaagattctagattttgggcattgatgtctgttgttctgggggttgcttgtttgatttcaatcccagcagaatattttttgtttggaattgctgggggaaagcttatacagcgtgtccgtacactgtcatttcaaagaattatgcaccaagaggttgcttggtttgataagccctccaattccaggtgcgctactctaatgtacttttgctattttatcttttataaaaaaatatttacatttaaaccaatgctaagaggccatcttatttcttacagtggggcacttggtacaaggctctcagtcgatgcgttgaatgtccgccgtttagtaggagataacctggcccttatagtccaggctgtagctacactaatcactggctttgccatagcttttgcggcagattggaggcttgcactgatcatcacttgtgtaattcctttagtgggtgcacagggctatgctcaagttaagttcttgaaggggttcagtgaagaatctaaggtgacacattacagcttacaactgtaaaaattgcttgctgttttattgagaatgatctagacaagtgatctagaattaaattgattgccattataatgggatctcattatacaggagatgtatgaggatgcaaaccaagttgcggctgacgctgtaggcagcatcagaactgtagcatctttctgttcagagaaaagagtggtggcaatatacaacaagaaatgtgaagctttaagaaaacagggaattcgaagcggaatcgttggagggattggcttaagtttctcaaacttgatgttatatctgacttacggtctttgcttctatgttggtgcaaagttcgtaagtcagggaaaaactactttttcagatgttttcaaagtaagaaatcctaaagtatttcaagtaacaattgcctatatgaatattaattctagtatcattcacaaatgggctggatgcttttcaggttttctttgctttagttttggcagccgttggtgtttcgcagtcaagtgcattgtctactaatgcaacaaaggcaagggattctgccatttccatttttagtattatcgatcggaagtctaggattgattcaagtagcgacgagggagcgataatggaaaacgtcactggcagcattgatttcaataatgtcagtttcaagtacccatcacgccctgatgttcaaatattcagtgactttaccttgcacattccttcccaaaaggtatacttccacattcacctatttgtcttcctttttcctatttcttgaaactagtgcatgcccaaaatttccatcagaaaattaacttgattattgaactatttacataatacaactagtaacatacttcaaaatagatgcgagtgtgacccatccacttccgtgacatcatatgtgttgatacacaactctgatgaatcccctaatgattttggtaaaaatcattaagttaaggtggatacacatcttgtcatatgatcaaatggtttcgcgaaaaatcaataatcagacaacaagatgtgcgaactcgatattttacacgactctctttaccaattctgccccgaattacacttaaaacgactcaacagcttaacgttggcttgccacgcattacttgactgtaaaactctcactcttaccgaacttggccgtaacctgccaaccaaagcgagaacaaaacataacatcaaacgaatcgaccgattgttaggtaatcgtcacctccacaaagagcgactcgctgtataccgttggcatgctagctttatctgttcgggcaatacgatgcccattgtacttgttgactggtctgatattcgtgagcaaaaacgacttatggtattgcgagcttcagtcgcactacacggtcgttctgttactctttatgagaaagcgttcccgctttcagagcaatgttcaaagaaagctcatgaccaatttctagccgaccttgcgagcattctaccgagtaacaccacaccgctcattgtcagtgatgctggctttaaagtgccatggtataaatccgttgagaagctgggttggtactggttaagtcgagtaagaggaaaagtacaatatgcagacctaggagcggaaaactggaaacctatcagcaacttacatgatatgtcatctagtcactcaaagactttaggctataagaggctgactaaaagcaatccaatctcatgccaaattctattgtataaatctcgctctaaaggccgaaaaaatcagcgctcgacacggactcattgtcaccacccgtcacctaaaatctactcagcgtcggcaaaggagccatgggttctagcaactaacttacctgttgaaattcgaacacccaaacaacttgttaatatctattcgaagcgaatgcagattgaagaaaccttccgagacttgaaaagtcctgcctacggactaggcctacgccatagccgaacgagcagctcagagcgttttgatatcatgctgctaatcgccctgatgcttcaactaacatgttggcttgcgggcgttcatgctcagaaacaaggttgggacaagcacttccaggctaacacagtcagaaatcgaaacgtactctcaacagttcgcttaggcatggaagttttgcggcattctggctacacaataacaagggaagacttactcgtggctgcaaccctactagctcaaaatttattcacacatggttacgctttggggaaattatgaggggatctctcagtacacaactttacattttattttttgcatctcagcatttccatgcactgaaatagttatgactaaaccttttccttccttttctacagaccatagcacttgttggagaaagcggtagtgggaagtccacgataattgctttattagagcgtttctatgatcctgattctggtaatatctcactagatggagttgaaattagaagcttaaaagtcagctggttgagggatcagatggggcttgtaggccaggagccagtgcttttcaacgacacaatccgtgccaacataacatacgggaaacacagtgaggtaacagaggaagagatcactgctgtggccaaggcagcaaacgcccatgagttcgtatcaagcctgccacaaggatacgacacagtggtaggtgagaaaggggtgcaactatctggtgggcaaaaacagagggtagcaattgcaagggccatcctaaaggaccctaagatactgctacttgatgaggcaaccagtgctctagatgcagaatcagaacgtgttgttcaagatgcattggatcgagtcatggtcaacaggactaccattgtagtggcacaccgcctctccacaatcaaaggggctgatatgattgcagtcctcaaggaaggaaaaattgcagaaaaaggaaagcatgaagcactattgcggatcaaggatggtgcatatgcttcacttgtacaactccgctctaattccgagtaaaatgatgtatattttgatggtgtataacttatttagccataaattctagctacttgtgatttgagaagttgatgctaaactagagggtgttctttggtagtttgttactttgttgcatgaaagacctatggttctgaacgtatgatcttggtagccacagacagtaaattcaactgtgtctgtgtgtacgcactaactatgatggaataagccttgtggtctttggtctttgtggtccttctcttgcttttaggttgtttttccccttttaggacagcatcctttcagttttgcttttagcatctttcggttttgcttttagcatccctaggacagcatctagcatctcctttatgctttattcagtttggatgctctctaggacagcattgcgttcaaattttagactagtgtgggcagcaattagctagcagccatccagccagctatggctatatatatatgtatccaacctccctcgggaaggtatggcttttgtgtttagtgaatgaagaaaaccagaaaattgccccatctcgagtgccatcctcttctcaatgagagtaaccattgaaattctaacatctggtatcagagccacactttcctgtaggctaaacatctcttgttccaccccttcccaagctcggttgagctctcagccagcagcagcagcagcaccggttgctcctccttcccctttcccttccccctctccacgcagcagccccccggaggtgcgccatgtccgacgctcagtctcggcgttcggtcgcctcgagcactcggcgtcagcaggacgccgagctcgccgcagcagaagagcgcaggcgagcaacggctcagaccgctgcagcagcagcgagggcggccagactggcggcagcggagttggcagcagccagggcggaggcggaggcggaggcggcggaagatgcggcacgtgcggcggaggtagaggttgagaccttgcgcagcagcatcaacggctccatcgccggcgacatcaccgccgacagggagcttgaggagctggcaagaggaagggcacgggagcgagcagagcggtgggcagcagcccacctccacggcggcggcggcggcccaagggaccgcgcgcccgccgacgggaacccagacgggcgcaggcgtgccggcggcagcccggagctcgcacgcggccctcgcaggcagcacggctctctctcccctgaccggcgccatggtcaccacggtgtccagacggtggtcagggactttggtcccggcggtgggtggcctaccctcaccaaaaccaactacatcgagtgggccgcggtgatgagggtgaggctccaggtgcggcacatgtgggaggcagtccggtacggtgacgtcaactacgacgaggatcggcgggcactggatgccctcatcgctgcagtcccgcccgagatgcagttctcgctttcccagaagcggactgccaaggaggcctgggacgccatcgctgcggcacgcatcggcagcgaccgcgcccgcaagtccacactgcaggcactccgcaaggagtgggagaacctggccttcaagccaggtgaggatgttgatgactttgctctccgtctcaacactctcttgcagaaaatggtgcagtacggcgacgacacctacgacgaggagagagctgtcgagaagctcttccgctgcgtccctgagaagtacagacagatcgctcgctcgatcgaatctctgctggacctctccacgatgttgatcgaggaggcgttaggtcgcctcaaggtcgtcgatggtgatgagccacagcctttctcggggcccatcaccatcggcgggaagctccatctcactagggagcagtgggaggcctctcagggtgacgggaggaagggggagtcatcttccccgacaggcggccgtaagccgcgcaaggcgcggggaggtgtccagctacggtgggcgcgaagacgtgccgagggtggcgcccgcagaggcgcccagggcgttgccaccggcaaccacaagccggcacgagacgacgcctgccgcaactgtggcaagcttggccattgggccaaagactgtcgacagccacgacgcggccaggcccacgtcgcacgggtggaggaggaagagccggctctgctcctggctcacgcaagcatcgagctacctccagcggcaccggccgcagcggctttcctccaccttgatgagccgaaggtactcgtctccctctgcaacggctccagcaacgacaaggctgatgggtggtacctcgacaccggcgccacccatcacatgaccggccgacgggagttcttcaccgagttcgactccagcgtccgaggctccgtcaagttcggggacgcctccggcgtggagatcaagggtgttggctccgtcaccttcaccgccaagtccggtgagcacaggctgctcaccggagtctactacatccccgcgttgaggaattctatcatcagcgtgggacagctggatgagaacggctcacgcgtgttggtcgaggacggactcatgaggatttgggatcgccgtcgtcgccttcttgccaaggtaaccagaggcactaatcgactctacatcctcagcgcgcaggtcgcacaaccagtttgcctcgccgctcgtcgggacgacgaggcgtggcagtggcacgagcgcttcgggcacctccacttcgaggccctgaagcagctcagtgccaaggagatggtgcgaggcatgccgtgccttgaccacgtggagcagctctgcgacgtctgcgtggtgacgaagcagcggcggctcccctttccccagcagatgagcttccgagccaaggagcggctcgagctcgtgcacggggacttgtgtggcccagtgacaccggccacaccaggaggacgacgttacttcctgctgctcgtcgacgacctctcccgctacatgtgggtgacggtcctcggcagcaagggagaggctgcggacgccatcaggcatgcacaggctgctgcagaggcggagtgcggccgcaagctgcgcgtgctgcgcaccgacaacggcggcgaattcacagcggctgaattcgcgtcgtactgcgctgatgagggcattcagcgccactacaccacgccgtacagcccgcagcagaacggcgtcgtcgagcggcgcaaccagacggttgtggggatggctcgggccctcctcaagcagagggggatgccggccatcttctggggggaggcggtggtgacggcaacggcaacctcaacaatggcgtcggatggtcagggacaggggcggatgtggctaggggcagatgcggcggcgtgggaaggcagagaggagtgcaagcggcggcgccggatgcagccgggggtggaggtgatggtgtcggatgtggcggctcaaccgggggagccggatgaggcgggaaggagcgacgctggaatactcgccatgggtgctcccttgaggaaggagagagaaggaagaggagaggttgcgggaagggggagagggcatggggcacaccattggccaactgttgtggctggctagatttggccagttgctagcagggtttggccagcgggatagcttggtcagcccgttagagaggctgttggaggacattttttttcatgtggttgctataatttggtttggagatgctctaacaattgtgggtggggcggagccaaaagaaaccatcttcatgcatagtttttttttatagataatgcggtgtctcttagattaattaagatcagacagcagtacttcctggattggctcagggattatatcacggtagatattacaagtttttagctctgaacattgagctaaaaggtgagccgcggcattagttacacgacatgcatagttaaacgtgtgattatgacacactccgttgtttccaacatgaattttcaacttctgactaatatcggtagattccattccgatggccccttttccgacataatactgatattatcaatatcactacttttttcagatctaccaatctgagtccattttcgattaaaaaatggaaatgaaaatggtaaaaggtttttccgaccgttttcatccctagctaagttgatttgttcttggtaagtctctttatatcttcatttttttcacaatattttgtataagattttaatgggaatttggttttaagtctagcactcattgatttcgtcatgtctattcctctggggctagggccagtgaacccgcggaggaggggggcggggatgttcctatccaacccaccctcgccctgccccattgccacctctagcgttcaagcctaattgtctcacccttgtccctacccttgatgggcaccatagtgtccgttagacttttgatgtacgaaaggtaatcctgctaaattttctctccaaaaaccaaatctaaatagtaagtttatgagacttgcattttatgaaatatttatcatttctcacaaatctatttgcaaaaattatgtgaagttttcattcttgaagcttaaatttagggcatattgtgcgattatttttctgctagtggaaaattgtagaaatacccgttattcatagattatgaggtaattttcactttagataaatgttgaaggactagagggaatgagtgatatgttttttgtttactatatgcattggttcatcgtagatgagtgcgcgtgagaagccagtgaagaactgaaggaagtagtgatagattgttagcctggtagttgtgcttgagatgcattctcgcagtcaagtaataaccaatttttgagcttctgccaaagtaccgtagtttggcgcaggcctaagcagagcattgtagagacgtgagatgttatcttgctattccaacagactctccacattccactctctattaaccaatggaccccacctgtcattctcctctttcttcttcctccccttttctcccatcctctgctcgttcttctgcagagctcgtgctagcggcggcggtcgtggcgggcgacgacgcggactgcagcggcggtcgcggcgggcgacggtgtggccgcggacggcggcggggctcgcggacgacggcggaggtcgcggtcagcgacgacacggatggcagcgacggtcgtggcgggtgacggcgcagactgcggtagcttaggccgcggccggcgatggcgcggacggcggcagtggccgcggcgggcgacaacgcggatggcggcggcgggcgtggcggacgacggcgtggacggcgggcaacggcgtggccgtggccggtgacggagcagacggcggcggggctcgcggacgacggcggaggtcgcggtcggcaacgacgcgaatggcgacgacggtcgtggcgggcgatggcgcggactgcggcggcggaggccgcggccggcgacaacgcggacggcggcggcggtcgcggcgggcgacggaggccgcggacggccgtgcggtcgcgtgcaacaacgagagagaatagccggatgttaatgtgcgtagggcccatagttggctagtcattttggctggccaaatttggctagtggagggagggttttggccagccagatggcttagccatccggttggagaggctgttggagggtgtttttttcactggaatggctaaaatttggcttggagagtcatttggagaggctgttggagattctcttacacctaacaaaatctgaagtataggtgataagtggttttccatacaatcttgagaaaattccctctatgcccctaaaactttagtcgatcccttctatgtcgctaaattttcttcgcttccttgtataccccctaactttagattttgatcgcttccatacccttgccatcaattgaccactagttgaccgttaaataggtgtaaaaaagttagttttacacatggatgtgtaaggaatatgtagtgatttgtgaaatctattgttgaaaatataacaatttattgcgtgactattatattcataagtttatttcatgaggaattattatacgtaga

SEQ ID NO: 7144 - DNA, 22595 bp, Oryza sativa
aaacatgaaacagcttctccatgagcttagctctacttctgcctcttgtagatcttgtgcaggaaggatttcaatacattctgaactgctttgttcggatgtgcttcgatgtcggcaatcagcttattgtaactctccctctcgtattcatgaaatacggcctgcagtataacagataaaagcagtgcctcaggtcttgcaatggataaatgagaaattctgaattattgtttcaagcatcttcaacaaatgagttccttcttattcttaaaaaaacaactgagttctaagttttgttcctcatcgagttgggatggtaattattctttttcacacctgcgtatgatgtctgcatatgtttactcaggtgatgatgatacacataacataaatacagagaacggttaagacaaacctccagattaagttctttatacagatccttcacttttgcaacacattcaggatctggcttcccataattttcctgtcaattagacataaaggattcagatggtgcccatgggttgataaaaactacaaagttaataatacttacaaatagaatgtgcttttggttctcgtcagcacgctcgagagcttgcacaactaaccatgagcacttgtagtcttcaatgtccgttccaatctgcattaagatttctactgatcagatcataagctacagataaaataagcctggacagcaatggaccgattggcagtagccatactcattgggattagtacaaccacaacgggcacactaaccttgccaataaactcaggatcaccataacaatctagataatcatcctgtgagaaaactcgtattagtgcggtagtccagtaatatataaattcacaaccaacaaggtgaaaaggtacctgaacttggaagtatgtccccatttccacaagaatgttcttaacatcaccgaagttatccaaattctcaccagatagcagcaaagcacatgcaaccttggataaagaaaaatattattgctagtgatgacaactattcgcagattaccgaagtgagagtttaaagatggaaaaaatccataggagaatggtaaatcctaccggaagatagaatgagtagtaagctgtcttgtactgaacaatgcggcggtgactgcacaatatgtcagttaaaagaacaccattaaatgaagatcataacccaattctgaactgctaaaataaaatatagtgcaaatacaactcattctagaaactacacatggaacacagaaaaggaactatctgttattttttccgttcctttgttttgtttgaaccttatttttagaaacaaatggacaggaaatcatgcaaagaaagaaagaaacaaacacgtaaatgcaaaatgaacttacactgtcaagttgtactttgtgagatccttttctccctcatgagtagtaataagatccaacaattgacctgaagcagtcttaaactcaacctaacaaaacaaaaacatacaactgggcatcagggagaagcgtacagtatttttttcccaacaatatgtgcatgtcagaagatacaacttacctcattgaacaaatcaatgagatcaacataatacagctttcctttaaaatggcgttgaagaattcgtgaaatatggttgcgaaggataataccatcatttacagcaatgagcccaacctattgcaaaacaatgaaatacacaaatttagttttataggtaacagatagcaattcaacattgtgctaatctgatcacactccttacaaggattgaaaaaagggaacatgaatcagttacttaatgcatgacctttttttttcaatgcctgtgcaattctggattataattcatacagttataaaaaaacaatatatataaaaaaattgatgcatacaaaggatgattgttctgctactgacctgaggcaccctaaaccagcaaggctggccacgtcgtgtttgagagttgtccataatatcatcaagcacaagaaaataagcttgaagctgcaaaattatgcagaaccatcagtggtgccacacttagcatataacttcacttggctaacaaacatcctacaagatagcatttggagaaaacattacccattcaatgcaccaaccaagggtgcaggcaagaaatgtctcctccttattcagaacatcagtgcccttcaacatcttgaaactatcaatgacagagatcccgcggttgcactttcctccgagcacattgtaatccagcatctgctccggataaaaaaaaaatgtcaactactttaacatactcaaatatactgtatgtccaatttctgtgggtatgattctgatatcaatacacaataaataacaatggtaaatggaaatggaaatggtaataggtagaggataaaaatcaaacaacagaaacaaaccatcagcaaccaatcatttacacttagctactactgttgtgtcattaacagtaaaaagtagtaaaacttttagaatacacctgaacaatgtattgtgctccccagcttttcacctatatatattttattaccggtgtttcgctttggacaactctttaaccaatgctttcactttggaccggataatttacctttgtggcactttgggccaccctcaactcctttatccatctgcattcatatgtcaaagaaatgatctacatatagccgagggagtttattgacgagtatgagccggcatactcgaggtcattcatatgcttgagaagagagttggggtgtcccaaagtgaaacaaaggcaagatttacctggtttaaagtgaaaacattggtcaaaggatcgtccaaagcgaaacatcagtaataaaaggtggcccaaagtgaaatttactctttatttttgaaggaacatctgtaatatttatactgtctaaccaacgggatctgaaatattaacatgcaaagtagtaaaaacaactagctctttttatctttccacggttaaggagatgcagcttggatctgaaatattgacatgcaaagtagtaaaaacaactagctctttttaactttccacggttaaggagatgcagctttgatagatcgtttttgctgcaatatagaacaactcaacatacggtgagttcatcttttatgtcaaggaaacccacagcattttcaccttatcgatctaaatattccaaaagatgtacttaggcaaagatcaaaatactcaacaagaattttgtgccccccttcctccaacacacacacaaataaaagagaacatggtgtccaaaaggctagctttactaattttttaaaggatctgttgtacaacagaaatgaaatccgtatgcttaaagttcataaggtgactttatatgatctacttcaccagcgactgtaggtaaaaaaagacactcctgtccggcttttcctaacaagttgatcgatcaatcactgtagcctagaaaagccctgccttccttgttcacctactcttgttaacagataagagagagagattactcgctctgttgctcagagttcagacccactatgcaattcaacacaccatatcgatctgtatgtgagacgtaaacttacttcgttaccccctagtcattgctcgcatactccatactcctaacattctaccatcaggaaacacatataccaataacagagcgaatccaccagccaagcgccactcgtaagcccagaaaacccggcgaaattccaaaagcctttgacgcgtcacgcgagcacgtaggcatcaacgccaccccctccctcccctctcgctaaaccagatcaaaaaccaacatccgtatccctcccagcataaaggatcgagacggggaagagagcattacgcggtcgatccactggagcgactcgtcggtgaactcgaaggccgggtcctcgagcatctcctccttgagcctgctgtatatctccgcgaacgcggccttggaggagtcgccgctcgcgccgttcgccaccaccgccgccgccattgcgccgctatccctcgactgcctcacgtgcgatgcgagggcgcggagagagagagaaagagagaagaaattagtggcgagtattggagaggagatgggggatgaggacacacaaaattttgtggggagaagcagcttcggcgcacgcgtttatttaaggacgggagatgggcgccgtgagaggcacacgtttgcttgcttggctggtttgcggaactagcgttccaccctttccagaaaacaccgtgaatttgacagagtttagggagattttaatttgaaagaaacgtgtagaataattgggaggagatacgaataaacgagtaacggattggagggcgacagactgacagtgcggtcttggctactgatttgggtagtactccgcaaaatcatactattttgtttaatttgcaatttggttgtttagatacaaacatttattgttattgttttagctgcaaatgcatggtaactcaatagaatttccactacaattaaagtattcattagtaaaatctaccgatgcatgttcatgtcatgtaataatccagaaaacaaaatatatttgggttgatcggattcatggtatacaaatttaccgtaatgaaaaaaaaacattattatttattgtaccggctccgtgtcaatggtatttttaaaaatttgaattatgccattatatgtgtttgaggtgttgttaaaccagtttttttcataccgtatttctatatggaccaaaaatgctcatactagttattacttcatttgtcccaaaatataataatttttagctcttaggatttgtcccaaaatataacaacttctctaccaacattctcctcccaaccaatcacaaacctccaacattcacttttcccacctacctccactattcatccaatcacaatgcttcatcattcacttctacctacatttcttaataaccgtgtccaactctaaaacttcttatactatgagacggagggagtatcttcttatttcctatccctcgtcaacttcctctagctctatgagaccggtgatggctttgggtggcaggttaggagctttgatgtgatcggggtgtagcgagggagctctacgaggccggtggtactctcgaagtggcaggtcgaagctcgacgaggccgagttgcaactcgcaagcttaacgaggtcggtggcagctcaggagccggtataagcgcattttacaactaatatatactactacgtaaaaaaaaagaatttctagctacgagcctggaaggattggtttttttattgggacagagagggtacataatagatgagctacaatggtgtatctcttttttctcatctcgcttcctctcctctattatatttggtgcatctacatttaagtatgtgaagaactaagtcataggacctgatttttttctctctctcctttatatacgcttatagaataccattattacttagctccccatgccaacgtcagcactccacactccactggcacgatgggtcgatggtagcgatggagaatctcgcatatcagttagcggagtagttggcaggtaagaacgacaaagtaacattgattgattcgcgatatgcacgaggtaaggatttttttgttgtcgtgggcaaccgaaaaaaaagctcctggtacaactcccttggaagatagtaataggccgagcaagcgaagaacatgaatataatcaactgcaatgagaggattattggaggccatgagtacttttaggctgtattttggataactgaaattgataatgtataatctgatttttttatagctattagaaagtacatacggataaatgaaccattacagagttgaaaatttgctttcgaaaaatattacaacaaaaataaatttacaaaaacaacgtttataagtttggaaaacaggcaaataaaaatccaaaatcacgaaataagtgtagctcaattagttagattccatatgatggaaccggcccacttgattcaagtcttagatttgacacaggtactcgcaattatagctaattattattttaatgacaggcaacgtacctgtcaataacaatacatgatgttccagtcttctgaatgtgctcagagataggatgtgtgtgtacacgttcatgggaaatatttcggatgtccttatagaaataggatgtgtgtcttcgtgtttatagggatgagtgtgcatatactcgtctaatttttttagaggtgctcatagcgatagaatatgtgtgtacgtatgttacgagggtttgcatttgtactattttttcaaagaaaatcaaaagataaaaacagaaaagaataaagtcgaacgagaccacacgaattgctccatagggtaagaaaccagtagtcaaagaaataatagtcgacgatcggttatactctttcgtatagaaccatttagtggttttaaaaacatgctaagtcaaaagagagagagagagatattagtttggaaaataggggaaggaactcagcctatatgtcattcttaatggattatcctgtcagcatttgcattagttttctgtaagatcaatccactttgttaagattatatgggactaatcaagatgatgatgctacacgtatgcattatatattttctgattcggccgtccgaacacgttgagtgcgactgtgcaaacacgtgagcagtgagctaggagtacgcgagtcatgtgacgaaagaaaggaagcaccgggctatgccaaaagaaagccctcagggagtttaggagtagagtagttggacagtgtgtagtgcactagtgccagtgaactgctcgctaattccaatgggcttatgggcttactactggattgtcacctgtcaacgaggagcaagcaccggcgccgtaacctccggccacgtgtgtatcctcccaatcatgccagcacagtagatccacacgtggccgcggcccacaccgtgacaccgataggcgataggatcgagttgcacggctgcggctctacttggtctcgaggcacggtgccatctccgcgcggtgcgtctccgtcgctctccggggtccggggctccgggccggagaactcttccaccgattttcccccaatccccccaccaccgtatgccgtcaccagtgaccaaagtggctgcccgtacgcaggtaggcaccgatcgtcgtccgcgaaggccggcggcttgtgcccaggtgctcaactatcacgtggctaggtggcttgaccagaccagggacgtacttgaccaacggatcgagtggcgcacggcgcaggccctacgctagcacgtagtacgcccgttaatttcacgagcgagtcgcacgagacgcatgtgtgtgttttggttgtatatagagttgtgtcacttgtgtgttttgtcttggggcttctccctctcgtgatcgcgtctgtggaagaaacggcacgacggtctcgctttcaccggccggtcgtacaacggtctctaggctcgtagccgccgtctcccgcagggcgcagcgacgaggtgggctgattgataattataggctgggcagtaggtcaataaactgggccgaaaatgttggcccactctgagccaggcctagaatacagtactgtagtagtttcgaccgggccgaatacctttgggttggcattcgctggagcacgagcgcaaaccctggtatatgttctcgtttggtttctgctgaaaaaaactacgtacacgcgcatctcgatcgaccacattcgagagatgcaacaacaccgcaaacaacacacacacacacacacacacaaaaaaactcttttacacatttcccgcttgtctacctagcctaattaatccaagcatatctttttcacatgcaagtgtatgcataaatattcatcgtgccgtcatcagcaatatcgaactaggtcagtgcacgcatggttggcgtgccagggtttttttttcttttctttttcttcttccgtgaggtgcgacgcatgcgtcggaaggcgcggtatcagtagctccgtattcatgtcagcttgtttttctagctgagctcttgcttgcagagagggcaagaggagatgatcctgagccacctgtccacgcatttcaggtggaacatgtgcgtgcacggcagctgcctcacctcctccttctccttgtactgagccaggcatatgcagcactcctgccatttaattccagtaagtatgtaaaagcaaggacaattcctagtttcctataagttgtgagctctaaacaataataagctagctagagagcaaactaattggcttagatgtataaaactggacaacatcaacacatcatagctagttagcactagtttatgttggctaagtgcctaagttgttcctaagcaagcaccgaaccaatgggaaaggtaaaggttttagcagttcttatgttagctagttagcactagctcatgttggctgagttgttcctaagcaccgaaccatggggaaaagtaaggttttagcagttcttatcttagtatatccgcccaaaaaggaagattgttctagtttggtgcgcacgtttcatcactttttggatatcctattctggccaatagccgagttcaccaatcatttgtttggcgagtttctccttaattcccctctctgcatcgctaaactttcctacctccccgcagagacatgcacgctgctttgctactgcctaatcatctctgtgcatgcaaaactaacatatcccacgatattaacgtacgcggcaacggaacgtgcgctcacctgatcgtcgtggtcgcggtctctcggcgcgtcggccggctccttgaaccgccactgcggcagcgcggcgagctgctcgtcggaggcgccccggccgacggacgcggagttcatgttgtacccgagcgcgtagccgacggccgggacgaagcagcagagcaggaggaagaggaggaatgggagcgagtagacgacggcgttccatgcgaggaggccgatgcagagcgcgtacagcctcggcgcgcggtggaacgacccgagccgcgcgtcgaacacccacacgttgcccatcacgaaccacatcgcgaagaacagctccaggaacgcccgtgccttgttcatcagatacgacctgttcctgcatcccacacacacaatttcaatttccatcaagaaattaagaaagctaatcagctaatgccgttttatgaaccttagagggtcgttggcgccgtgcatctcgggatcgtcggagagcgtgccgccgcgggcgccggaggaggaatgccggtggcgccagtagaggagggggaggctgagcacgttgcccacgttgtaggcggcgacccaaacccggagcggccacgcggggcgctccttgggggaggtggcgacgacggcggtggtgacgaccatctgcgccatgatcacgccgagctcgagggcgagccagccgggcgagttgaaggggttggagcccaggtcggacctcgggccgttctggtactggtacacccgcctcaggaagatgaaccaccgcgccctcgacatgcgcgccaccgcgcgcatcgtgaacgccgacacccggcccgtcccgggcgtcgccgacgacgagggcggccgcattgtggtggccggtcaagggggaggggcattgggggcgcggctgatttgagcgtcaagggataaaatgggtgggaggggaggaggcgatcgagttgggtttgagatggtgaccaacaatctaacggctttgctttggcgccaagagtggaggtcgtggtgtggtgaagataaaaacggttggcctaaccgtccccttcccgccaatgcttctcatggctcttaggctctagcttgtgtttggttttgtttaggtgggacgcaaggagagagagccacagaggttcggtttatggtgggcagacggcatgactcaacaaagatcccttgttgatttcatcctgtagtactaatacattgacacattgtttccttaaacattgcatttaggtcacgattttatatatttgaatgtcgagtttgatttggtttcggtaaaaaaaaaaggtactagcttgtgtgtatctctattgtaatggtaggtgaagtgcaacagtttaaaacagcattacttgtctgaaactatatatcttgaatcatacagtgcctttcagtcaaggacgacgagagggatcatcactcatcagatgtcgctgcctcatccattgtgttgaatcgaagctactgacaatgaagcttatatagcaaacatcacaggaaattgattgttttctctttttttttggggggaggaaattgattcatgaagctgccgcagaggacccggagctcctctgtataggttgaacgtctctgtagatgtggtaggcaactaccagcagtccgcttcctcattttggttgagaaatcccgtttctgacacggtacttcaaacctttctggtcacttcccgatcgcagatccaccatcggtgaattaccgagacgctcaatttggtatcaatattgtcgtgtgcactagcaggtaaacaggcggggtccggggatccattgagcctgaggttatcgctctcgttgcatacgtgcgtttacgctctttaccttgtgcagaacgggtgaatgggtgatctgcaagttaaatctgaagtcttcgtgggaaggtgacatatgcctctctctctcttgtctagttgtctcttctctctttacgcgaaggcaaagaccgttcctgctacacttccctcgttaaaaaagaggccgtgcctgccagtttggtaacacccgcaaagggtgagataaaaccggatcaagttcactttatgtccctcatgttgatattaagtttgaattatattcttaaaccagaatatcataaatatcgaacccccaaattttaaagccaaattaaataagatcctaaagcaataaagatgattattttggttgacgtgaaatcctagtcaaaaaaaaaatgtggggctacatgtaagtgggcttctagaggctctcttctttcttccccatctccacctctccggctctccccactcctccataggagcttgctggggggagacggtcagctactagtgagaacggagcaaggcggcagcggcaacggagtcatagagctcaagcagtcgcctactcgcctcactcctctcacctcacgaccggagtgcagcatcgagggcggtgcttgggcaaaacacgatgcgacggctcctgtctcccaagcacaacattggctgcgtgtaggacagaaacggatggctcgggccttggtgacattgtcggcctcgacgcctcggcagtcacaacaacgacgaccatatcctcctcctcccttgcccttccctctcccctaccagcggcaatagctgcacaagcacgagccatacaccccccgccccccgcccccgggtgtccagcgttggagatcaggcgaaggtagaggccaaacacgtgtggtgcagggcgcaatgggagtcatcgtggccacaccacatgatgcgacggctccggtggaggacgagcgtcacctccaagtctttcggcgttgtggcctccacaacaccctgtggagggctccaggcaccatggagacgctcgtttgcatctgttgtggctgtcgaggcaggctagcatgggatgcgcatggagcttgatgatggtggcgttggcttcctcgcctgcaggcgcggtgaggtgctctccacgcaggagctggcctcgtgctagcgatggccaaccggtgggaggcggtcgtggtggtggaagtcgcctcacacagccacaaacgcatcctctctagttgctcaccgctaccgtcgctttcaaggaaacggctgccaagctcgagctcatcagctccttttcctcctccgctgtggaccaccgacaccccttcgccgttgacctccaactaccgcttccgtctcccatgacagactcatcggtcgttgtccctctcctcatcggcgagctcctagagaagagacgggagagttgaaaataggaaagagtcgataggtagaagtccacttacattttttttggaacgactcacacgagacggtgcgaggttctattgatagagtagtaaaaaattacaagattataaccctagagagtcataactaggaaaaggaaaaaaataccaccacccacacgccgacatcgccaacacacacgcccaggagaaggctaccaccggatcggccgccgctaagcgtgaccgactgccactagaccaacaaagggcacagacgagatcgcccctgcgaaaccacggctgacgcaccgatgctccaccaccacacaagctttgccgacatgtgggaccccctcaccggcatcccccgccagctagccttcgtgcgccgaagaccgcgccacacccaccggcagctcctcctcacacctaggtcgcctcctccaccgccggcagtgcctcactacgccaaaccggcctcctctaccggacgcgcctctcgcgccaatctggcctccctctaaccgtcgcacctctcgcgccaagccggcctccatctccgccgcccacgcctctcgcgccgagccgacctccgctgccatcggttgcgtttctctgcaccaagccggtctccgacccctccatcgaacggtgccacgccggccagatgcggacgtctcccacgccttcggctagtcaaccgaggctgccatgcctccggtgaccgtgaacacggtcaccaccaccacagccgctactgccgaacacctaaccacctcgccgtcatcatccccacctcgcacccgactccttccccgccaccaacgtcatcaccgcctctagagtcacagccaccgtcgccgctgccaccgacaccaaccaccgcctccgcaaaaccgccgttgcgccatcgccctccaccaccgagtaggtagcagcccgacgccattgcttccaccgccgtcgccagatgacacggcagccaccacgttgccgccggcccacggccgccgccgctgccgtcaccacactgccgccgtcgtcgcccactgccgccggcatccagatccggccgagaccatcgcctactgccgccggccgtcgtcgtcgtcgtcgccaactgccgtcggccaactgcctccaccctccagatccggccgagaggcgcggatctgggaggcaccgccgccgcctccgcgccctcggccaactccatccccgccgtcgttgccgccaccctcgccgccgccagttgccgccccgccaaatccggccggagcgggccggatctggcggtcaccgctgcttcgcctaggacagccccctgcccgcccgaaagagaggacgtgagaggccccgccgccgcccttgcggccggccggctttgccggcggccgctcgggcggtggcgaggcggagggggaagaggggagggtgaggggcggccgggttgccgcctcccgtgccgcccccaggggaagacgacgcgagagcttgtttctttagtccacttacatgtgagccacacatggtttttctttctgattaggatgccacgccaatcaaaacagccattcatactgtcttatgattttatttaacctggttttgaaagacaggggttcaacattctgacattacagttcggtgatgtaattcaaactcaaactcaacgtcaagatgagggagcaagagtgaacttgttccaaattttaaattccagcaggatcctggttgcgaaaatttctggtccacattgacatttccggggcgttgcgacgaggaggccacgaggccggagcgtccccgtttcttcgaggaataagttcactttaggtccctctatttgtcgtccagtctgattttcgtccctgaaccgcaaaaccgggcacgacccgtcccccaacttacgaaaccaggcaaacgagatcccttggcggttttgacagtggttttggctgacgtggcgcatacgtggctaatttgacttgtcttcatatgacgtggcactgacgtggcaattcgatccggaaaaataataaaacccgtgggacccacatgtaagttgcacacataaaataatataaaaatggtgggacccacgtgggtcccacctgtcatcgtcactcctcatttcctcctcttctctcggcatcttcatctctatcccctttcctctatctcttctctctacagcagcgccaccaccacggactccgccgccgctcccgccaccgccacatcccttgccggtgatccagatgaggttccgcggcgtgcaggtggatctcgtgtacgccggcgtgtgcctcccgtggtgcccgacaacctggagtggacctcagtgcgaccggtcggtgctccgcggccttgacgaccttgccacggcgcgcagcctcaacggcatccgcgtggccgacgagatcctgcggcttgtcccggagaccgccgtgttccgcaccatgctgcggtgcgtgaagcactgggctaaggcgcggggcgtctactccaacgtcgcgggcttcctcggcggcatcggctgggctatcctcgtggcgcgcatgtgccagctctaccccaacacatccccagcatgctgctcccgcgcttcttccgcggctttgcgcggtggaagtggcccagcccggtgatgctgcgcgccatcgagcacgacgacggcgagctcggcctcagacgccaccctgcgcgtcatcaccgagcagctcgccgtcggcgacgacgtctgccaggagatcgtcaaggccgacgccatgtgggtggtgattagttaagtactgcttggtcttaatgatcggtaactgtatgtgttgcagcttgactaacaaatcactgagtctgagaaataagagtggaagtgtagctagttcgccgcaagctcgtgtttgtccactgaagtatttgcatcacttgtgtattccttcgtgcgtgtgtgacctcgcgtgtgttttgttgtttctctgggccaaagctcacagggctgggtggagtcgcggttgaggcagctgtcggccagggtggaggcggacacgtccgggatgctgctctgccaccttcacccgcaagcgtacgccaccgagcaccacaaggagccgcggcggcagggggagcgggaagctgtctccgccgcggccgcctcgacgccaaggatctccgggcggctcgccggcgctgcacggatggccttgaggagagcagctagctcgctcagatggccttgaggtggtcggcagcggcggcggcggcgatgtccttgccgtcggcgtctcagcgagggcgacgatgttgggggagtccatggccacgacgtcctccgtggtgaacccatcctcgttgcggaggagctccttgctgccggcggcgaccatccccggcgtaggcgtggcagtgcacggagcatgcggcagcgtcgacggcgaggtccgcctcctgagcgccgtcagccttcagccttcccgagccttggcacggcggacctcacgtggtcctctcccaccggggactgagagagaggatatagataactgataagaggggagaaatagggtgacaggtggggtccacgtgggtcccaccattatttttattattttgtatgtgcaactgacatgtgggtcccacgggtttgttatttttccggatcaaattgccacgtaagtaccacatcagtgccatgtcagataaagaccgagttaaatgagcaacgtaggcgccacgtcaaccaaaaccgctatcaaaaccgccgagggacctcgtttgcccggttttcgtaagctgagggacgggttgtacccggttttgcggttcagggatgaaaatcagactggacgacaaatagaggaaccaaaagtgaacttattcctttcttcgaaagcgaatcaatcagcgaaaggcccgcgctaacacctcggcgcgcggtgggactttgggggctttcagtgtgtggcccgtgtgtgcggccggaacagaggtggacaccgtttggtgcgggcgcgatggatgatggcctgctagctgcaggctgcgtggaagtccagttctcccaaaacatgtgagccagggcccaaaaatcccgcaccctccaattaccgcaaacggaattatacgtcgttcgtcgatgtacgattgcaggccgagtcgccgacactggttcatcgatgcatctgatctgatgcattttatatattttagtttacttgagtacacttactttgcctctaaagctagacctgtgaatgatttttttttcaaaaaggaaaaaaaaatcatcaccaaactgatcgatagaggcgctggttttggagttttccctcgttttggtttttaccggttcagttgtcggcctggtaataattactttacctggaagtaactaatttatcttgtgcaacgtttctgtctcgtcagaaaaactgtgcagccagggaagctagccctgaaagagagatggtatggccgagccgcaaatctcttctccttgaaatggcaagctaaagatgatctcatcgatgttgatcgctcaaggaggcaaggaaaattaaggaggcgagaaaagtacgtaaaggagatgggaacaataagtgtaaaggcagaactgaaaactaattacccaaaactttatggattcgatcactgcttgacagggaacatactctaagcccaggaaaacgaccgccagatatattagcatacctttttgcagaaaagaagaaagattgtcatcttttttagtcgcaaataaaaggggttctcggctagtggaaagtattttatgatcctagatgcatatgcacagataggctcctcttcatttgtacacagttttagacaaggagcgtgcatccatgcttcattttattttttctcgtcgaaagctattcatatggagtatggaaaccaatcctctgtaatattatcctttaattttaagtgattgatatttgagccttacacatcaaagggtggatatcaagctggctcgggcttggactcggctcgttaggataatgagttagctcgactcggctcaagctagctcgcgagctctactaggcagagcaccatgccctatcttctccacgagcgcgcacgagtaggaggggctagtgggcagcgcaaatggatggcgagcgaaacaagaaggagaacgtcatggttggcagcaccagccgacctcaccgaagcaacaggctccacgacgcgcaaaagctcaccagtcttctgtcgaaacagggactcgtcatcctccgcatctcgtcgtcttggacgggaagaagaaggacaacagtcaacggatgacgatacatgcagcgcaggcgccacaacgtgatgggaagtagagcagagagctgccaaatccaagtggcggcgagagcgcacgcggcagcatgcgcatgtagtacaaccaggtcaaggccaatagagtacagtgaggggcggggcaacaagcacgagcctccaaaccaccagcggctgcggcaagtgctctagaccttcaccttgtttggctcatgagtagctcgcgagctagcttgagctggtttgttatctctaacgaactaattaaaacatgagctcagctcttcacaaaaatgaaacgagtcgactcaagcaagccagccacgatctgtccaacctacttacaaaatcgtgcccacatgtaagtcacccacattagatggcagccctgtaaagaaacccatccatggagtgtagatacccacatagaaaaatgaaaataaaacaactaaagtatcgaaaagaaaatctcaccgtggtgtactactaggagtactttataacaacctttgaacttgtttgaccgtgttactttacagctagttgcaattgtggttgggcgataactattagggtttaccaaaccgtttaaggtgggattattgccaccccatggtttggtggttaccgcaaggtatatcgtaatttcagaatctggtaaggttatcgcacatgataaacacgataaccgcacgattctatatataaactcggatagatagctataggacgagcaattattttttttcgtttgttgtgaccgtgcatccgcaacaatctctctcaaacacccccctccccccccccccaaaatatgttaagttaaaatatccaaataaaaaacaaaaacgatacgaagattggacatctggaatgaggatcaataatggcctattggcaggttggtctgtacacgtccagtcactgtacaataggtagatttggacatataccgttgcagtaccatgcgtattactactactactactacaaacgaaaaagaggcatgataagaaaaggtcagctatcaagttttaatccccgctgtaatcaagctgtgccgcaagagaaggaattctagaagcaccacacacaccctcggctttcctcgctgattggctgatggagaccacgacgagacggatcgacaattcgacactaacataagaggggtccaaaatcttaatccaccttgtgtacatatagttaactccatgtttgggcacagtggtgtcacccagcccccatcaccaatcgatcgacgggttatttcccaatcgcacttaacgtgacattgaagtcaatgatccccacggcgatcgattacgatcgctaaaccaatgcgattaccgagcgattaattaggtcctgatacatatattagtcactttttttcgattcagatatcccgtcctgccgtccatccgtctatccgagtcgatcgtagtactacatggctgtcgctatacacacagcaaattaatttcttacagatggtgcatggcatcgcttgtgtgcattgttgatgactagatgtgcgtggttgttcaacgtcacgtaggtttagtggtacgttggatcgtgctaaaactcttctcgcttgcttgcttaattagttgccgacttgctgtgtgacctgacggtattttcagtcggtgaatggagatatggagttggacggatgcgacgatcgatggatggaacgaggcatgcacgtgacacgtcgtcgttaaggtgagcctttgtcacacgatctcctgctagcgcatctcggctcgctcgctcgacgtctcggctgatcagtccgacccgatcgacgttcgtgcgcgcggcaaacgccaacaccgttgatttcgcctggtgtacgtgcgggtgagctgtgcatgcaccgcactgcaggcgacacgaatgtatggctcgagtgatagggcggctcgctatctagcttacggccttccgcgacctcgatcgtgccgacactcccgcggccgggcggcgaacgccgccgatccttgtgagtgcgccatgcggggcctgcaccaccgtcgacatattgggcattggccgattggcgttccacgctctcccccgcccctatagctatctttgtttcctaggtgtggaatatcgcacagcagcgtgcgaaagcaaccgcgccatggatcgatccgtagttcggtacgtacgtatagtagcggcactgcggcagtagtgctagtgtgatgacggcaggattgtggcacacgatcaaaagcaagcagctcccctgaagacctgaatcctgaaaccctgatgcggagagaccacgtaccggccgctgggccgggccgcgtatgtccatccagtggattggtcagtaactcagtatagcagcctcacaggttttgtttacgatttcttttcggatttgcaaattgcaatttcacttgtgacagatttttcgcgcttttttctaatacacagtacacacgaatttagatgctcatatacatgtatgtacaccctaccactatgagccactttaaaaactgggccaatatatcttacgattaacaaagttatcacaggtatctgattgccgatggatatatctaatatcactaaaaaaactattactcgtgaatgtgtgcactcgtgtcaagtctaaaacttaaatgattttactacacatttgtcgacaaattacgttgtataacatatgtaggagtaagttataatgtagttatactacgatcatactatatctatatttggtaattttttaagaaaaaatttattgacaaatgtatagatagtccctaaaccttataccaaaagaaaaggtagcctaaaccttatactaaaagaaaaggtaagccaagacaaaatattgacaaagttagatgtttggttgtcaagattttggtacacagttcctttgtttgtttcagatgtaacgcaccagtgcttgggcaagtcctgcttcacttgagatcagatatattttggtctaaaaggtgaaaatagtatggaattcccccggctatcctgaacattttcccccttttgtactgaccatttacttggaattggaattgacggaagcataaatgtgatctggtgaggcttttttaacggccgtttggttaggaggagtttttacgaaggattgagagtttagagggatgggaatattaactgttttattttggttgggagacataagaattttggtgggatggagacggagaattaagaaactccctcattttcaatatctaggtagggagtggtaatcgggaggaaattcctcctttacttttcttaaacaaatctcaattatccgttttcattaataacctaatctccaactaaactccttatcaatttccatcagctctaccaaacaaactattaggattaaaaattaaattctcatcttaatcaatctcacatcaatttcctcatgtaaactctcaatcccctgcttcaagttgccaaacaagccgtaatagtttcgccggtgtaccgttttcataagttttttttggcaaaaactactatattgtactggcaacccagcacaaacaatcctttattaaatcaaaccctaatcaacccctgacccttatgtgttactagtgtgttgaatgctatggcatcctcagtagtatttattagttgtgctttgaatcttcacgacttcaccaagtaatttgtaaagtatttatggcttcatttgcttgacagttgacactatggtgccatgttttcgatatattctatatcgttttcttactataccattttatccgttttttcaagaaaaaagtataggttgtgtttagttccccgtcaaaattagaagtttgaagaatttggaacgatgtgacaaaaaagttggaagtttgtgtgtagaaaaatttgctgtgacggtaaaattgaaagtttaaagaaaaaagttagaatctaaacaaggccatagtcgagaaatggtttgagcaatttccaaacattttgacccctattttggccacagttctacgatttgttttctattgatacagaagggtactacagtgtggcaaaaaacacgctcacacacacacaaaaagaaaaagaaaaaggcagaatatgcttttgtggacatgtcaggaaggttcctggcagagaagttaacatcagaagagggtcatgaacaaatcttccctgggaagcaggtggcatgcaagattttacgtccacctttaggtcccttcaatttgtagaaaaaatgtagaaaatttaaaggattttaattttatagaaaaatttcctatgaaaccctttgaaacaaaggattgaatcctatactatcctttaaaattcctatggaataggtaattctatagaaattttggaggaaagttagcaagaggtccaacctcttggaaaaattcctttgagtctatttctctcatccgattcttgtgttttttctgtggtccaatcaaacgatcattcctgtgtttttcctgtatttttcaatcatctgttttacacctacattcctgtcagaatcctgcgttttttctattcctatgcttttacattcctacgattcaaaggggtccttacaatattgtgcaatctccggtgtgctacgtatattggaaagttgtcataggattattaaaggtgcagtgcagccgtatcattttcactgaggtaataatgcctactacagttgagatgatctcacacacacaaaaagaaaatgtcatatcgtttgaaaaacgagggatatcaaaagggatggccagacaccgatgatatctgggctgcaaaatcaaaatgtaagagaacgggacacatctccagctaaacatgacaacggagcaaaactgcacctttgtttagttctaaactttttttttccaaacttttaattttttcatcacatcaaaatttttctacacacaaacttccaacttttccgtcacatcgtttcaatttcaaccaaactttcaattttagcgtgacctaacacacgactagttttttttttattttttttagataagggtattttttttacccggcctctacatccaaccggatatatacagccattgaaatagggaacttagccactgaaacaatctaatctgaaattcgctacatagaagatttgaactagggaacttagccactgaaacaatctaatctgaaattcgctacatagaagatttgaactcaggaccttggtgcactactcaggtcactgtaaccact

SEQ ID NO: 7145 - DNA, 50278 bp, Oryza sativa
tttaacgagtgggctagagtccttactggggctatttagatatgtgaccacataaggaaaaagtcaacttttcatcccaactcctaaaaccagggtaagtcacctgataattttaagatgggtttgtttgacgtggtacatacggggcttggtttgactaagtctttattttacgtgggccctatgcggcaatagggagcgaaatagaatttaacccatatatggggcccccttctaatgatgctgccgctggtatttgtcaggtccgctatcctcgctggccctaaagagagaaagggtatagagaggagccacatttcatgtgggcccattatattttattattattaataatgtgtgactgacatatggatccccttgatattttttattgtagttttggatagtattttttatcaaagttttcacataaagctaggtatgtttacctcttcagcactttggatcaccttctccatctctttcttctccacctccagctccaccctctcccactggagcttgattgataaggcaccggcaagctcctcttcccccacaccagtgaactcctcctcagttcggacgagattcaccgtctagttagaatgaagcaggggcaaaagaggtggaggtggtggtgatgggagagccggaggtggagaagagagagatgaaagggtggtccatagtgcaaaataggtacacatatctagtcttatgtgaaaactttggattgggggcaattcactctatttttttttcctctaatgccaagtacacaccaaggggcaaagactaatcaatacaccacatgtatgctatgtaggatgaaaacattgtttaaaccgtctagtgattctatatgtactgattttggtaattaggggatgccatatagcccgttttataattaagagacgcaaataaaacttgatctgtaggtgagggatataaagcacaccttttcctccacagaaagttccaaagacaactagactacattcaatccgatagtagtgctttctatacatcgtcaggttgtagtgagaaacataatcctagcttgcttaagggtttatcaaaagcttgactctacataaactagcaaacaattggagaatggagaatgcgcactattgctaaagagtgccatttttccttactaggagcctgtgacgacatttttcattttacaaacttcctaagagccaactgcaggctccaaatcatctatagctaatctaatagtccattcatacaatagttaactataaaaatataatacaccattaatacctggtcccacctctcatacacacataacgctttggagtctgtgttacagttggctataaatctacagctcggtttcttctctttcttctcttttcttctcgattagtgaaattttcaccattcccaacataatgagcttgagccgcacggtctatatataggtgcttttatcgtgctatttagaggacggtcggactatcttttttttagctaagttgaaagcaaattttaaattttattagaattagttatggaattaatttaagtattttctcgttttattcgttgcttatttttcctgcatagctaagtcgtccttagaaaaaacgaaagcatgcattactcttttctttttctttttcattgtttttcagtatttacttttacatctataagaacacgtatataaaagttttattcacaaattatttttcatttgcaaatatgccgtttggcttattccgcagataagccaaatgatggggctcataatacaccctacggcctatgtacctttttaataggcgatggccgatggggcggatggggagttcccatcttgctattctacccactaccgggatctcgtcccagactacgggcatgtttggaggtgcttctagctgctgcaacttctctcataatctctagctccccaaacaattcagattgtcacccagattataagaatatatagttatagaatccagaaaataaactagaatccagaaactgaaaaacccagcttctccaaattcgcagaagctgactcataatcttaagcttcttaagctcctccaaagagggcatacgccagtgccaggccaccgaacgaaatgatcccacgaccgtgccgagacaaccgctaattttcttccctggacccaccgcgtgcggcaacccacgctccaccaccacagcggggctctacccgagaggctgtgcccatcggcacgccaaccccgtcaccccgttgacacgcgcgcagcacacacatcccccttttccgcggccagccaagctagccccagcggcgcaagccaacacgtacgcctgcggcctgcctctgcctctgcctcgctcggcagggtcgctggcaccgggcagcgcagcgcagcgcacgccgcatagcgccaaccgcccgagcggcccaccccccacacccgcccggcgcgcggcacgcgcagaccagcagtgcatgcgcatgacgaaacgtttcaccgcagcgtcgccgaccgcaccgggcaagtacgctggaccatgcatgcacgcacaggcacggagtgagaataaattcaagggatatataaaaaaggcccagcgtgacagcgcccacgtccttcggtgagacagattgcagcttgaattttgccatggtagatcgatcgatcgaaaaaagaatttgcattacttaaaatggccagttaaattacctcccctctacccgaaaactgaaactttttatctggtacgtatttctcgatcttacacaaaaatactcctatgtatacgcttcccggaccaatacggcttcattcccatttcctctcccctccagccatgccctcctctttcgcgtgcgtgcgagcaggcgtcacgatcggtggatacaccaggctgctctgaggtgatcaacgtggacacggggcctgcaaccgagaagaatgttcttgtcaattgtcaaggagatatgattgagttgtactattgatatacagggactgcaaaaagaaaaaaaggtttgcttgcttcaagttttcaacacagcattataggataacacaagcactgaaataggccacacaagtacactgaggcagctctgaagttatactattactgatgaaacaaacacatgcacacggccaagaagttcaggccaattgcatgcatgcatgctgcaaattgcaaaaccgactaatgagtagataacctgcttacctacaggactacattcacattttaccattttaccgaggactcgtgtgtttgaattacaattaaagtataaattttgtctaaacacaatttacagatgaaaatgaatgtactacatctttgatcctttgtagattgtatgggagccagggtttcacttatcgcacgataatcgcgcgacaaaaatcatggatgtagttcttgatttgtaattgccaatggtgaagaatttttttgaaatagagtaagctaaattcaaatttgagggcacaggcaaaaatagtttacaaattggaaaaaagaagagaatattgggctacatattcttccaattattctcaatttatagttttgtacacatattcaaccgtattgttgattttttttccctatttattttacatttacatgattttagctacacagcccgcgataaccgtgcgaatatcgcggtaaaccgtgcgattatcgcggtgaaaccgtgataccggtgagttttgaattcgaatttttggatgtgatttttgtgcgattttaggtgattatcgcgctatcgcggggtggcgataaccccggcccaaacgataaggtaaacctgatgggagcacggattactgcctgagcaaagaaattacggagctagaaaactgttttcatgcatcaacaacaaaagcaatcacatgttgcatttattttaacataaacaaatatcttctctagcaagtactatcaaatacaaaaaaagtaaagacgaaatttgtagatctcaaaaaataaggggcgttttggtttgataccaaaatattgtcataccaattttttggtggtttaaatagcaaatgtgatgatttgatttgaagccaaatgtttggtaatgccaatactcaatttggcacaattctaaaatattcttcaccacaatttaaaatttggttctcaattggcataaatccaaatgcactcatttacaattttaccctaccaaagtattagtagtgccaaaacttggctagagtttggcactaccaacatattggtagagtactaaaccaaacaagccctaaatgcagacaaacatggcattctttttgttaatatcttatttataaatcacctggggctcttagcaaaagccaaaaattagaaaaagaaactaagggcaaaaattgattgcttataagaaagttggtgacacctgtacaaacatggaggcccataaatagagcatgcagatcacgtacacgaaaaaaaagtaaaaagacaattggttgacatcaggaccaaaagggtccacacaaacctgcaagtttgtactgctgtcatccaattcaatgctagatactacatccgtcccaaaataagtgcagttttacactgttcacgtccaacgtttgatcgctcgtcttattgaatttttctatgattagtatttttgttgttagtagatgataaaatataaatagtattttatgtgtaactaacttttttaaattttttcataattttttcaaataatacggatggtcaaaccttcgacacggattcctacggctgcacttattttgggagggaggtagtaccaaacaaaaatgatggacataagcaatggcagattggcatgttctggacttttgcattgagacatgcaaacaatttcagaattgttaacgaagtttgtagtttgtaccactgaaattaaatttataaagaacacatttgtgatgtggagagtggtttaatgggttctaaacataaccaatagaattgcaagagtatagagtgaccctataaactgatcagtgacagtgcccacatactttactccgcagtagaagtaatgggagttgatcatcaaaccagtgggccaaaagagaaaacaattactctatgttaaagctattcaaaactgtagcacttgtcttagaattgcatcaaattatgcaggcattcaggatcaaccacccaaaagcttaccttggcatgggacaataacattcattagcagacattactaatcaactgcttaagatgacctacagaacagtattcagttttcaaggataaaccagtcatctttaaataaaaatgaagcacctcttcagggcatattactgatgaaagccattatatagttattctagaatcacgacctaactctcccaagattcggcatctaatctaagacaattgtttaacaaagtaccgaagcttttctcatcttttgagagaaagaaaagtaacatgaagcatgatatctacttaaaaaatcatagccacgagatcagggcatcaggcacttatttgggcgcacaatgaacacgcagtagttatgggatggcaggcagctcacccataaaatctatgaagtactagtgccggcccaaccaaatctacgtccaccaaaccgcaactatgggattaccattggactattgaagcctgatcaaagatgataaatactaaatagtacgtagtcatcaccttaaaatatactactagctcacgttatgaaaaattactcacaaattaactggatctaagtatctagcagcctagtagccagatatatataactcttgtctaatgtagtatttcttaaaaccattctggaaaaggcaaatttggccctctgcatggccatgtagtagcaaaaacaccattcattttgcgtgcatatatcatatatgtaccacgagtccataactagcttagtagatttgttgtagaccagtgaccgtagcttaaagccttaaaccttgaaaacaagaacaatcgaccatgattttgtattgcctcctacacaacctgaaccttgaaagaaaaactatctagcaccatgcctttgcagaactcttactacctagctcttactacctctatctctcaaagaaaacttcttgttacctcacaccatgaacaactcaacaaactttaagaacagcaaaagagcaagaaaccgagtgcaatgcggtagcatgggaatcaatcaagcagctgctcaccttcccctccgagtccacctcgcgctccttaggaggccatggaggccttggggaagcctggccgaccccatccgcggccatttactcggttggccctcgacgtcctcccgcttgcttgagctgtgtgtgtgagctgagagaagctagggagcaagcaaggaaggaaggcctatgtgtctccgaaaggaaggggaagctgagagttaaaaccaagcaaagaaaagggcagtctactcttgtgctgggctcggagagagagagagagagagagagagagagagagagagagaagggagcgtgcagtgtgcagaggcagcaggggcaaaaggaaaggagggagcaaatgagcaatggctgtcagctattttttctgcttttttctcgagtccgcacagcgctcgctgctcatagtcactgccaccgcaacgcgtgcccccacacacatccgcatactagtctacagttcatctctcatctccattttcttttttttcctcaactcccttctctcactgcaagtgggccacggcacatgttaggacttcggaccacctgccagtcaccgagggttttctgttaagcacttaggccatgttcaacgctccacgctttagcgtggtctgaccgctcccgaggggaatcttcaatcgggaccgcaccctcgcctagcgccgcgactctctgcagagcgtcgggtgatttcggcagcttttcggcgaggaatgggcgaggagccgcgttgggggagaggtgtcgccccgcgccgttgctactcccgcgctaggaagaagatggagagagggtcgactggagagaagggaagaagatgcgtcaatcccagccgctgccgcgtcgatccgcggccgcgggcgtcgatctaccgcctttgcctccatccggtgccgtggcgcctcgatccgccaccaccgcggcttcatccgcacctgtcgctgctcgatccgccgtctccgccttcatccggcgccgccgcgcctcgatccaccgccgccacctccatccgttgccgccaccgcgcgatccgccacttccgcctcgatccggtgccaccgccgctcgatccgccgcctccgcctcgatccggcggtggggagagaggcgccgccgccagagaggggaggagatgcggcggtggcgaagggagagtcggagagggaggagacgccagggagagaggactcaggaggggttgatgtatatatatctttgtgatttttagtgggtatactgcaaatattggatgtatatgcaaataataataatctaagggtttaaatgtaaaatgtaacggactgataggtgctaaaacgcaaaaatactatgggggtatggcttgcactatgtgaggtatatccctaactggatgcttggtcacttttgctcatgtggatagtggaggtgcaccctgcattgggcatgctcttaagccccgtttggaaacggaaacaagctgattcacgtaaaaagatttgtacgaaaattccgtaatagttataacatttcaaacggtactcgcagtgactttttcatcctctggtaacagtagctaacaagggagtggatggtgagaattccatttcaccctggcatgggaattcctcgagctacgtgtgacctgatactgcatcgccgttcaaggctcgcagtgatcgacattttcctccccgtgcttttcagagttttaccgcggcaccgccggccttgccgaatatatgctctgctgctggcctgaagaaaggcttcatcatgcgcatgcatcgtctatcggctagctggctggccctgtggaagcgagtgatttctctccccgtctcggcctcgggtatgggttaatatcggcggcgtcgcgcgtgcgtgcgtgccgtgcatgcgatgcgatgcgacatcgtctttttattcgcggcgcggcgcgcggcttctctcacttctgtcgcgggcagcggcagcagggtttggctggcgcctctgctctcctgctcgttcgcctgctgcttttgctcgcttttatcgtgtgtctcaggaaacgggaaagtggcgggtcgggggactgggccgcggagggggaggaattcagagaggactgtgccggagcgaggtggcggcccgaatcccaagagattggcaaagatctggaggtgctttgtttaatgtacaaaaacgactctagtagcagcagtaatggctactactagctactagctaggttaccccttggggttccagtatccttccaggacaattaagccaaggctatctttagatctaaagtttggatccaaacttcagttcttttccatccatcaacctgtcatatacacataacttttcagtcacaccatctccaatttcaaccaaaatctaaattttacgctgaactaaacacagcccaaatcaatgttgttttgcagtgtgtctaggcaatgccacggttagagtaagaactaaggataattaatactcaaactatatggagtattacttatgtgaaagtgaatggggagcgtatcttatgtactcattcccttgcatgtacacaccatatacaccaactaaaaatcataaaaaaaatatagaaaaattcatatatatatatatatttttccaatagtattgcatctacgtgcaaagtcacatattcaaattcattctacgtagagagtaaaaaaaagataaaattctaacagaattacaaccttagaactgtcagattttttttcagctaaaatataataaatttgaggttaaaatttataccaaggtgtaatactattgaaagtacatgtatgattttttctagatctttttatgacatttattagttggtgtgcacgtgcgtacacgtgtgcgtaggatatgttgctaagaggaagataaagaaaaagattagtgttagctctcatgcaagagctagttcatgcttcaaaaatatgcattaaatttatagtgagatagagagaggaaaaaatatagagctaaattattatcctataatagatttatacttctttgtgtcctaaaatataagagattttgggtggatgtgatatatattatagtattacgaatctggttaataatcttgttagtattagaattgtcacattcacctaaaatcttttagattttgggacggtaggagttgtaagtagtaagctttactaataaaagcttagtcttagggctttgcttcttccgctgttgtttacagaggactgggcaccgatagaggagttgggtttgtttttgttaggatgtgggctggctctatttcctgctgggccgtactgatatactagttgctgggacttggagaatccattcaaatcacgactcgatcttactcaagtgaagtcattttcgtttcagcaatgattcccggggtatcaaaagcctatccaaactccaaaggcttgaaaacaaaacttagatctgacaaaagctgaagactcgatcaaactgtataccccacattcagttccgtttacactaatatatattacagtatttagtttagttggaatcagtatggtaatgtacatatgggatagtttaagagcaggtacgatgagtacaacatctacttctggagataagagcaagtatagtaagacctagtcagtaggctgaaccatttcccacgtcatcaaaatcctatatggcggagtgagaagagaagagagagaacggagcgggcggtcccgctatcgctcggctgaagcgtagtatacgagagaaaaacgcccgcttccagcccgatgagagcaggtataatagcaggctataagccagctataaatatattttaaagagataaaggaagagagggaagagcagcgggctacagatctgtagtcagctgcggcacggactccaagacgtaatgtgtgtatgacaggtaggaccaggtattaatagtatagtaagcaactattatataaattggctattacattggctatagatgatttggagctagtagttggctatactattaaacttgctctgagagcgctaagccgccgcttcgttcctctccctccgatcccgtgcatctctgccgccgcccccaacctcacttcctccgcgcgccaaatccccccacctcctactaaaatcgagtcctcccgctcaaatctgcaataaaaccctcccaaatccactcccatgccaccaaattcgtccccaaatcgcctactctcaaaccctagaccctaaatttgtcctcaaacctcatcaagatgaggcagcaatacaaaaggacgcttgcgccggcgtctctggaggtccctccgccagcgactttgcctgtcacgccggtggcgactcagcccttgacaccaccgccacctcagttcgtccttgccgccgtcctttttttccacctacatacctgatggctggttccccgcagtaacaccgcaatccattgtgacctcctcctcaccatgcttgctcgctgggttacgacaaccaggcatagtgagttcgtcggctcaaggccctgcattagtgcctctgcatatcctgccccaagtgctgagaatgccgagaatcccaatgttcaagcacgatatgatctagcccttaccgtctttatttttcttagtttgttaatcctgctcgaagtgtatgtatgattttgttgtgatatgtcctattgatctgttcaaggcttcacgtccatacatgtcaaactcaattcactgaatagctcctgttgtgtcatttatttagggggtatatggatcagattagctcccaaatccatcggatcatgctgacaatgctgcttgaaaacaatggtacctgggtataaagatgaacatgttgcttgaacatatgtggtatgcatgttactcgaaattaattaattatatgtttctatgtttgttatcaatatgatatcaatatgattgttatttcaagtgtgatatcaatatgattgttatttcataaatcttgatatattttcctgttataatcaccatgaaatgaatattttgtacccgtgttgtttcattcttttggtgactgtacgtatggctgagcatacttgtattttgtttgatgaaatagccacaaagatatagccacagcatatcatgtgcacatgcaggcacatgttaactaatagccaaacatacagccagtctattatataagtgaacttttaagtggaggttttagatgacatggtataagagcaggtacaatagcagactattagctagctgtaaatatattttaatgagataaaaggtgagagagaagaacagcaggctacagcgcggactccaagacgcaatgtgtgtattaatatctggtcccacctgtcatacacactttgtgttttggagtccgtgccgtagccggctacaaatctgtagcacactactcttctctctcctattttatccgcttaaaatatgtttatagctggtttatagtctgctattgtacctgctctcatacgccttcgtacgtcggttacagcgggatgagatccatgagagagagagcagcgtgggaggagtaggttcagtacggtatcgaggaatacccatattcatagagatcgagtgtcgtgattacatcatcagcaagttccgcgaggactttcccaccacctcaccttaaccgaggtccgcaaaggcgcttgttgatgaagtcacgctccttcagagcaagtataatagtaggctataagccggctaaatgctgatatggaggagagagaggagaagcgggctgtaaatttataaccggcttggacataagaaccaagaaactctatgagagagataagtgggtcatgtattaattataaagagctaactattattatatgggtagactaagagaagactataaagaaccttatagccaacagattggctgtattattagccttgctctcaaaaattgttcgccttcctcgactcatccggcctcagcaacttcttcgctccagcggcaaacgaaggcagaggacatcatggaggtgcatccgtgcatatagggctattgatgccgtgggtgtgggaatcatacatcatgaatgagaggaaagcttatgggcctgttcactctgatgtcattttcaatcttactaaattttgataaagttgtaaaaaaagtggctacatttagtttgctgccaaattttggtaactatataagaaatcctgtcaattttggtaactatgctgataaggtttttttttcatccaagtgaataggccctatgtattgacatgtttggtcaactggtagtgataattagtactattggcttgttaccgatgagtattagctgttaccgtactggcgtggtaccaatagtatcagatatggtactcagctgatatatcatacctccaaaacgagacaccgtgcaatatagcaacccgtaagttttatgagtataaagtttctataaaaaggaaagcagtgacactgtgtgcgtacaaaatgaaacgcgaaagggcgttcggttgatcaccgtgcgcgtgcacgtatgtgtgcatgcatctcaacacgtacacagtgcacacacgttaatatctactcctcgttcaggtgtacatgccggaaggttttccaaacctcaacatatcccatactacctgtctgacctgtcagcccagttaatgcacagagcaggcggtggaatacgtcgagcagccatgggccttgctgatcacttgaccggacccaatgcggcgggctccgtccacggggcgccggtggagcagacggcctgcgcccgcctacaaccccagctgggccaccactacagggcgccggcttctgctgatgctgaggcgggtaacgcccctgcggcgacggcggcgtgcgcgccggccggcgcaacgccgcgtccggcggcgatccttgggcagcttcgtcgtcctcaccgtcactactgcttccgtttaggtccaagtagtccaccataacctgcgtggtttcctctactgtgactgtggtaagtacagggagattttcataatcttgatcacctagagaacgggaaaccaaactgtcagtcttgtgagaaagtatagtagtgctatatgtagtgtcgaaataagacggccagagaagtgtaagtaccactagcaagtggtcgagcttcgaggagtaatggaatggccagaacgaacacgagagcaagattgaaagcaaccggtaaacacttcatggcctaagaggctaagaatatactattctctgcagcggctagaacgatctagtaaggcagctcgactcaaactctctgtgcccagctcgatcagaagcacgcttatatataactggcctctgacgcctctccccgaagggcaaaagtcccgatcgccgattcccactcaagatgccatcaacaaccctgtgaaacgaagcagagaagaagcgcattttgtgcatgcgcgttatattatgaccggtccgtaaaccaggaaacacgccagccacagaatcgtttactctctcaagtccaagttacgagtcaattctcaattcatcaggcaaaatttggccttttaatagtttttcttaaggcgttctgctcaggcgacaacagaagtgggcgactacctgccggggagtacgaagtagtacagtgtagtagagcctggccttatggccatgtgtccacatgcatgcttgctttgtaggagtattaatcaaaccaccgcgtggttgtggttgtcttcatgcactgtgtacgtcagacaaaaggaataatcgaaacacccccattgtctcgcttgggaaccttcttttcccttttctgactattgactccacacaaaaaaaaaaccatttctgcatgcatatcacgcacgattgagatgcgcgtagctaaacggcgattgctgggtagttactacattttttctaagacaatggaattgaatattccggttttttttcagcgagctacagtcaattattacaatgtaacaaacaagtgaaactcataaaaataaaaaaagacaccaatcatgaaaaaaaagcaaactaaagactaccaatccaagataaggagtatacaattattgaattttatttgtgaatctccatccaaaattggtaaacagttgtataaccgttgtctcgagattacgacatgcaacttttaaaaactcgccctcttcatcacccttttgtagctgtgcggttctaagccaatatgttgtctaaaaaatacctgcatatataaaatagatggtgatttgtcaaacatcatgtcattcatactcaaccaatagaacctaacataaacagatatttctataagaataagttttctatttttcttttccggtagttcctacatgccccctccgttccatattattaaatgttttgggtgtgtcatgtgtatttttcttaattaagcttagacaatcgtcgtagcaatatctatagcaccaacttagcttatttgaatcaaccgacgaatttatttttatagtacatttgttttatgttaaaaaccatattacatttttctataatgtaatcaaacttcttaacatacacggagatagctgtatgttgcttacgctttactttattgaagaaaaaaaagagtcatgctgtgcgttatatagattgtacaacccacgtacaatcataccgtatccaccaatcatcggttaggcttatctgcaggtgggctcgggcaagcagcaactgtgtttgtgcatgtagtactgatcggatgtaagtactccagtacatatggatcggatgtatagctatttctaaaaataaaatctacgcagttatgaatcacttagcagatgattactggaggggtcaatctttttttttcttaccaaagcactgtgggaagcccccgcagtaaaagaactttattaatgaaaggaaaaaaaatacaataagattatccaagtttataatacatcattttctacattatttcatctatgaagaagaaagagtatatccttttttaaaaagagttctcaaagaacggaggggccagtcttaaacaccccccccccccacccaaaaacaacatatgtttcaagctttgaattatttatttgtttgtttgacttaaaaatatgtgttttataaaagtatagaagtatactcctcctgcctttaagaggatggtttttaaaaattaccctactaaaggaaagggaagggctcatatttaatttttaatttggatttagttcctcaccgccggttttcattgctagaaaaacttgtaatgcttacttgaggttttcattggaggtcatttgaaatatagatatgtatgagattctattttaaaaaattgatttgagattttctaacgaatatttagcccctagataatcttaaatgaaaaggttgtcaactttaaggtacagaactcgtcgagatctacaagttttatataagtttgatttcaaatgaagtctacaaattgtaaaagtacggagatgataaacaatacgggaaaaattgcttttactaccttcccatcctcagaggaggatgggaaataagcttaaagggaaatatcacatagtaaagtgggaagacatggcatttcctaaagattttagtggcctgggtttcacagaaacaaggaaaatgaacattgctctcctggccaaatggatcataaagattgaatcagatgataagagcttgtgtattgagttgttaaggaggaaatatctagtccatggaggtttctttcaacacaagggtggaaatgtgtcccaattttggagaggtcttcttaatatcaagaggtggatgagttttggctctgaatgggttttgggtaatggtgagagtatcagcttctggcaggatgtctggtggggcacctgtcctttaaaaactcttttccctgctatctttaggatctgtaatcagcaagagctgttactcagccatctcaatcaggagggtcctgactgccttacattcaggagatcctttggcccggaagaaatcctagagtggggagacctgaaagaaattatcgaacaaattgaggtttctgattcacatgataagttggtgtgggacgaggaaggtgaggcaggagagcaacgggccgggaaagttcaagttggtcctcggcgtcgacacggatgccgacggccgccacccctaccgctgccagtcggatgcctcaaggtgcgcacgacacctgggctcgctgtcggtgccgctgctgagttggttgctgatatgtggggcccgtgtggttccaacgttgacttagcatagctgaccgagtacacgtcaaacaaaactaggaaacatattgtcttgggataaaagttgacacggttttgtgagttaagagatgagctatacctggtatcgtggtttaggaacaaatttcagactaagcaacaacttaatggacctaaagtgaacttagaaaacagcgtggaatacaatgaggccacatgcggcctattgggccactggctacaaggcaggcttaagcatactgtctgttcaggcttggaaaaagtacacccaaggtccctcaacttgtaatcgagttacaaaattgtcccccaaccacaaaaccaaatttctggcgtcccttaactaatcaattggttctttagtggttttcaccccggttttatccccacatgtcagcctgccacgtcatctctctttcccttccctcctctctctctcactcttctcttcctcctcggttcctcctcctcctctctctctctctgcctgtaggcccggtcggcggggcgatgcgggagaggaggagggcggcgccgcggcaatggggaagcacggcggcagcccggcggagctccgcggcggccgtgcgaggcccgcgacgccggtgggggaagtgacagggggcggcgcggcggacgtggcggaagtcgttgttgcaaccgcgagcctctcctggtgcgcgcgccaccaccgcaagtcgttgttgcaaccgcgagcctcgctcggatcctcctcctcctcctcgacatggtcagcgagcaaacgccggtggcgaccgccgaggcggagctggtgagcagcgccgcggtgcccgtcaaacccgaggaggccgcggcgaaggcgcagccggaggacgatgctcccatcgtcgaggacgccaaggatgatgacgacggcgatgaagacgacgatgacgatggggatgaggatgaacacggtaacactcttcctccttcgcggtttcgtcttcgttaatattgcgatctgtccatgtgaaaggcagcgtgcagtagttttactgattagaaacgtgtcagtgcatcgtggtgtttggatttcgttaacggttttaccttcggttcttgtagcaattactaatagctagatttatagcctgatttgccgtttttgatgaccttgaattgaaggtgagcacggtgcagttgtaaacaagggctccaagcagagcaggagcgagaagaagagccgcaaggccatgatgaagctcggaatgaaacccgtcacgggagtcagcaggattaccatcgagagagccaagaatgtaagaaactgtacagctgctgcaaacaatttattcattcgaatggaagacagagttaatgtttctctgaatcccgtgtgtttcagatactgttcgtggtgtccaaacctcatgacgtcttcaagagcccgacgtcggagtcgtacgtcatattcggggaggccaagatcgaggacctgagctcccagctgcaggcgcaggcagcgcagcagttcaggatgcaagatctgagcaaggtgatgtccaagccggacgcggcggcagcagcgccggccgacgaggagcaagaggtggacgagacagggatagagccccgcgacatcgacgtcgtcatgacgcaggcctcgtcgtcgtcgccgccgccgtatcgtcgccatcgccgtcaccgtgtcatccgccgtcgtgtcgttgtcgcgtgtccttccgtgtcgtcgtcgccgccgccgcgtcgtcgccgtcgtgtcgcccgccgcctcctcctctcccgtctcaccttggtggtctcctccgccgctggccggcttgcccatagaacaaaagagaagagtgtgtgagagagagagagaggagggaagtgagagaaatatgacgtggcaggctgacatatggggcccacgtgggtcccacatttgaatcagccgtcacgtaggacaaaaccggggtgaaaaccaccgaagtacctactgtgaccggttttgattagttaagggacgccggatatctggttttgtggttgggggacaatttcggagttgctagaaatatagcgctatatgctacagtcgattttttttagccacttacacagtagttacacctcatttacaccccacttacatatgtatagtatgtaattttcgaatttatatatgtaattttagtacttacatatgtaattttgagacttacattgtaaatacactaaaattacatatgtaatttaggaacttacaatgtaaatacatgccgattattttttgatgaaaaatatggcaccgtaaatatagctacacccacaattttgtaactccataacaagttgagggaccttcggtgtactttttcctccaggcttcagatgcacatagactagttgggctactagacgattacaagtctctcaagcccaagttttaatcatcccaaaaaagggtccaagctttcacagtggcgctggatccacatatccatcaggctaagggactagctatccatcacacgacagatttttgggtccaaatcacacagattttagattagttggattaggctcatttgatcacttgattagaagagtctatacatgtatcaacatatattaattatatatattgcatatattttatttgttagatctttacattgaaaaaaatatatcaccaacccatctactaaaagttacagtgtaattacactatagttacagtgtaatttcactatagttacagtgtaactatagtgtaattacagtgcacttacatgtcatatcaactaaacttacaaatataattttagttatataggattgtaattttatattttaaaggaaataacaagtacatatttacttacacaacatttttaccaaaattatagtgcacttacatgtcatatcaactgaatttacgaatgtaattttagttatataggactgtaactttatattttatttcttcaatctcttcacctagctgcaacgacgtgcaatgtatgtactcatcaattatgtgccaagctagatgttgctggcctcatgcgtgcgtgggaaggaaacgcatcacagccgctaattaaatcatgcacagactaatccacaagggaagtaaatccgagtgatttcgtgccaaaaatttgtcgccagatttttagcaaaatcgtcaggctaatagcccgtaatatgataggcttttccgctagcgtttgttttctctgagtgtccagtgtagtttgctttggactctgaccatctcttttcagggcattgggattctttgagttgcataattggaagcttgcttttacttaagcaccacccagttccccaatctttcaacagaacaagtagcattttggaggttatcagtgtcatcaagtaaactgaagtcccttttctaccacaagtttcagaaaagctataatgcctgctggaaaggaaggaacataagattacatgttgactctacacatttggtgattatctatgtgagaggcttcaactactactaatccctagctgataactccaaatctttcctcgcctcacagggaataagaacaccgtatcaggatcaggccggcactagctgcactgcttttgattttgaacgctcgaaaggagaacagtgagccactggcagaacggcgtagcctcaccgtctgtaggcagcaactagttgccgcggtctagttgtagccttgtaggccacaagcgagctcgttgcggccgacaccggacagtgacttgactcaggaggcaataactccttcagctcaaccaaaggtggctggctgatgaactgcccgattttgaagggttcagttcaagttcctcctacttcccagccaagctgccttatccaattagccggcaggtgatgactgtcaagccagttgcattaagttatagcagacgtcctggagtgtgatggagttaggtcgaggcgatatttctattgcaagtagctcacaaggacgaatgaacgaacgaaaactaatgaaccataactgatagctccaagtctccaagttgtcaattcttgttttcaagacataaaattaagtagcttgacatcggccaccgccggtcgatacatgtcaatatccattagtatttatattcaggcattgactaagttaatgttatcttttcctttgtctctttttcttctttattattacacgttgacttccgctttacattaagtaatttacagccattggcggtgtcaacgcctcgctgatgatttagggaagctcaaggccatctttgcgtcttgcaggatacgaaaatatattttttgcaaagaggagacgctgtgcgtttccttttctttcgacctgactcgaaagcaaagtgttcgagttgcctttagcaaggttcagtataagaaagcaaaagaataattcgtaatcgatcctgcggtcaaaacgaaactggggctttcccccttttttatattacttgcaaaccttgaatgtaacctggcttatgttgattatgaaaaggagaaaccctatggggatttctcaaactgattaaaacgcttgctcgcagtacaaaccgaagtcttgtatcattttgtatttaacaattagtttcttgtgagataaacattgacacagtgcatttgtcttgtatgtaagctttgttttgtctctttacagctgctgggaacgattgctagatggtgggtgcaacgtcattccacacaggccggattctttattgtgatactttgatagcgtgggaatacttgggagttatgcctctggagtcgactccagctccctcttatctcacaggttcagagcacctgtggcatctgtgtactacatcacttccgtttattttccaatttgatcagatctaagacatacaactgacctcgtgcattgtttgtcaacctcctaacattcatgttgatggatattgatagccaaaaagcaaaaactcataaattcttccttgtaaatatagataagaccaagtaagagatagtataacaatggttgacctacttcatatttgggagctggttcaaccagaaggagctgttcttacttttttggcagactccagtagaatactgtagctagctagaatcggagctctggaagaacgggttattgtaatcatgcccagttaatgtaatcatagggtggtgaggctactcaattactagtagtacctcaagtgtagtccgtaccaaacatttgacttgctcgcattgctggtatgtgttgacttgggccgtggaccattgaatcgaacgtcgagttcggcgtcgcagcaaagcgatcgagcccctctgtctctctctctctctctctcgcagatctccagacgttcggtagttcggttcatgtgcacattgcacaagccgccttgaaaaacgcagctccctgcctcccttcaacgcgtttgcaacgtgcaggcaggcaggatctacgacgttgtgccgcaccgacgggtgtggtttggggccaacccgagatcggctcatgcagtcgcgcgctcgccgaatcaaacccggcgtccggctcgaccgggttcgcgttcgtcggcgagcttttagcttctgttgttgtctctcgtctggctcctgtgcgttcgcgaccgcgcatcaatcataccgagcaggcgcgcgtgccgcccgccggtttggcggcgaggcgggatgcgtgacgagtttttgccagttcgagcggcgctgggacgcacgcgcgcgcgggcgcggcgtgctgcgctctccgacgacgaggaggcccaccaggccaccaccaccttgtatgttgggggggcacgagaccgcaagagggaatgaaccgtgaacgtacgatgcaaaagcgagcggacaaggcggcattgcggccaggcatctcgtgctcgctgtgcggaatggaagcggaatggaaggggatgatgcatccgatctgacgcataccccaactgctagtgcactgcagtgcagggcagtgcagcgcagcgcagcgcgttgctgcatgccaggtcggtctggccctctggcccatttggccgccgacctctcccaaaaaatatgcaggcatccacctgcacgaaactgcgaggtccgattcctttattggtcggagacaagagagtgttgccagttccccccaccgattaatcccaagagcaatccggatgaacaagcaagccacagcaggtaactaggtaagctgtggcgtctaagttctaactgtaacactcagatagctggctgcttgctagtaggtgaatgcaccaactcctgaacggaattggtcacattcggaggaagagggacctgaatggccgaatacctgatctataatctgaacttgacccaaatttgatcccaccaaagtcgttacaggatttttctcaggatgttgttgggccaaagtacaaccgtagaagtcatgtactaccttacctgctcgtccgggtgggtttggtggagcaaactgccgcttaccccgaactaccataattctgttgcagactcacaaagccacaatgtcaaaccatcaggcagcagccatttatgtcccttcccccacaaaaaagacccctttaggcgcatgcgttgacccccccccccccccccgggacctggcatgtttatattgcgttgagctatagtgccttccaatgtcagccgaatcaccaaacacttggcccgctagactttgctttcgctgcgctctctctctctctcaccgtgtacgaccgacgacgggggaagaggttgttcggcaaagccgttgtacgtccaatcttgactggtgccgcggcaccgctgattaattgggcacaaccgatgaactaaaaacgggatcgcacaatcttggcccgtgctgcaaaggcgattagattagcgagcaccgcacacccgaacgccaaattttgatagctaagctcgtgtttcataccgtgatacggcacggagtactgctattttggctcttaactaatgctagctctacgcacgacctatacgactctgcagaaattaacatcttgaccgttttctaatttctaatcgtcaatttggataacacactagcacagtagcaacatctcgtgtttctcgttcacaggcacctgagaaacgcataaatgcagcgttttcccactgcaaaggcaaggaggccgtccgttgatgagccggtcgttaattagccgcgcgttcccacccacacacacacgcgaacacgcgcagtccagtagccgcgcgtgcccacgacgcaccacccacacacactttctgcccccgcccatcgccaagttgagcatccacgcacaccaaacaccttgcacatttcctaatcttaacacccccacccaattaacgccaagtcgtcttctccttcgccttcccctctccaccctttgtatataaacgcacacaagcgctcggaaagccaactcagaccgaacaaaaggatcaccagctcagagctcaccaccaccaccaccaacaacaacaacaacgcattgcaaagcaaggagaaatccgaagtccaacaacacccacaagaaaagagaagaagcggggaatggcgatcgccgtgagcgggcgctggacgcggctgcggacgctgggccgtggcgcgtcgggcgccgtggtgtcgctggcggaggacggcgcgtcgggggagctgttcgcggtcaagaccgcggccgcggcggaggcggcgatgctgaggagggagcgggggatgatgtctgggctgtcctcgccacacgtcgtgccctgcatcggcggcggcgatggccccgacgggtcatacaatctcttccttgagttcgcccccgggggatcgctcgccaacgaggttgccagggatgggggacgcctcgaggagcgcgcgatcagggtgtacgcggcggatgtcctgcgcgggctgacgtacctccacgggatgtcgctcgtacacggggatgtcaaggcggacaacatagtgatcggtgtcgacgggctcgccaagctcgccgacttcgggtgtgcgaaaaccatggattcggagcggccggtcagcggcacacctgcgttcatggcgccggaggttgcccgcggggaggagcaggggccagcggcagacgtttgggctcttggctgcacggtcatcgagatggccaccgggcgcgcgccgtggagcgacatggacgacgtcctcgccgccgtccaccggattgggtacacggacgccgtgccggaggtgccggtttggctgtccgcagaggcgaaggacttcttggccatgtgttttgcgagaaacgccggcgaccggagcaccgcggcacagctcttggagcatccgttcgtggcattcgcctgccacgaagtcaaggccgcgcagccgaagcccaggtgggtctctccgaagagcacactggacgccgcattctgggagtcggagaccgacgacgaggaggaggtcgacgagataacagagagcctctgcgataggatcaagtcattggcgtgccctgtttcggccttgccggattgggactccgacgaaggctggatcgatctgctcggcgagcagtgcgaggcttgcgattcggaagcggccagggaatcgattgatgtggcgcgtagcgcgccaagcaaagtgtccagcgcggcgacggtgccagctgctgaagtggtgcttgtcggcggcggctgctgtccaagcaatgaagcggacgctttcgatcagtcaattggtggcgatatccaagccgctgatcgttcaatcgagcgtcggaataaagtctgcgctggttcagacaatgatgtacttccatttcgattagtatgtaacggaatttgtgcaatggaattctttcagtttttcacaaatcttgctgtgctgttatgtttgattccctccgttcccactatgttttcgtcaaattgtgagctacgcccatgcctagagcaaaagctcagtccatacgcaccacgaaatatttctattcaactttattacgtaagtaaccacgcaataataaacaactaaaaaaacaactcaagaagcatagcataacctgcctgtgacaccacggcattagatcatccgttcccttccacggcatagtaaagaatcgataacacctggggtttattccgttctggaatcccaaatcccaaccaacggcttctccttctcgaccacgaaacaggcggagccgcggaggattccggtccccgaatcgacacgggggacggggagcgtcagccttcacgtacccacgtacgtcgcgtagcagtacagacgcactagtccacttgattaatctcgtggccaaaccaaaacctccgcactggggaaaaaaaccagcgaccacgagcggcgacggcgcggccgtcggctcaggctaaaaagaaaagccgtacctgcccctttcgcgcgcgaccctcccgatagcgattggccctcctgggccctagccggcccagcaccgcccatatccgcaaaccgccccccaacccccgcggccgctcagcgctgacggcttcagcttctatctcctcgccgcgacggtgcgtgcagtgcgtgcgttgacgtcaagcgtggggtctgcgtggcgccgcggccgcaccggctgacgtaacccctcgatcatcctcgccatcagcccgcattaccgcgcccccgtctagccaagcgcccgcaggcatacgtgcgcccggtcaaagcgtgggcgccataatttggcccgcgcgccggcgggtgcggctggctggctggctgccggccttgccgccccggcgattatccggccgtcacgtaccgtttgctcgcgacgcgtgtcgaggcgggagggtgggcgcgcgcgggcgcggaggcgtgcgtgactgcatggccggtgagcacgcatctatcgtgccgtgtaccaggtgtagcgtgtaaaaattttgcgcgtggtgggggcacgaaggccgcgtatcggattgggccacaggggatgaggaggaagacgcgagagctctggatggagtccacgggggaaagggcatttggggcgtacggtacggttgccaactcgtgccgcggaagagtccacggctttcggttcgcctctcccgggtggccgacttcttgccactttgtgccttctgttgctttcgagtcagctcggtttgggagagcgtacacttgagagatactggttctagatacgtccagaagatttagtttggtcaccttatggattataatggcttcttgattctagagagattcagaacattgaggctattcgactcattgattgcgaaatggagagtttggtgaagtcagcgcgcggtttgggttgtgcgagggcacaactagatactgtttgatcggtcattaggtggccctgttatcacgtggacatgtaatctctgcatctagaggatgtctggaagtgtgcaagaactccaagtctcttatggtcagctcaatgtcaaagcctgcattgctggcaccaaaatgagctataccgggtagcacgaccggtgatttggacgaactggctccagacgtaagtgtgcatgcagtgctgtccaccgaattaccacttggcttggtgatcaagcccaggctgcacactactactttgtaccaatccgtatcgatcagaggtgttctcgtagggatccagatcctctgcattggagaagctaatgcagagggtggaattagctccaatcctatccgtccatcatcatccaacagctgcagcttctttttcccttcgatactggtaccagaaacaaacaagtcctcctcaccggtgaccatagcaacgcaagcgcaatggcaatgagtccgctttggcgatctaaaccgctgcgcctcttcccttgacctatattatcaccaccatgagaagctgagagtagcaccgagctcatgattatcgaaagaaaatgaagcaacagcgcatgcaatgttcggtctctcggtgcttatccgtagtgcggttcgtgccgcaggccaaccctttaatatccagcacaacgccatgattttcgttcatccatagcttctgcagcgccggcgatgcaacatacttcacgagccagcgattcgaggaaatcgatactccctccatccataaatatttgatgccgtttactttttaaaatatatttgatcattcgtcttatttaaaaaaatttatgaaatatgcaaaactatatgtatatataaaagtatatatgtatatataaaagtacatttaacaatgaatcaaacgatagaaaaaaataataattacttaattttttttaataagacgaacggtcaaacatattagaaaaagtcaacagcgtcaaatatttagggacggagggagtaaaatggaatcaataagaaaaagcaatcgcagccattccctctcagatggatggccaggatttgacagaggatttgtggtcaccggtgaggacttttgtttctggtaccagtatcgaagagaaaaagaagctgccgccgttggatgatgatggacggataggattggagctaatgccaccatctgcattagcttctccaatgcagaggatctggatccgttctcgtagcaatctctcttgtgccagccaaatggatgaactaggaggtgcaggtcgtgtgtttattcggtactcctacagatgacaaaaccactatacgggaattcgggaaataaacaagactccgtataagcacatcaaagctgccagctctctagttcaggctcggttcaggttcccatcctctgcctttgggggagaatggcagagacacacagtgaggggagctacagtgccgtaccgttgctacagtgaaaatactgtaactaaggtaaaaaaattcaattattttttgttgttactgtagcatttaatattgtgcatccaacggcatggcgatgtagctctctgccgttccagttggaactgcagaggatgcagagccgttcaggctacacagcggcagcggttcttcagcggcgcccggaaaatcctttttctttatctcgagtagtacaactgcatgcatgtctctctacgcctacagttccgtacacttgtattttttttgttttgttcattcattatgggccgtagctctctgtccactgctttcttaaaaagaaaaaaaaaacaaggacaacaaaattctaaaagttggagatatagacagtataacgccgtccactaggataaagcaacgtgttgcacgcctccaccagggacaaaacgccaggtattctcccgttctagagctagacgcgcgaaaagaaaacggaagcagaggctatcagagcagcgctgtggccctgacacttgtcgatgcaacaactgcgacaggtaatcggcgccgagcacgtaccaaaggcagccgccaacgaatagcacaggtggcagaaggcgagctaacggatactaccactactagtcggtagtaatccctctgttactaaatatttagcgtagttaagttttttaaatatatttagttattcgtcttatttaaaaaaattaaataattattaatttttttcctattatttgatttattgttaaatatatttttatgtatacatatagttttacatattttataaaatttttaaaaaggacaaatggtcaaacatgtttagaaaagtcaacgatgttaaatatttagagacgaagggagtagcagttactactattgcggatgagtttggatatgtactactcactccgtcttaaaatgtaagtatttttagctatgaatctggatacatatagctaaaaatatttatattttaggacggagagagtattctgtatttgtatcagccggaattttaagggctgggaatgattgtattgatgcgatcgagggcacaatcacttcgctggcacgatgaggccagggaggatatgcttatcatcaggactgggttcactgattggaatgacgacttttgcttttgattgctacgcggtgctgttttttggactgatttctgtcatcagaacatgcgaatcgatcacatcggccgccttaaatcaaggcccctccagcgatgtgaatcatgtggttcttaattacagttgcttgattgcttcagataatcctgaacatctaaaaagatgcacgaccatagcacgggatactgtgccacgcggagcagcagcaaattaaaacatatcgatccttcctggccaggtcaacctaatccaatcgcatcaaaccgagcaacactaatgcttgccgccgcctgccaatctgccatagaaatgtgcaacgagccggcgcacgaactaactacttcctcagtttcaaaatgaagctattttttaagattggcacggatattaagaaagtaggtgagaataattagagtaagtgtgtgattggttgaaaagagaaagtagatgaagaagaatggttgtggttggttgagatgagaaggtaggtgaagaaatagctttattttaagacaagacactgtgctaaaaatagttatattttaatacgaagggagtacaagctgacatatgttcttcatcgcaccgaacgaccgaaccgcgcactgggcgtatcctctggctccccgcgtcctcgatgagtcgctaggcaggagcagggcttctgccgatccgatcaatctcgcgacggatacgtgtacttctctgttctgctctaccgcgccacgcgcatggtttgcatggatcgcgtccgcagcgtttggcctgcatgcatattactacctccgtcccataataaatatagccgtagatatccgtgtctaacatttaactatccgtcttatttaaaaaatttataaaaaaatttaaaaaatttagtcatacataaatcactattcatgttttatcatctaatatcaataaaaatactaattataaaaaaattcaaataagacaaatggtcaaacgttgaacgtaaatagtaaatagtgtaaaactatgagccggagagagtactactacatgcatgggccaggcggtagcaagcagtggcatcggcggcgcagcttggagaggccctctctgcttgacttcacatctgttcccttcctttgggcgcgcgcccggccaggtgcctacgaatcctcgtctcccgtacttctggagtacgactcgtggcacggtttcccgcgctactaacagtgccctcttgggattttatggcaggcgtacgtggaccaataagaaggttacagtgccttgggactttcagaatagggcgtggctaatggttttcacccgcccatcccctatacgcccctttcctccttcctcctccccttcttctctcctactacaccataaatttaaaaaaaataaaaaaaacaagttagaaaaatttatgtatagaaaaactatatataaaaaatatttgaattcaaatttaaatttaaaacgggtatgtaaacttttgacttataaactttgggtttataaattaatatttgaattcaaattcaaatttgaatcgagtatgtaaacttttgccttataaattttgggtctataaactttaggtgtataaattttagatgtatagaaatactatatataaaaatatttgaattcaaatttaaatttgaatcgggtatataaacttttgacttgtaaactttgggtctctaaactttaggtgtataaactttagatgtatagaaatactatataaaaaatatttgaattcaaattcaaatttgaatcagatatataaacttttgacttataaactttgggtctctaaactttaggtgtataaaatttagatgtgtaaactttaggtacaaaaatttactaaaatcggaaagtaatacagtgacaaaaaaggaaaccatgtggaggaggggggtgattgctaggggcgatcgatcgcccgttagcctattcgttcagaatatattaagggagatgctgtttatatgaggaaaaaattagaaaaagaaacggaatcgctataaaactttgcaacatatctttcttttaaaaaatatcgattatttagtcgctggattcattccatgattcatacacgagatggaagaaatcgcactagctagtggccgcacaagaaaatgtcgtcatcgcgtgcggtctcttaagtggaccgcatacgatgtgtttgcactattgtgtgcggtctattaataggaccacacgcgataatacgtctacgcatgtgacatggttacggaaagggcataacttctattctacgacttatggaatactccctctgtcccataaaaaccaacctagtatcggatgtgacacatcctagtactacgaatttggacatatatatgtccgaattcatcgtactagaatatgtcacatccggtcctagattcgtttttttatgggacggagggagtatatagatacatcatacctttgtatgtgtgatagacttccatatacgataaggaaattgacaagagattgtggaaataatcctcacgagcaagtacgtaacagagttctactcggagaggttatgattatactatatcgtgcagggtccggggtctccgagttctactaggagactaagggattcattgtataaatatatatccccctgaggggtttagggtatcgaatcacagcactagccaacccgccaccacagaagcgatccggaggacttgaagcctactcgccggtagatctcgttgagactctctcgacaaggatctcgtcggtaattttggaatcagttgttctctattgtactatgtggatttccatatcaatctcatataaactagattagggctattacctcgcgaggggcctgaaccaatataatcctttttgtttgcttgatgtcgaatcgtatagatccttgtaccaacgtaccccaatacccatactgtgcggtatacggtatcccccgtcgatagcatgcggtccgtcaaacaacccctggggaccggtttttccatgtgcagctacttatgccctgcctaaaacctatgccccccgtgtacaggaaaatcgtctttttagtagtgtgagaggcattgataccacaccctctactttgctagtcactaagccaacgctgactttggtgtaaaatataaatttacatgctactgtcgcccatgtaaaaaaaatcactcctgggtattatgcatctaagtatggagtatatttgtactctattgtaagattactgacaacgaccgtcggtgctggatgtaaggttcaacaataagaagtcttggactctcaaaactgtcgaatgtaatataaccctatagatattcccaaataaaattatgcagctttcttcagctttatgcacctatttgatttgaaaccctactaaaatattgaaaccctactaaaatattgatagtgttaattcttgagcaagttttaacactgccaaattttttggagtgcagagttatactccttccggtatcaaaatagttgatgttttatatgtggaagcaaaatatgctaattcttgatgttttatcttgcctgtacatcttggacctgcttgccctcctgattaaggcctgtttctttcagcttgagattattataatctagattattgagtcagattactataagctagattgttataatttgtagtagaataagcggttagttgtttctttcctagattattggagcctagattattaggtttgcaagtctaaagagggagtggggtggtatggtgggtaatttttcacccaataatctggaaaaagctcacctaaatgagcttatcagattataataagctgggctccagattataataagctacttcaataagttatctgtttctttcagcttactcccaatgatctagattataataatcccaagctaaaaaaaacagggcctaactgctcgttggcttctttggttctttctacgcgttgcttgttggtcgtcagccttttacatgctctttgctcgctgccaagtactgctttcatccatggataacatactagtgatgagatggccgagcatagaggaggccgtgcttttagcaacttcttcctcgccgactgtagggttggacaaaaagctcgaaactcgtaagcttgtctcggatcgattcgaactcgtagtattaatgagtcgagtcgagctagccttttagctcgcgagctgctcgttagtataaaatatcaccatatcttcatgaacttagtatttcttgattggtgcttagtcttttaattacagcaaaactattcatatttagtgactactatattagttagtgtttattattatgttaatacataataaaatcttaaatttaaaattattaatatgatattattgagatatagctcgttaacgagcctaacgagctagctcgcgagccaagccgagctggctcgttaagacaacgagctcaaacgagccaatctggctcgttatccacctctagccgacaggtgtgatagcagcgatgatgtagcagccgttgtgtgctagagcacgcgtgagcgagccaaaaatgaccaatacaacgcaatgtaattttttttaatgctttcagcgactgcttcctcgctgacaacgagtgtgatagcggcgatgatgtagcagccgttgtatgctagagcacgcgcgagcgagccaaaaatgactaatacaacgccatgtaattttttcaccgacaacgagtgtgatagcagcgatgatgtagcagttgttgtgtgcgttgtaaattttttttatgctttcagcgactgcttcctcgccgacaacgagtgtgatagcggcgatgatgtagcagccgttgtatgctagagcacgcacgagcgagccaaaaatgactaatacaacgccatgtaatttttttaccgacagcgagtgtgatagcagcgttgatgtagcagttgttgtgtgctagagcacgcgcgagcgagccaaaaatgaccaatacaatgccatgtaatttttttttaaaaaaaatgttgccttagtaggacgccatgtaattttttttaaaaaaaatgtttccttagtaggactcgaagccggcacgtacagacgctaccaataggcccaaaccacctggaatagtgcaagtttctgattcctatttgcacaagaccgtacttaatatgagtaaaacaggaattagataccctaataaattactcttggtatgtgagattatgtctaaaacgtcaagaattttgaaactagagagagtatcaactctattgattttggaaaaattgactacaatacaaatggcttgtagtatgcaatattatcaaagtttctaaataattaaatggacgaaatttaataatagctttttcgtttccttttttcttgtatctcttggtggcttatagttgttttgctctaactgataatctctcagcactaaatattccctaagtattcactaccatatatggaatttcatgattgtctagtgtcctataaattctatcttttagattctaaactatattaaacattaattagttcaaacatattcgcttatggatttgaatatttgaaagattaatcatttagtatatttaacatgatctatataatataaaaacacaattattattattatttgttgaggagggtattactgatccaattgcgtggtataggaaaatgatgttatttttttctttctttgttttggattttttttcttaataattttgggtttaccatgtattcagttctagagtactacagcgtagacatagacgtagtatatttaaagaagataaatggatgagagtttatataatttgtaaggggaaaatagttttggaagcctctagaatctatatgtgatattctgctctagatttttttcccactaatgattcttaagcatttattttatgtggtatgaattaatgatttttcttccaaggaaggggcgctacgtggaccaatcaaaagccagcaaaagagccagctttagattagtaaattaaccatgtcctcaaatcccctgtcttatgggttgagcgagcctcttgcatttgcctatctagaaattgaccagcgttgctaggtgagaatggtttacaaggaggacctttctgccatgatattagggataatacgatatttagctcgtggttagtggtcattggtcatcctttctcttctcagatctcaacaactcgtttttgatccaatagctcaaaacaacggctgagcctgcgagatcgatcccttgtctgtagctgaccgtaagctattaatagcacttaaccaagcaacctgaacgacggattcagatcacgatcgcagaactatattgcccctcgtactatcgcatgcatgctgcattgctgcctacggataatacagttttctcacaggataaaatgtccccgagatgcggggcttcaccagaacaccgcccggagtacactcgtacgacgtacagcacgtacggcagagaagctgcgacgatgctagtgagccttcttgccccggtagaggcgggagacgcgactgctcccggcctcatcctcaatttcacctcgtgttccaattccactccgctcactcgatcgcctgctccgctacgaatagccatgttgcgaccccctctggccccccaaaccgttggtcccacatgccagagtcccgttctccccctcgcatcgcagcgtcgcacgcttttcacgccatgccgtcacggtgccttctcctcgctcctctgcttataaatagtggaagcgctccacttggagcacggccgacgagagcgcagcggcaaatatcactaaatatcacacgaaaaccaaaccaaatcgaagaaagagagatactgctgtacttggagccaagcgagagagaagactgagacgcgacacgcgagcaatggaggctgcggtcgacggcaggtggacacgcgtccgcacgctcggccgcggcgcgtccggcgccgtggtgtccctcgccgcagacgaccgctcgggcgcgctcttcgcggtcaagtcggcggcggcggcggcggcggccgagcagctcgtgcgcgaggggcgcatcctttccgggctgcgctcgccgcacgtcctcccctgccttggcttccgcgccgaagccggcggcgagtgccagctattcctcgagttcgcgcccggcggctcgctcgccgacgtggtggcgaggagtggcgggcggctcgacgagtgcgccatccgcgcgtacgcggcggacgtggcgaggggcctggcgtacctccacgggatgtcgctcgtgcacggcgacgtcaaggggaggaacgtggtggtcggcgccgacggccgggccaagatcgcggatttcgggtgcgccaggacggtgggctccgacaggccaatcggcggcacgccggcgttcatggcgccagaggtggcgcgcggggaagagcaggagccggccgccgatgtctgggccctgggctgcaccgtcatcgagatggccaccggccgcgctccgtggagcgacatggaagacatcctctcggcggtgcgccggattggctacacggacgccgtgccggaggtgcccgagtggctgtccgcagaggcgaaggacttcttggcccgctgcttcgcgagaaacccacgcgagcggtggacatcgtcgcagctcctggagcacccgttcctggcatcggcaggctgcagcgtgaaaacaggggaggcggcgccccaatgggtgtcccccaagagcacgctggatgtggcgttctgggagtcggacacggacgacgaggaggacgacatgccagcgagccccgccgagaggatcaaagcattggcttgcccctgctcggccttgccggattgggactccgacgagggctggatccaagtgctcaacgagtccagcgaagcttgcgacacggcagtggccaaggtggaggccgaagggaaggggcgcgttctgatcgaagcgttggaaacgatcaacgaatcttccggtggcgatgcagagtgtgttgatcccgagggcactgtacgattgattactgttgcttccattgggcagcaggaagtgttctgcttgggtctcattaatgacccacttgtattttctgttaataaaagtgaattaacaaagtctttgtttccccaaattgtctcattttaattcttgcttctactcattttcttccactagtatatgcaatttgcaccatctgaccaagttcgcaactgctgaaccgatgtgccatgatgattccagaaacatggttctagactcaagaacagcaaatgcaagaatctgtgatcaggaatgaccggcagtatatcctccatggggccattgtaaaggcagcgactagatcataccagcaaaggctagagaaaacaccacatctgagaaatctgggtccttttttgccttggtctgaagtctgaactgctcacattcatcgcatattcctcactactatctactctactactgttgttgagataaggatgcacatgtagaataacatctcccaatccaaattgcctctgaagagtcgggagtgaaacagcgatcgggtcaactgggggtctcgtgacactggatagttagcaaagctactgcaattaggagcggcgcgattggtccggagtcggacgtgttgcgatgcgaactgatcgtctcagagtgaattccaagtggcaatgtttgatcttctctcaagcagagtagaccaagttgacgtacacgtttgatatttggcacacgtggtaggggagatggggagaggtgtccaggagcttgtctaaatccacaatattagctcaccgcgacacgtgtcctggtaggctcttccgtgaaacttcagtgcgcgtttctagatgtttactgtacacttgctgccctgccagtcatccggagttctgaaattcgctagaagtagtcgagaacatattctcagaagtagtaacttatgttccagaaaaaagaaagaagtttggaaaggtgacttacggggatacagtagtttcttaatctcttctactctgcattaagtgccggataataccgtgctgcatttctgaattatgaattccttgccgtttacggaatgaaaatagctgttaattgtgcagttagctgctgttagagtggattgaagtcatcatatacagcagtgaaagaatttggtcgccaacacgacatctgaaaaccgccagcaaccttgccgtgcgtcaaccaccttcacatttcaattccctcgcgaccgcttcatcgccgctggttcttgaggagcaagaggggaaaagtgtgggggggcgtagactagttctgttaattatcttaggagggtttgttccaaaaagaaaagaaaaataaaatcttaggagggcaggggcaccaaactgtgtaggtaggtggcgtccaggtcaacttttcaatgcagagaagccatctttgtgcttaacgaagattttgggcaataattagctagtcatcaagaaggaagttgggcaacaagaatctcgtgcatatgtaacccgtggtgatggccacatcacgttgcttgcgtcatctctggatttcagttgggggctctggatcaatagtgttttaggatatcctgtactggctgtaacaactaacaagtgtgcatactgaattgagagtgggatataccccgcaaaaaaaagagaaagaattgagagtgtatatactagtatggctgtgattatacagtggtgtctgcaagtgccaatgtgccatgctgggttggtacatgttggttttttttttttcatgaacctgggtctctttaacaatctgagacaagttggtgtgagttaataatattctcatgttgtgagttaataatattctctgtgtgcgatgagatgatatagggctgtccttgagacaagttggtgtgattctgactgctattgtagttgtgttcagtgggcatatccagcaagggggtgaatggttcaaaaaaaaaagagcaagggggtgaaaaaaaatggtgtgtttctgagtagtacaactgtagttgagttcagtgccataccctgcagcaagaggggagggaaggggaaaaaaaatctaggcacgagatcattggacgatggcgacgcgcaacagtgaaacgtgccagtagggcatatggtgcgtgcgcggcgtgaaccgtgatgcgtcggcccgtcggtgacgcgcgcacctggtccagcgccggcgccaagataagtctcgagatcaagaattccgagagaacctttccttcctgatcagcagccagccgcccggccacttccgggcgaattcatgcacagcccggagataattacagatgcgcggcgttgcacgcaatactactactccactaccaatcatgcgtgcgaaacagtataggtgcatgcaccgtgcgtgcgcgatactattcagaaggtaggggataaacttggcagccgggggtgggtgaacagagtggtagaaatctattgtcagccaggcaaaaacaaacgccggggccactgtcgctttggcgtgccgaattgctgcatactccggtcaccctctgcaagcagcacaccacgttagtgcttacgcctctcctctgcaagctgcgaagcaaaagaaagacaaacaaagtgaaagtaatggaaaagaagccggtgcggttaatctttctctgaaacggatcatgacgacgattcagagtttagattattccccatgggacgtttgccttgtcccggtggtgcaccaaccacaagtccgcaagcaagatagatagatagaccatagatatgccgttcgcccgttcctgtaccggataagtcttcttgtgttgtgtaatgtgtctgtgttaggtcagtactaatttctactcaggtatgaaacgtgaccacggtttggtgcaggtaaattcggtcacgaggccagtatatatttggatttttcagtgaagccatccgagaatgactttcgctgcatggagttcaacaattcaaccaacatgtgttagttgacagtattttttttacaccattggaagatttcacggtcagtgccaatgatacccattacccaagaggcttataatagtcaagcagagcatatgctactctattctgagctcgctggaccaaacggtaggtgagggccaggcacgtttgatttgttcagaaagtcaaaacatgtgccggaatcgcatttgcatcgttgcatggccgaactgttcgggctggagagagagagagagagaggagcagttcagcctaactacacatgccgcgcaaaacatggtgcgaaccgagccacacctacagggagatctagcgaagggtacccaatcgaaccaaagagatccgagcgaaacaaactcattttctaatcgtggtggcctaacaagtcgggcagatttgctgttggtgctactcagatatgtgcagtatcgatctcacatagtcacatcccgtgaacagcctggctgtctcttgttggtgtttgtacgtctgatcagtcgatcgaatcacatgccgctgataagcacatgcgactggatcatcagggagaggagggataggttgatctcatggctcgtgatgagctggtagctagcgcctaactgtgaagcgggcacgcgtgatgtaatgcattgtgagacaattgcatctccacacgacgcgagatcgcgtgctcttccctctcttttgtggctgtggctagatcacgcgagcaaattccacgtttatttcccgtgtttgcgcgatgtgctacggactgctcgttgggtttcaagagaacttttaggcgagatccatcagtagtcgtacgagtagcacgtacataacctaatcgcaatgcactgcctaacttgcaggaccgcacctacatgttgatatatgttgaaggacatcttgatagcgatcaatcagcatgtggttgccaattgaacaccaatatctagatcacttccaaaggttcgatcaatccagctcgaatgtggcaatcttgagctcagattccactggtgtttttgcaatgctgtgagccggtgggcatcaagcccctaaaagaacagaggaagatgaacagggcctgttcacagtgcctcgctatccatccaaaaaggtaaacagcagagttagctttgacctctcctctcctaaagtggatcatcgatatctttttattaaaaaagaaattccacacaaaaaggagagaggaagtacgatatgacgtcctcgtgggcctaaagtgacgtcatagtgacgcgcagtaaaacggcatgcttttctccgtacggctcaacaacgggtttagtgaaatcgccgggtgtaatcacacgtgattaagtcgcaatccagtattccgtacgcaaaactgcttgcagaacagacctgccaactttactagaaggggatggattgccgttcgctaacgactccgatcctgatcgctggaaacatgagctaattttgacatattcataattcatgtctcgctcgaactaattttggtctcgaactgtcacgtgattgatttgcaaagtagtaaaggagacgtaatgaaaagttaaatgcaccaactggttggtcacaacgagaggaaatttgagcggaatttaattttattactctgttcctgttacaaacacaatcgaatctcactgattcagtcccgtcagtatcgaacgggtgaaaaatttcatttttaccactgccaagatgtacgtgcaggtaactgccctgcctaatggaggattcgatcgcttctgcttcattgcgcgggacatggttgacgccatccgcggcgacggcgaactgctccatctctgggtcagacagttctgcccagacgaagtagtccgcgtcgctggccggcggcgtgacggcggcgaaggagacctcgtcgtgcacctcgatccatccttcgtcggagtcccagtccggcaaggccgaggcggcgcacgccaatgcaccgatcctctccgccgcgccggttggcatctcgtcgtcctcgtcgtcggtgtctgagtcccagaacgcgtcatgcagcgtgctcttgggggatgcacgttcttgcttcgccggctccggccagcggtcgagggccgcggcggaggcaacgaatgggtgttccaggagctgcgccgccgttgacctgtcggacgcgttcctctcgaagcagccatccaggaagtccttggcctccgctgacagccacccgggaacctccggcacggcgttcgtgtacccgatccggtggactgcggcaaggatgtcgtccatgtcgctccacggcgcgcggccggtggccatctcgatgatggtgcagccgagggcccagacatcggccgccggcccctgctcctccccgcgcgccacctccggcgccatgaacgccggcgtgccgccgatcggccccgccgagtccatgaccctcgcgcacccgaagtccgtgagcctcgcccggccgtcgctcccgatcacgacgttcctcgccttgacgtcgccgtgcaccagcgaattcccgtggaggtacgccagccccctcgccacgtcagcggcgtacgcccggatggccggctccgggaggcagcccccgttcctggcggcctcgtcggcgagcgacccgccgggcgcgaactcgaggaacagctggtactcgccgcccgcggcggcgcgcgatccgaggcaggggacgatgtgcggcgagcagagcccggacaggacacgcccctctcgccgcagctgcgccgcggcgccgccggcggaggccgacttgacggccatgagctcccctgagtcgtcgtcggacgcgagccacaccacggcgccggacgccccgcggcccagcgtgcgcacccgcctgagctgcttagccattgcctcgatttcttggtccttggaattcttctctctttgtttcttctttttttcttgccttgtgcgtatggagtcagtgtgtggcgtgcggtgaggagggggagaggtgtatttgtatggcccagcggagcgtgtgcaacacgtgcggaaacggctttgtgctgcgagaggagagagaaaaatagcttaggcagcgtgcgtttttggtagcctcccgcaccgcaccaccatatgccccacgcacccacactctccctcccctgcatctgcatgtctgcaaaggaaggtggaacgaagttgtagctccggttgtggtcgtgcgttttttggccttttttcgccggcgttttgtcctgcgattctccgtttgacggatcggcgtcactgccgccggccaggtgcatcggcacctgtggcccgggggcctgtgtgggtatccagccgatacgcgcagccgcacatgccctttatcgcgtgacacttgtccccgcacgtggtctgcgatctgctcgggcaaccggtaagagcaaatttaagccatcaaccagctacaattcatttataaccaatttaataactaatttataaatagttacatataaatatatagcaatggttagagacgggatgccgtccccaacaggatgctcctcctccacaacgcgattctcacccacgcgacgcggccgaaaccctaaacacgcaccaagcctcctttgcagcgccgcgtccaccccccgccgctgccgtcgcgcctgcgctgcccatccttcaccctcaacgtgcaccaggcctcctctgcggcgccgtcggctcgggcttggcctaccgtgagggcagaggtcccggcatttgtggagttactcgcaggtggagctccgagccgccacaggcaggttcgctgcggcgaacatcatgtcagagtgcggcgagaaggcgcccaaccttgtctacaggggacggtgcaggaggccagccgcgccgtcgggatgctcctcccctaataggatatctagtagaaatcacctgatacctggtaggtatcattcgatacctcgcaaatatcatgcgattcatggtagaaatcgtttgatacctgataggtatcacatgatacctcgcgagtatcaagcgatacgtggtagaaattgtctgatacctaacaggtatcacatgatacctcgcgagtatcacacgatacgtggtagaaatcgcatgatacctgataagtatcacctgaaacatgtgtagaatcgtctgatacctgataggtatcacacctgatacctactcggtatcatcccaatcgaaaacaagatctcgttatatagcagctaaatagttacacatagatatatactacactattaatatgtggtctcatatcttatactcacacaacgttttacaatccgtgttactgctgactataaatctgtagtctgttttacttctctcttctcttatcatctccatatatacttataattgatttgcagcctgctattggacttgctctaatctcgacgtctccttttgcctcgccaacggataaggcctgcaaaaaatgattgaatcatcgtgttaccatctctctctttgctactgtttgttcgttctttcctctcatcgctcctgctagcctttatgggtgatgtccagtctaaggtactcccttcggtctgataatattagttgttttggacaatgataaagtcaaattttaaaatctttgactacaaataatttctaaaatatttatcttaaaaatatgaaaaccatatgtttagattagtcttaaaaagtactccaataaaatcatatatttattaatatttttatatatattataatagaaaatagttgttaaagttattttttgaagactgtgtctttgttcaaaatgacaagtattatcaacccggagagagtagtacatttcaacacctgaaaccgaacatataaaataaaatgaccgttttggggggataagtctggctgatctctcaacgtccttgtgcttggggtttggccggatgatcagtttagacctcttgcatctggcgtaacacttttggctggcacatgtgctgtatgatagctgtctgtcatctttgatgtgtgctctggtcgatttaagcctgaaagctcttccatcgaacccctaaacttggttttgcgaattttgtgtccctttcgccctaatgagagtacgagcaacaaggagcaatgctattccatatttccagggcgtcatccacattagatgattcaggtgatcgacacgtgtgatactctatctgtacagtttgtgctgtaccaagagccagtgtatttactgttgggttacccagactcccagagctgtaccgctgcccactttttcatgctggttattgtcttctttttcgcatgcaccccctctgtattaaaaaaaatatcttagttatctaaaaatattattttggcttaaaattttgtcaaaaaaaactgtctttttaaagttgagggtctactgacgtctttaatatgctcctctgtagtacttgatttctttttcttatcttacctatttttttagaacattatcttacatattgaaccaatagtaccacttcttcctctgtcatatccatgttataagttatatgccaaatccgttatattttagaaccgttggattatttgtttattaccctctctttgcaggctacactaaattaattacacatgcatatgcgtattttacagttgagaaagatagtggcacatgtcaccttcaattcactagtgctctcagcctctcctcaccttgccaatcattcatgcttttggggaaggcttccatctcgattttaatatcagtaaccgactgtttgcgcttgcggttattagctcaaacaaaaacttgactactccaggtttccaataccaaccatttcttgcaacgaagattcctttggatcttctttctcaacttgagatctttttatgcgtgtgcttataaactttgcctctgctcaacaactacaatagccgacggcgcccaaagacttcctccggaagatgaacctcgccctgtatacggtcgacttgaacgtggaaattctatgttgtggtattactagatttatgcatattcgacatctatgtgcaattttaaaatctgactcgatcacatctttaattttaaaactacaaactactatgtttgaacaatgtttttccattcacttgttgaaactactaacttttgttccttaaaaaaaactaaaacatgtctttcagtatgtgcttgacatttttgtgcgtataataaaattctttttttctttttatttttttggttgcaaaacaatctatttggttgttttttgtcattacaaggtaaattgtagattgggggggggggggggggttattaaaccattttcattattaagaaaatctagatgtgattattaggagattatttacggagttgggagttgagacaatttagaacatgaccaacataatccctaaatgaaacccaattcgaggtttaaaacatgctccaacaattaccctagatatatatccaaaaattggaatcccattatcctccagtcctcctttctcgctctccacaagtcaggagatactctcactcccaattttcccacggcaaaaggagagggcgacacgtggagagatcgcgcgcgtgggaggggatgggcagagcaattttttgtttatgtatatgttggtagttaggggtgggtggtggatctagtttttattattgggagttaatttaagatatctgttggaaataaaaatatatttacaccttaaaatcaaattaggaattccaaaaatagaattttagagagagtttttttgggtgtctgttaaatgatccccaaatgtaataactagctagatttcatagcacaacataaaacaccagctgcaaatggccggttctaagcttggccatcaatagcccgaaacgaaccccaatcctattttttttacttctgtagaaagaaaattcatccaacatatattatatactaaaagtccattaaacaccttagagacgcccttacatcgtcatgtggcactggtacaaatacttctaagacgtcacgggtgctctaataaattggagaagattttagaaattctatactaacaaataataagtacactcatatttaaagaaaaaaatgtacctatactaacaaaatttgatagtttgagtggtactatttacgtagtacaaatttgtgtctctactaaatcacatatagactcaaaacttccacgtagtgataccactgcatattctcaattcttgatcttccatatcttccctatgtctctcagactcttctctttgtccgtccccaatggtccccattgacgcatgtacaacacaacttggatagcttacgtaggtatcgcaggtgtgtgaatagtcgggctgaggtgagcccaatgggaggcctgcggtagcggcaaagccaattggacattttacaatgcagtcctctagggtgggactacaagaaactatgcgctagatgtgaagaattatgtcaaaatctcacttaggcaagccaatacaacgaatcagattgatgtgtctttttggagattgaattggtgtataaataaaaatctcgggaagtctgttgatagcgaagctagcatgtgtaggtttcaagggcaactgccatatcgatggtggatcagcttggacttcatatcatcggagaagattgaagcgagccaatgtgaagggcctgatgggtgtgtttacgaggaacttgagtgagcacatgagtatatctcaaggagtgtgtcaatgctcaaactagggcttcaccgcacgagagaagaaagatttggcaattgcagtctacttcactgggtgcaggatcatgtcggcattatccggttaagtggtagaaccatagaagtggtatttttacaatacatttacaataatattcaactataatgttaaagaccgtgaaaaaaagttaatatgtgctatattttgaggagggagcagtactggcagtgatttatgtttgaatccatgtgcatttttgttgtttggaagattgaaatccttcctcttttttctatgcttgtagaaaggcaatttctaaactttgtcattcagaagattcaactcctttctctttttttcccgatgcttatagcaaggtaatttgtaataaaagttcatgagctattttagttttacagtgttgttcttatagaaaaataaataagtgtcgtgtgcatttgcacgggtttgcttactagttgcccttatactggacttcttgttatctattttttgtgggaatgtgcttgctaccaattcttaatagcacggaaggaggggtgcgagatcacgagagaggagtcgcgaaaacacaggaggaggggagagatttgaggtggccctattttttagggtgttaagtttaggatatcttttgcaaagaagtagtatatattttatagtccataaattctgattaaagattccaaaagaaatttagtggatattattttaggccgaatgaccatgctctaaacttctaaagttttggtggaaagatgtcaactcggttaaaaattgctcattctagtcaaaacagtgagaatcagccttaaaccaattctttgaacggtttttgccggggcctttttttttaaaacggaagtttttaccgggagctcaacgctatgcaatctatgagcccttgattgcaagatgaatggtaacaacaggcaaatttgtgcagactcgaaatttattactctgttcccgttacaatgacaaccgaattttacagtgtcgctccggtggcaatcaaccgggcacaacggcatatcaccgcgaactctcacactcagttgtctgtcgtactcaatgaaaccacgcgcgcgtacagttcgcgtaacatagccatcgccgtccacgtcaacgaaatggagatcaatctccgcgtccaatgcttcctcccaccaaagaccgaaatctgcagtagtcaccaccatgggcgccggtgtttccgaaacttcagatgggtcgctttgcaagtcgatccagccatcctcggagtcccagtccggcaacgccgagcaggtgatcgccaatgcgctgatcctcttggttgcgctctgtgacatgccttcttctacttcgtcgtcttcatcagattcccagcattcggcgttcagcgtgctcttgggggacacccagccgtgcttcggcgccgtttcgtcgatgtcgctggaggcggatgcgagaaatgggtgctccagtagctgcgcggcagtggggcggtcgcttgggttccttgtgaagcatctggataggaaattcttcgcctccggggagagccattcgggaatctctggcacagcgtccgtgtacccgatccggtggacggcggagaagacgtcgtccatgtcgctccacgggacgcggcctgtggccatctcgatgatcgtgcaaccgagagcccacacgtcggcggccggtccctgctcctcgcctcgcgccacctccggcgccatgaacgccggcgtgccaccaatcggccgctcggagtcagtcctcctcgcgcacccgaagtccgcgagcttggcccgcccgtcggcgccgaccatgatgttcctggccttgacgtccccgtgcaccagcgagttcccgtggaggtaggccagcgccctcgccacgtccgccgcgtacgcgctgatggcgcgctccgcgaggcggcccccgctccttgcggcctcgccggcgagcgacccgccaggcgcgaactcgaggaacagctggtactccccgcccgccgcggcgcgtggggctgcagg

SEQ ID NO: 7146 - DNA, 77884 bp, Oryza sativa
  unsure (1)..(77884): unsure at all n locations
caattagtccagcaggttctgaatttccagggactcttccagaagacatgtacgggcacaacgcatagagctagaataggagaaaaacagtgttgtcaaccaaaaagatcccgaaaaagaagaaattaaaaaataaagggaaattattagctatttgagaaggataaaacgtaggttcaccaacaaaactacaataagcaccaacacttaccagaagctaaagcttccaaacgaggatccagaacaggaggataatttacatttatcgaatggtaaagcttgaagtttataaatcccagaagtgtctgcaggtagtatagaacagtcaaaaaattgaaagaaccattgtaccaaacactgttgagatcggcattttttttatatatactaagtgatcaatcttgaaaagttattgctaggtatcgtaacattatatctgaacattttcagcatgatcataggtctgtcaggtgtacatggttatagccagactgcaacataatttatttacaatagtcatatcttccatgcaacagaatattaaatattaaacagagattccaaaacaaaacaagcatatatggcttcagacctacaattgaaacaatagcagcaatcatagaagattgtagcctgcaaattcttgcaagacagaaccccccagaacccagaatggtgcacttaaagaaatgggcttgcatttacccccatgatatttccttttattttaccgcgtgccatcgcattttattgtggatcaaattttcgtaacagttccagtactatttggatagaagtggtgctatattggtgaataaagcaggaaatacatagtaattaggaaattaggacagatcatcgtcattgtcacctcatagaattccaaaaaggtaagcatcacattgaagtcaacgtcatcagttaaaacttgctgaagacatgtggagttagccaggtgatcttttgaccttgaacttcagcctgcaaaaagtagttatattatataaatatatatactatagcatgcacagttacagtgattttaaaggcaaggactgcaagtagacataactacacaagcttacttgataatatatgcccttgacggatataaatgtctttcgcagggaatgagttcgagatatatatgcttgccattcatggctcaacctacaaagtacaaacatgtcccccaaattaataaaaggtattagcaacgccaaacaaagtcaggtacagcaattcattatagcagcaataaagatggggcaaatgtcatagacttgtagcatgatgaacaaatgaactaggaaactacaagagccccttggctgggagtgttgtgtgtgaatttgagggaggggattcatttacaacagagcatacctgcggcaattatgaatccgctgaacttgcacacgttcaccttcaacagcaggcaacgcagcaaaaagatgcaccattgttaggcaatcatccaagtcacgaagagcatcaacaaaagttggatatctgtaaagcaaaaatatggggatgatttatagaaacaaatacggtatggatgtcatcagcaaatcactttaaacctggtacctttcaagaataagcctgtcaagtttgtaagttggtggtcggttcaataatctgtctgcaagatctttatttttcttagcaaacgcctttttgaccttcttcctgtggaccttgatttctctgaagtcaaacaacaatgaaatgtcattaagagtggagacatcacaaaccaagaatagcatggtcttataactcacactttttaatgcaaagacaacatgcaccacactgtatcaactaaagttctaatgaaactctagattatatataaagcatgaattatgattcccttgtcaacgatcaagtaattgtgagcaactagtctatctgccattctgccaaccatcaaaatatcattgatgaagcaccgaggagaataattcacatggcctagctaatggctctctgaaaacctacattataattatttcctcaattgtattcagtaataaaatacaagtttctatcttgcttgccattttctccgctgcataaactgtgacagaaacaaattgcacaattgcagcaaacaaatcaaataacaagaacacaacacaaaccgatcactagcacaattaagatattttcatattgcctatctcagtggcctaataacaaataagaaaattgaaagcattgttatctcattaaaaattaaatatgtctgcagctaaattttgtgatagtgatacattatatgcccttaattgcacagagaaatgtgcaatcaaccaaaaaggcatgcaattcaaatgctcagtgagtgaatactgaatacttctgtagccgccaaaaaaaaacacagatggtagaccttttgcaagaaaacttaagtacctaaacttctcaatcaagggatcatgggccaggaaggcaatatccttcatgtggtagtaggtcttgtggttcccttccaccttcttctttggatcccggggaaagacgcccttgagaatgcatagcttcctgcaacggattgcaaaattttaagcagtcagaaaaaaaaaatcctacatcgcttgcagtataaaagctatacgtaacgcagagaatagtgaaggtaatcctaatggccaataggcgtatcgaacaaattaattagcttaatggagtgtacagcttaaagcttcagcgtaaaatgtgtaaaatttcccagacagctttgttagctccaacaaaaccaataaaaatagccacaactacactcgttaatagctccaaaatgacccaacatatcattagtcagtactcagtagtagcagctgggagattagaggatgacctgaaggttgcgaggctaatctgcaggtacttcaccgccttggtcctggtgatgtacttcgccgcgttcccctccttcttcttgccctagagcatccacgaaagcagcggtgagaggctccgcgtacaacaaggagaggggtattcggggggaggaggcgggaggaagacggggtgaattaccgcaggccggtagtgcttcggcatggcggcggcggcggcggcggcgtggctcctcggggaaggggagcgggggaaaggagaggccgaagaggggaggtgggtttttagggttttggtttatattgcggcggatggctttggggccttgggttgggctgaaaggctggaacccggcgcggcgctcactgagaagaggtgaagactggagacttgggaggtgggagccggcctgtcagcgtctgcttaacgcttagtacatattcttctcgtaaaaggggattgttcagtcgattttagagagagatgtactccctccgtctctataaaaaaacagacacgctaaaaaagttacgacagtttttcccttaaaaatatatcggtttgtggtgcattgaattgacgttaagattagtgctaaaataatagtatgctaaggccgggagttcagcatagcaaacatcttttcttgaaaaaaaaagagacacttctcatatatttatacaaatttacatagtagttacatcccacttacacaccacttacatatataattttagaatttacatatgtaattttaggacttacatatgtaattttgagacttacattgtaaatacactaaaatttcatatgcaattttagggacttataatgtaaacacataccgactattttttcatgaaaaatatggcgccataaatatagctactctcaaaaaaaaaaacctataactatatgtaacatcctacctccgtcccaaaatgtaagcatatagaatctggacacatatgtgtccagattgctatattttggggcggatggagtattctagtatgaatatatgcatacctttgtctatattcattgtactggaatatggcagatctaattctaagtttatttttgtgggacaaagatagtaagagtttgtatcactattttgcaggtaacgtggagtagattttcggtcattcagaagtacattttctctaagcttgtagatttcggtcatctaactcttttataccatgaaggtgacgtgatataccaacaagatcagtgtactttaataccatatcgccgttttcttgaatttgcccttgaagtaatccttacatgagctttttaaaaccatatatgcatatttttgtctatctcgaaccgctagtaacaactagaaaccaaattacgataatatagtcactgctttaaccagttgctacttgtttgttgcaacgaatgaaccagtcacattatgcgggcaactctgtaacgagcaactaacaaccccataagaaacaaacacaaacacctccttgttcgagtaatagactgctttgttatctccgaaattacgtgagaaaaagaacctcggatttattctatgttatagtttttttactcggagttatcaagctccgaccagtaatatattatatacgatctagtatcaataattaacaataaaaaaccataaactgggcatattcggctgcaaggtacagcgttgccttgcagccaaaccgcggcatattctttgtttgttgtatggtgtaacagatggctagttatatagtagcactgtacttggcagccgaacaagtgttggtcgaccaacttctgttggtcaaaaccaacaagtgtttatagaccgaggagtcaccacagcaaagaatggcttacgtcaaaatacgtactctatccggatgtttttaatacatgacgtcattgacttttagttttatatttgatcatctgtcgtattcaatatatttcaaataggataaaatacaaagtcatgaatataatacacaatacatctaataacaaaataatcacaaaaaaaaaacgataacacagtttttttagaaacatggtatgaacgcagcactcacgacattcacccactcactcgtatgagcaccttctaaacgttggacgacatatattgagattaaccaagtcaccacaaacgtttttaccatcgatgataaaaaaaagcaatatatatttcaataatacgaatctcatatgtacaccaaaaaaaatggtgtcataaaaaaactgaagaaggtacatctttttacatgctatctactcaagaaggtacatctttttgacatgctatttactccctctgttttcaggtcataagtcaaactgtttcaaatttaactaaatttatagacaaaatagtaatatttactataggtgtgtttagttcacgctaaaattggaagtttggttgaaattagaacgatgtgatggaaaagttggaagtttgtgtatgtagaaaagttttgatatgatggaaaagttggaagtttaaagaaaaagtttgaaactaaacccagcctatactaaattagtttcatcaaatcaataattaaatatattttcataataaatttgtcttgtgttgaaaattttactattactttttttctacaaacttaattaactttaaagtagtttaactttttctaaagttaaaatgtcttataacctgaaacggagggagtagtacatttgtattcaaggtaatacaatacgaaggtaatattaaaaggtttgaaaatgataaagaaaagaagggggaaaaaaggtttctcttgggttggacaaggccttatcaaacccggcctgaactatactaccgcacaacacacaaaacgtcgacgactaatgacgtcatcatccgggaccccacctgccagcgagctaactaaaaatccaaggaagcaaaacgaaaccgcgcgccgccaaccttttcgcggcttcactttgtttttcttttgtcttcgtttttttcccgcggcgcgattacgaaaagagctcttcccgccggcgccaccgcccgccgaccaaaactcctccataaacccctctctccccgccattccccacctctctctcccctcccctcccctcccttcgcgcctcctcatccgcctctctctctcctccccctccgatggcgacgcggccgcggtcctccccgtcgttcttcggcggcctccgggcacgcgagctcggcggcggcagggtgccactgccacgcgcctccgcggcgcggctcccctacctcgcggacctctcctcctaccccggcggccgcgggagcggggtcatcgccgtcgagcacgccggcgaccccgccatacctttcgccatctccttctgcaaggtgagcgagcctgggatcttttgtccccccttcgttttcatgcgttttttttcccgattccgacatcgaaagggttaagatttgatgggaactgattgttcgatgaaccctcgcatttttttttcatttcaggcggagcagatctctcaccttctggcggtagctgatgaggacgggtatgttggcatctacgacacccgccggcgcctcccatccagctcatcgtcattggggaaatcaggttcgattggatcccccctctttgatctagttttcgcactgttcgattcagttcgtggatgtctggggccacgcactgggtgtcatgttcgattcgttccggtctgaaaccgtgacattctcgcagctgaaacgaagatgtccgattgggttgcccacaacaatgccatctttgatgtgtgctggatcaaggtaacacctgttactctcaatcattgaaacatgttagagttagtggtataaaagccaatcctcactcacttgtatcatcttctttttggcgttgtttatttaggacggttcccaattactgactgcatcaggcgatcagactgtaagtatcgcaataagatcatttttcagaagtagaatagaattgtttgtttgttctgcattacaattcatattaatgtgatggtggactgccttttgatcattgggattgtttgttctgtatcaggtgaaaatatggtctgtggaaaacaagaaatgccttggtgttctgtcagggcacaccgggagtgtgaagtcgctgtcatgccattcttcaaacccaggttggtgttatgttgggaaacaaaaaatcaattcttcgtatatttgtgcctgtaaaatttgccaggaacttgtattcaagaacttattcactgcagagctcattgttactggatcaagggatggttcttttgctctttgggatctaagaatcgacccaaaaacccctaatggtcaccgtgaagcttgtctcatgtatgttgccttggctgttgcaatctaaatttcccctttcaactacagtgatacagaaataacaaattactatatttataactctgtttggaatgtgacacatgctaggtcttcccttgttgtcaaacaagcacacagtcccacacaaagaaatcgaacaaggtctagagcaaaggtattgaatttgcatggatttgctattgctgggtatgatcatacatcctactgtggtcaacttgctgacgctggtaatttttaggctgcttcgacgagtatcacatctgttctttatttgaaggatgatatctccattgctacttctggggctgcagacaagtatgtcattccccattcatttcattcttatagttcaaaaggcatgatgtgttgtctgtggtattacatttgaatacgaacatgatcactttgaatacaatttacctcatttttgtgtaactctgtccaaatattaatgttccactttcaataatgtctgccagcattgtgaagatatgggatacgcgaaatatcaaattgtctctctccaacagaagctctcaagcagcaatgcaacctttggtaagcagctaacaatcactacgcaatatgtttgtagcccaatttcaagacttaccgatcatttgtgcaggagggtgtgaaacatgggatctcttgcttgtctcaagactcgtatggtgcctatattgctgcgtcatgcatggataacaggtataaccgcaatcaaccacactgcctcagacttaatatgccatttgtgaaggctgcctttgactttataagcctttcaggatctatttgtacagtgctcttcatatggataaaggcccaattaaggcttacactggcagcaaaattgaatctttttttgtcaaggtcagtgagtgaacaagctgagttgatttccatttttcaaaccgcatgcctgcttgttcttaggtagttttatctgctatgttttataacacctgatatgttggtcaaatgcagtctgctatcagccctgatggaactcacattcttggtggttcgagtgatggcaacgtgtacttatggcaggtagttgttggatcatgttatcatttcgcacacgcattagctgctcttttactttctattcatgccactactttttcactgacataggtggatcagcctgaaagaggtcctataattttggaaggccatgaaggtgaagctacttcagttgactggtatgttctacatacaattgtagtttttttttgtgtaaatcttatcaaccatccaatgttcagatttcagtacgattttttcacaattttcaggtgtgcatcagaggtcgggaagatcgcaacgtcatctgacgattccaaggtgagtatgtgattaaccttgcaaattttgttcattcaactttcatgaatcttatgagaatgagatccttttctttttctattacacacctacatgttgcaagcgaatttaaatgcctgttttggtatgtagaaaggggagctgctgatattcagtattttttttaagaaaaccactgataacaacactttatgatgtgtatctatcaggttcgcgtatggaatactgagagaagggtgttcccaaacacaagttccccaacggtcatccgcaagagaataaccgcaccaaacactggaagccggtctgctagccatgagctagctactacctcaagagatgtaggagtagcagcctgcaccagtgcagatggtgaattgccaactggttcacgctctccccttcagcccagagtactggagtttggcacaccggagtcagcgaagaagagagcctttaggttgtttcaggaggactcattggacataaggaaaagcccagaggctcaaatgaacagcccttcttcggttctaagccccccacattcactgaagaggagaacaattcgggactactttgctagtagctcatcttgtgagcacaccaagcatgtccatgaccttgcactcttggctcactcgtcaactgtgaagaacctcaaaaatgctcaatatagctacaggtgcctgaaaaaataactttaaagttttgaacatcgatttcactaaacaacaattattatctccctctgaaatgttgctacctaagatgatagtttagaactctagaatcattgtcggcggagaaagtaaattattttccccaaatttccagctatgaaaaaaccctcaccaaacaccatcaaacaagagttcaccaaaccgcccatgcggccatgctgtcacgcaacgcaccgcattgcctgatggccgctcgatgcatgcatgcttccccgtgcacatatccgacagacgcgccgtgtcagcgagctcctcgaccgacctgtgtagcccatgcaagcatccaccccctccacgtacaccccctcctcctccctacgtgtcaccgctctctccacctatatatgcccacctggcccctctcctcccatctccacttcacccgatcgcttcttcttcttcttcttcgttgcattcatcttgctagctagcttagcaatggcggatcgcgaccgcgccgggcagtactaccagcagcagagagggcaggtgggggagacggtgaaggggatcctgccggagaaggcgccgtcggcgtcgcaggcgctgacggtggcgacgctgttcccgctgggtgggctgctgctcgtgctgtccgggctggcgctggcggcgtccgtggtggggctcgccgtcgccacgccggtgttcctgatcttcagcccggtgctcgtcccggccgcgctgctcatcgggctcgccgtcgccggcttcctcacctccggcgcgctgggcctcggcgggctgtcgtcgctcaccttcctcgccaacacggcgcgccaggcgttccagcgcacgcccgactacgtcgagcaggcgcggcgcaggatggccgaggccgccgcgcacgccggccacaagacggcgcaggccggccacgccatccagggcagggccgaccaggccggcaccggcgccggcgccggcggtggcgccggcaccaagacatcctcgtaagcacgcgccgcgcgcgcgagtggctcgcgtcgcgtacgggctgggtttagcctgctgggtttcgcttcgcttcgtagtagtctcgcccccgaccgaccgagtcaagagtgtgtcccgaacgtgaccgtgcctacgtgtcgtgtgatcctaaagtctaatgttgtaccagctgctgcgtactactgctactaggtaagatcgatgtagttttcgatttagagttgtgaatgataataagcgaggtcggggggagcaagcgatctggggagtttgtgcttgatttgagttgatgatgaacatatgtatgcattccgtgttcctctgtaagaaaagaattggtgaatgaacccatgtctctttgctcaaatgtcagtacttgaatgctacattacagcctagcaatctgctgattgccgttttattatctccaaaatggcttcccagattagtacatgttctctctgaaaacagttgaacgtttttcacagcgaatgcaaacgaatctgtctaatgacatattgtaaagccattttgtttaggacacatggccgcctactcgtcacgtggacattttcaacgagtgatgtgtcttggttaggccacgtcggcctgattgtcggccgtcgtgagtgctgaccgttctaggctagctattgttgaggaagttgggctttgtcccataaaggccagcccaaaacaattaggaggttaaagaactggaataagttggtgtttgaatctcctaatctcctaatggtgtttcacgcataataagatggtaatgcgtgagaataagattggtgtttgaatctcctaaagtgtttcacgcaaaacgagatggtaataatatatgattaattgtgttttgattattaccatctaagtcatctaagttttcgcacgaaacgtaccaagttttcgcacgaaacgtaccgtttaacagtttgtgtttcacgcaaaacaagatgataataatgtatgattaattgagttttgattattaccatctaagttttcgcacgaaacgtaccgtttagcagtttgttttcgcacagaacgtaccgtatacaatttgaaatacgtactatttttatccaaaaatttattcaacttttgtttagaaaaaagaaaagaacagggcctcatcttacttgaatagttataggaggttaaagaacttgaatacgaacctgtctccttcgttttactttctcctcctttatatattgtgtcttcattctattttatacatcgtgtcttcgttttaccctgttctctttatatattgtgtcttcatttttctctatacctacataacctttcgaactactatacatagtagagggttatctttcactctgctctcttatatattgtgtcttcattttactctatactcacgtaatcttctgaactactatacatagtagaggggttatcttcagtctctattttactgtcaccatatcttgtgtctccatttcactctgttctcctcatatcttgtatctttatttttctacttatgtgttacgtaatatctataactttatcaaaagttatcaaggtgtacactagcaactatcttttttaggatgtacatgtcaataaaataataattttataactaataatgggaaaaactttccatttatacccgaatgaccgcgatgcacctaggctagccagagttgttggtggttcaagcagctacgaataccctagtggtaaccatatatcttcaatccaattcgcccgaaaaatgacggttgagaaggcgaagtagtatactgtagtatatattctcggtctaattcatatttttctttaagataatagaatatctcacattttcattaaacaataaaaatgaaatatccggcctctgcaataaggatacacacaaaccataaagaaaacaatcataaaaagggaaataaatagacatcgtgaatataccatgttgtgctcccgcattttgcacagctagaatattgacatgtacgctagctgaacttgattagtcgctaccaagtaccaattgacacggtatttaactatattgattatactccacagtattgaactctattgctataggcgaaatgtcttccacttcttttgcctggtaaagtgaggtgctctttataaaaacatctcagcaataaactagtatgtctacatgggtatatatagctctctaattcattgtctcgtttttctctatagactatctctagattaatagataattttgctctctctcttcatttaatctttttcaagtagaaaaatatgttgacataaaactcttataaagagtttttaaataactattggggtgccctaacgttgttcaagccctcgggccggcggccggcacatactaccaagcagggtctgctggccctttggtcgatccgacattggaattcgttattgtaccattattagaaaaagaactaccattggaatgtaattgttgtaattttttttaaaaaagtaacaaatttataaatgcccctttaatcaacagaggtatccagctaataagcttctcgtatgttccgaacggccacattacagttgctctagcggcaagtggatgacaggcaattaaagaaaaaaaaaagatcttcagatgtcgatgtgagaatcacattctcttttctcatccgccacccagttccccgtctgtttggcaaaatcaggcaactagagagtcctcctctccctggtatatgcacgcgcccgcgttcgtgccgacgcgtgtgaaacggccgaggtcgtgacagcagcggcgcgtgttgttttttcaagtgacggaaaaactgacgatgtcccgcgccaccggccaccgcgcaaagagcgggcgagggccccacaccaaaaattccatcacaccaaatatacacatacatgagacattaaatatggataaaaaaccaatggataaaaaaccaattatacagtttgcatgtaaattacgagacgaatcttttaaacctaattacgccataatttgataatatagtgctacaataaacatatgctaataacggattaattagacttaatatattcgtcttttaatatattcatctcacagtttatagtttatagacagaatatataatttattttattattagtctatttaatactttaaatgtattttcatatatgttaaaatattttttttccaaacaactaaacacggccacacacaccccctccaacacgggccccaccaacttggggccccacgatccagtggctgacacgcggggtcgtgggccacgtcaattcgaagtagagaaagcaaaaaaagaaaaaaaaaagggaaagcgaaacgaacgaaagcccaacagatccatcgaccgaggagaaggcgagagcgagccgagccgagagcgcaacaaaaggaaagcagggaaacctcgccgtcctctctctccatccatgccctagcacgcgccgcgcagcctacgagcgggagccacacctcgaggtaaccaccaccaccatcgccaccctcctcctcctcctcctcctcttctcccctcgatcccgtccgatcaaaaccctagcaccctccgcgcggcgctggcggcggcggcggccgatccgtacggttgcggcgcccgcgtcggtgggagggcgatctgaattctgggtcggcgagtcgggcggtttttgcgtgtgtggtgtgttgtgttggtagggaggggatcgtccggtgccgtgatcgttgggtttgctcgttccgctgtggggagggcgtcttttggtttgaccatcggcggcgcggggcggggtgcgtgtacagatctgttcggaagtgcgtgggaggtggggggattgggaatcgcggccggattttgctggtattttggaggagttgtgatgggatctgtatgtgcgggcagattcagttgtaaaggctgccgttgagtttcatttcataggttgttttttttttccttttgtggggattgttaggtgttattccaagccgttaagtgatctgtttgtgctttttgggtttggggttggtcattggcgatgttgacttgggttaggcctctgaaagagcgcggttatattgttgcgatacattatgaactattatgctgttgcgatacaggatgaaccacgtttctattgttagacgaattgtcccgatgaacccctgttcatctctaaatggctgccatgtctttaatacactgaaaatgccttcagaagctttgaacacagcttagatttactactactggtgttgcctgacatatcatttttacaggtcttcatctgttgcactcatgatttagcaccagctgaagtgacctctgagactgcgcggtgacgtagcctgttgctaggataaaaatctcagtagttaagcatggcggattctatggtgtcaagtttctgggggcctgttacttcaacaactgagctctgcgaggaaaattatgcacactcgtcatatattgcagaattctacaatactgtttctaatgttccatgtgttcttctggcacttgttggacttgtgaatgctcttcgccaaggttttgagaaacgattcagtgtcctgcacatatccaatatgatacttgctatcggcagtatgatcttccatgccaccttacagcacgtgtaagtttttctccccctaaactcatcagtattgatattgcaataacatcactgaccttcaatgctattaatggtgctgctctccaagaatactattttttctcttatgtgcttcaatatgatggaacaatatgttacatttgtgtgttaacatgcaagccatttgatgaaaacaccatgacctttttttgttattttctatggttttgcacataaacattatggttaactttggtgctatatgtttcctataaaaaaatattcatttgcatagggcccttttttccctacttctagtcgttttgtatagagaacttaacaaaaatgagtgatgtccttttcttgtaagaacaaatttggcatcaagttatggggatcagataactcttgatttgcccctttaccaagggcatattcttttgtaccctttgttattttttttgtctacagtgggcatttgttaacttctcaaaggatttagctcttgttcaatgaccattagcaactaagtgaacagattaagatttttgggctaactaattccgcagaggctaatggctgattaatcaccacataatatatgcattctgattaataacctatgtaaacttgtacacttccagattagaaagttaaaaacatgaggtctattggccactataatattattgaaattggcaacaccttgtttattattcgacacttttgaagctgtgcacttgaacaccgaacttgtaacactaacatgtttcacattattaacgttatatgaaaattaattcattactctataaaaaaggaatacttctataatatgaaaaaaatatttatatccaccagggtcatatctgggattgtgaaaggtcaaatgcttaactaaaagtgaatggatcagcagagggagtacgtattaataacttaatgtattgtgtttttcataaatattacttaggaggcttgcttttcctttagataacaagtcaatgtggtgctccttgagccagtaaatatggaatctgtttcatgtttagaagaaagagtaagactgtggattgcactctgctagtaagaatcctatgatataaatttatccttttgatttacagcataagcataccctagttactgttgcttaaaaatttgaacggttagtactcaacgactcactgcacaaattgtgccacaaattgtccagttattgcacatgataacagttagcttccaatgcctcatgcttctatgtgtcagtgtatcttaaagtagcattgttctgtaatacgactgcggactgccacattttggttctttgacatattgaataccatgaaatccacttgatattttgcaactgtttgttatgcaaatcttttgcagaagtaattcccacagttctgttttagttatctgtggcgatccagtttatatgccttagtgtcaaataaagcacattccttttagttgccattttgcagattagaggattgcgggctgtaaatcatctcccaataaattaggtcagccatttattgatgtgctgccaattgcatcacattgttagcttgctcaaaagctatagcctattttataccagcaacatgtagcccttttgactaattgggggcagctagtattcatcttctaattccagcatgtttccttagtatgcacaatatgcagtgctaattcttttggtcatgtattgttttccagtttacagcagagcgatgagactccaatggtgtgggagattctcctatatctttatgtactttattcaccagactggcattaccggagcactatgcctactttccttttcctatacggtgctgcttttgcagtagtccatttcctggtgcgattccaagtggtattcaagttgcattacgttggcctctgtctcctatgcatcccacggatgtacaagtactacatacaaactaaagacatggctgccaagcgtctagcaaagctgtgggttcttacgttgagcttggcgactctttgctggctatttgatcgaatgttctgtaagaagctttcacattggtacgtcaacccacaagggcacgcatggtggcatattctcatgggatttaactcatactttgcaaacacattcttaatgttttgccgagctcaacagcgtgggtgggagcccaaaattacccaccttttcgggttcttgccttatgtcaagattcagaaaccccaaaagagggaatgagttctctatttgtcagtgctgttctccaggaccttaaagccaacgccctcatgtgcttagacaagaagcagaggcattttttttgtatatgggcttccaagtgattacggactacagtgttatgatgcctcactagattttgttaacttttaactaacgcctgttttgtaccatacttaattgttgctcagagattagttggagtgttgtctcatagttttggtcattattttttgtttctctacatttgattttccgttctaataggactgaattttatttgttttttgtttgtcttgaatgttgtcgaacagttttagtcaagttactgcttcatatggccatagattgatcttctgatggttcaattaattctttttctgctgttgtgatttttgctcgacttgaaagctatgattatgtacaattcgatttatgtacgttcatttaacagcaactatacgtgcttcttgcagaagcactgttatccgtttctggtggtaatcaatatttaccattacttccaatttaacattggtctgcctcgagatgggtgttgatactcgtgtggtagcccatgctatagggtttttgtgatgttgggcaggtatggggttcttttgtggcgctggtaatctgaatgggcatccatactacgactgacgaaaaattaagaaatgcgacatatggtgatatgtagaatgcgcgctggtaatctgaatgggcatccatactacgactgacgaaaaattaagaaatgcgacagtaccgttatgctgattgtttccttgcattttattagggtgtggctaatgggcgatcgatccccacgccccctatacacacctctccttccttactcctcccctttttctcttcctactacactataaattaaaaaaaaataaaaaaataaagttggaaaaaattatgtatagatatactatatataaaaaatatttgaattcaaatttaaatttgaatcgggtataaaaacttttggcttataaactttgggtgaataaactttgggtgtataaactttagatgtatagaaatactatatatataaaatatttgaattcaaattcaaatttgaatcagatataattcaaatttgaatcgggcatgtaaacttttgagttataaactttaggtctataaactttaggtgtataaactttagatgcataaaaatattatatatagaaaatatttgaattcaaattcaaatttgaaacgggtatgtaaacttttgacttataaactttaggtgtataaactttagatgtatagaaatactatatataaaaagatttgaattcaaatttaaatttgaatgtatagaaatactatatataaaaaaatttgaatttaaattcaaatttgaatcgggtatataaacttttgacgtataaactttgggtctctaaactttagatgtataaatttgaggtgtataaactttaggtacataaatttactaaataggaaagtaatgcgatgctaaaaaaaggaaaccaggtggagggagggggagacccgatccgatcgcccctggcggcccctggcgatcaatcgcccaataggagtttcgattttattatggatcgtttagctgaccacatggagatcatcagaaacttcgtgcagtatatttgtaggttgagcttatttaaagctagcactagtatttatatggacgtgactagacagctagtggtagctggtttgtctaaatcagctaccactccatatataagagaccctatccacctatacttcaaataaaattttctcttaaactacttatccaatctacgatccgattacaccattgtgttcgtaacaattaaatctttataacaagatctcacatgattatattttgatgaaaaattataaattacttttataatatatctaaattacttttagatttcactgaattacttcttcgacatataaaagtaaattcaataaagcttaaaagtaatttatatatattatagaagtaacttataacaaaaggaaagtaactttaatttatgccttttttttcattggacgtgactacacaactagtggtagctggtttatactccatctagtgtttcctttcaacttgaaaaatgcaatagtatgtttccgttttgttttaagatacttttataatatatgtaaattacttttagactttattgaatttacttttatatgtctaagaagtaacttagtcaaatctaaaagtaacttatatatattataaaagtaacttatgtatatatcaaaaataatttacaaatataaatattttttcatcgtaatataatcatgtaagatcttgttgtgaaaatttaattgtaacaaacacaatggtgtaattggattgtagatcggataagtaatttgagagaaaaaaatataagaaggaagaaaaagacatgcatgtctaagaggaaaaacaagcatgcacgtcagcacgtgtagcagtccttctggttaacgctaaaccgagaagcttctcggtttagatttttcctatttatatatattgttcttacaaaaaaaaatacactaaatttgccatcaatcctacgtgttctgaacttctatgaggggaaaaaaaagagagcagacatggaaactaaaatatcctatctttcgaaaatcgaagtccataccatttcctaaattaatgactttatagaaaccatgtttctgttagaaggatgtattaaagaatacaaggaatcatgccactgatacgcgtccacaaaatactggtaagaattcgaatcaagatctgtgggataaacaaggataagattccaatctcacagcagcaccgcctaatattcgccgcatcatccaatctcacgctcacaattgtcaaaatactcaaatagaaatagaaatgctcaacaactgaacaccaccatgtacatccactaggccactaacactaactagattgtggtgcgacgtcacgcgcgtgcgcaggttaagccacctgccacctaccttagcacaccatgcagcctagtttctgctgagtggctgctgactttgctgagtgctgagcagacagcagctgccactaaccatttgcctcagtattcatctcaagaacacatttatcaaaagcacaggtggaaacaattctgatgagcgagatttgcgattgcaaaacaatagcaatgtaagttcaatgacaatattacattattacaaatccaaggattatacaggcctcaagatctgaccaaaacaaggccatagtatgatcctcgacaaatggtgaaagggagaaaaagaatactttgggacttgatataccactatagcatgcctggtaaccaaccttatacccatcagtacatcaagtatcaatatcataataaacaaaataaacaccgctaaggtaaagaaaagaattccgaaacaccaaacgagtcttcttttttaacggggttaattaacaaaacagggaaatatttttgaccgatgaattgaagctgccggggtgcgattctacctgggtcggtcttgaaacgaccccaatcaaggtacttcaatctttcaacctactggaacctcaataatgtatatgatttacctcaataaagtaaagaaaaccaatctctgaatcaccaccatcagctatccatccttttgcttgctgaccatcttaatgaacaggaaaaaaattactccaaattcattaactaagaataataactccttgcactttccaggctcattcagcgcttatgttgctagactaccaatatgctgatcaagctgcatctgttcaagcaatgctccaataacagcagcttggtcatgcccatccagcggggcattcagactaggaccttcaccgttgcttacactgggaggcatcagtggtgaaggtccaacagagtttatggattcagcagtagtgacttgcttctctggtggagattccttaaccagtgtgtgtacccaagagagatctggatcatcaccaccagatctcagctcaaacgatgatgaccggcgaagcttgcccaattcttcaccattaacaccccagtcaggtgtccctgaaggtgatccccactttgaccatgatgagcttagaggggagccaacaacacctgatgctcttgcagcactcggcccaagatcacgagaactgagacttctcattgtctgctgttgcttctcacgctgagcaagagcagcagcaagatgagagttcataggggacccagattcaacacatcgaggagacatgcggccaggggaggatataccaagtgatgcttgcaacagagatgagtgtgaaggcaactgctggttgtccacagacttcggggagaagactgtgttgattggtgaaagaagtgcctgctgctgttgctggaactgattaaggaaagcagccttgtgagatggtgaaaacataccaccctgatcagcattactatacctcggggaagagaccatctcagcagagaagagatcatccaagtttgacggatttagggacttggtccgagacgtgtggtttcctgttgatgaaccaatacgtgaatagcacaaatcatttataagctgtgaatcaatatcctgcatcagggagtaatcatcagcaggcatatcccttgcactaagtgaggtacggagccggctcgactgaaggctgctgcctggaaggtgtagtgtcggaacatttggctgctgccagcccaatgaagggggcatcccattgcctgaaggggacattggtggtgtaaatggggacatgactgctgaaactgatgatggagaaccaggcatcaagcccattgctgcagccatctccattgtagctgttgccgaggctcttggggatggtactgcagatccagtggaaacatatagtggtcggagctcatcagttgtatgcgcaaagaaacagacacggcgattacagcttgtgccatccttgcaaaggcgagtacggtactgtgctggatggagccaacactcgaacacgccatgagcatattcacacatgtcaccacgccggcaaactccctttctaaagtcggggcatggcacacagctgtagtgatacttgcgagggtcccgacgccgtgcgttctcccctgggtgaacaaacgggcactcagtccaatcatgtgagtacgcccgcgagcatggcctgatcttaaatgagtacatgcggaactcatcggaagcatagatgctgttcttgatatcgggaagggacggatccactggatattctttcttttccgatgtcacaacccttggaagatctgcaaactttgtcgtcatcatcacagcagctgatggagatcgtgcatcttctgctgtaggggatgatacaggtgacaacatagagtttgcggcccttgtcaccacccggagaacgccatgcccagcctttgggcatccaagaagatcttggagggcaatcttggcgtcaaacatctttggaggaacagagatcacatcagctggacgatatccggaagcatccgtggcatcagcatcagccccagcagcaagcagcagcttgacggcctccacacaagacggcgagccaccagacgccgcacagtggagggcggtggtgccgtcggagccacagcggcgattgacatcgacggacgggagggacagcagcaggcgaagcaccgcgaggctgccataggtggccgcgaccatcagcggcgtgcggtgctcgaggaccttgcggcggccgtaccagaggcccgcctcgtccgcggcggcgggcggggcgcgctccagcgcgcggcgcaggccctccgcgtcgtcgtccgcggcgagctcgaggagccccgcgaaggcgtcgtccgtgtcgacggtgagggttttcgccatctcggcgacggcggccgccgcggcggcactcttcttggtcgcggccgccagcgccaccgccgcgccgactccgtcgacgccggccgcggcggacgcggagatcggcgtgccgttcatcggggcttgtcggatcggaagaactgaagccatcagcaaaaacatcagtcaagaaaccagtcaagggagtccaaaaacagcacaagaaatggactagaaaccaaccgaatcggatgcacataaccagaaccgacgctacaaaaatggaagcgtaaacacgcaaacaaatccccccaaaaccccaccaaaaatctcctccccaaaaccccaaatcttccccttagatcatgagacctccaccgagccaagaaacgcaaagcaaaaaaaacaccacccgctagatcggagggagcagaaaagggaaagccccaaactgaccttaataacctcgcagcagcagcagcagctcgcgatgcggcaaaccatctcaccacgccagcatcgaccgaatcggcccgaagatctccgcagcccccatggcgaggcaaatcgggggggggggggggggagaaagcaccaaagatcccgctataaaaacaaataaaagaatcccacaaacctcccaaccaagaacggcgcgcgcctctcgcttgccgaggcgttcgggggagaaggcaaagaccgcgcgccctgatctagcctgcttctcgcgattgctgggggaggagaagcatggggcgcggaagcgagagagagcgagagggggtgggggaagaaggggggcagtaaaaaaaggggaaagtgatgagagagaaagcgagtggtgggtgtggagactttcggagttcccgcagtacgcactctctttctccctctatctctatccgcagcaattataaccggcgggtgtgggactgtggttaaacagggagtgaaaaaacaaaaaacgggttaacagtgctaggcacatagaatatccttaattaattaattaattagttagttaccaaagtttttctagtatgagtactagaaatatgaagaaagtttggtagtagtactacattttgtaggaagaggttattatcacctattcgctttttaaaggggttgggtacaaccttgtcgtttacagcaattgaacgtattattgcacagtgttgatagccattttaatttgggatatgaagaatgctatatgtattatttttttttcttacaaaactcttattaaacacagatgttgcctgtggatatgttgtatgagttgactagacgagaagagtaaagatttggttaaaaacttaaaagtgtattattaattcttatggtatcgattaagtgaacaccaaaactaaaagtctatttttcatacagaaacttcccgtttatatttaatatcaaagataaatttgattcatatatatactattatagaaattaaagatgcttttaccagtattttggtacgtcatccgcatttgagttggtttttaagttcgttcacttttgaaaatacatgtatgtgtttgagttggattttatgctcgtttgtttttggaaatacaaaaggagtcgtataacaaatcattttttttaaaaaaaaactcatgctaactttagatgaaatacggactactaattgcagctcacgatttcctaaaaaaatattcaagcgaattctcactgtgaattttacctaactaaaccttataacaattataaaattaaaatagcatttatccgttgcaacgcacggatattttttctaggaactataaatttactgtattagaaaaatatcactactattcgctaaacatgttgtgtgccagtgaaaactcctaaaatttgaattatcgttgtcacgtttccaggcatcttctcctccaaactatagagaggaaaaaaaaaacatcaatggtgctgcgacgagcttgccaccgttcggagacctcgttagcacattgatgagctcaacggcaccggtaaatatgcttgtgctgtggtaaaaaccgttgccggacttgccatctccgagatttggccaccgccatgtcgagctcgctgtcgttgcacatcctcccccttctacgtcggccgccactgttgcatgctcgttgtactatcgatattgagcagcagttgtatcctcctccttcccgctacagttttcgttaatagtaatgatttttttttctagtaggacggattttgtaatgatatggattaattttacgctatatcaaagggaacacaaatctttgaaaaaggcagtttctatatttgaagttaggcatgggaaaccgaatcattcctcaaaaaagttgagagtcagttgattcatttgcgcattaatttccatgacagcagaaattaggcacagatctttgatgtccttcacaaaggatgtttaagcagatctgaccatttttctcaaagaaaatgtcaaataaacctcttttccagcagaaaatgtaccggcaggcgtgttgtcaaatcaagtacactcctcgagccaccatagttttctcttctttctcagacaaacagtagcatctcatctactccggtgaagctcgtgccgcttgagttgagaagctgtcaaaaggaagtacttccagctagaccacccatatacacacacacataacaaaatatccataaatctctcactaataaagtaccatatcagtttaccaaaccttacccaagcttagtagttttacatggcaaaaggttaaccactccggcacaaagaagcgtatcgcgcgaacgatctacgctagtggggaaaatctgatagcgaccccgtccaggcatcgcaccagtgcccggtcggcgaccacgacgacgactactggagtacgtaaaaaaccgtagcaacaaaccggcccacacaagcccccccaccgccgcttcccgaggcgactccacgactcgaccacggcctctgccgccgcgtgcagatcggtccgagccaagccaaagccgccggcgcaacaccacgagaccgatcgctcctaccacccatgacatgagatgatgagaggagacgccatgagtgcgcgtccctttcgcggcggggtctcgtccgctctcgctctcgctcgacttctcgaaatttccgacgcggacgcatctgtcgcgtgtccgcatccgcgtccccggtgttttttcaccgcaagggggaagggggtggcgccacggttggtttggcgcgagccggggtgtgtgtgtgtttgtgtcggcgtggggcgcgcgtacggcgcacgtaaaaacgcgcgtggtccagcgggggatttgggcgcgatcggcaaactcctgtagcgtgggcgtggacaggcgccccgcgcgcccggcaggcggtggccgtgtggtgtggtgtggcggttcatccatcctggcgcgcggtgcgaaattccgtcgcgcgcgcgatggcggccgaggatatcacggtctccgggggtccgcgagctgctgctgctgcgtttggggttggcacgcacacatgcagcgattggtgccgagcaaaagccgaacctgctcgaaattcggttggcaattgattggggagtttgcctgctcggtttgctttgcttcgctttactatttgcttgtgcgagtgcgacactggcctaccacgagagcgtggcccggccgctggcctgcctatcccagggaagagcggagctgccgtgcgtggcaggcaggcagggccggccgtgctacttgaggagttgaggtcatcatgtcctgcccgcacccagacagcggcactgtgttgacacaaaactctcacaaactgcgggctactgctggctggagtaggagagtactaatattcttcttgatcaggtgcgccagatagccagtggtgttgtatgctgcgaacagtctctctgcctttctgttagattagattagttagagattagcggaagagatgctgatagcgtaggattgagacaataacccaagacccatggcagcgcacgtgtttccgcaacggtatagctaagccagccacaacggggtcatgtgcgcaggctagagatttcggttatcctgagcgaccggtgacacggataattttgtttataatcacagggcaatttgctattgcaactcggctactaatcctagttggatggactaggtagcaaggtgaaaaacaaccccccaccaatgctgctctccaatcagtttctctggcaggtctcttttaatcatcaacatttcagaaacatgcatgccctaccaatgcaagcaaagaccccaagctagtaccatatgaatcatagcctcagggatcttctagcagctacatcttcttccaaaatcaaaagttttctcaattagcctagttttccgtctatatccacaaaataaactaaaacctaaaatctaggaaattcagctattttagattcttagaagttgtctaccaactatcaactcctcggaattttaagctactcaaatagagtgtttctttagagagagataggtattggagttaggcaccacaatcagaagagcaaccaacttggttgtgtggagtaaacatcatatgcccggcaagttcggcaaggacatggtggtcttgcccctcatcgaatcctttccgcttctgacgtgatgtagtacatataactatcattccctagcgcatcatgctgattccagggatttgggctggattggtggcggcccagatcagcttatctgttgtagctaaaagttgaaatttaaaaaatattttataaataattttatcataatttattggtctttaagtcactaaggttgtgttcgttcacgcagatcaactgaccttttaaatagtgcggaaaccagagcaattaattaacttatgattaattaattattataagcttaaaatagatttatttgaacttttaaaaaactttcatataaaaggtttttaaaaagggttaattgtattcataccactgcaaatatgccaacttaaaaaataccactactattcagcatatcggttatgtgccactggaatatgggaaaattggaaccatgccactcccgtccagttttctatcacctccgtcatctctttcccacttcattcgcttctccgccatggacgccggcgagccctccacctcggactcgctggtccttgccactgccaccaacgatcgagcatcttgtgtcggactcgtaggtgcacttctcctttgtttccgatcgagcttcttgtgtctcatctcatgccttgttttcttcctgctcgcaggttgagttgctctctgaaaaccctgctgcgcttgccaggtaccctgtgggcactgagtacgattgggaaggtatacaaagattgagagatgacgaacaaatgaactagatcctattaaaaccatgggtgccaccaatcccgccgcggagggcgcgtggaggggaacacgacgtgatgccaccctgcgccgcagccgccaccgcgatggcgcagtcgccacgcagcctccacacgctaaccagcttcggccgcggcgccgatgacgtcgagatgaggtcacgcccgcgtccgacgtcggtgacgcggagggtgccgggtccgacttcgacctcgacttcgcgttcgcgccgccggtatcagcggccaagttggtgccggccgacgacatcttcgcgcacggccgcatcgtgcctgcgtacccggtgttcgaccgcaacttcctcgacctctcacctggcgatgtggcagagcctgcctccacggcagcgccctccaccgacacctactgcgcgtggacgccgcgctcggcgccgagctcgcccagcctcgacatcgcagcgagatcaacgagggggaattgcaactccgagacgacggcgaagggtgttcctgctgcatctacagtggtggagagagaggggaaggggaaagagaagagaggggaggaaggtggggcccatgtgcggttggggctaattgggatttttgacggaaaatgtgatggagtggcatggttctaatttctcccgttttgagtggcacatagccaatatgctaaatagtactggcatttttttaattggcatatttgcagtggtatggatccaattaaccattttaaaaacacacaccgttttaacattttaacgctaaaaaaatagaaagctatagtttagaacgagagaacacttcaagaacaacataagatgcaatctaaatattatgaatagctaattaagcgtaaaagaatggttgcgatttaagtggtagatctaatcaaccgataaatcaatacaccaactattagaggttgtgttgaaataattctccgtcacaagatttaatgacggttctataaataatgtgctaagagcctgcagaagtctctatgatgaatgaaaagtaaccaggaagtttattgtgagatgtaaaaaacaataaaaaacaaaatagcaaatgttccaggatcagttcataatatatgcacgcttaatatattagtctgtttgggccgaacacacatactaaaacatacacactcaacagtttcgttttccttctgctttatttgatcaatactcgtgcacttatactgtttgcatggcgatgaacatgcttgcttgtagtatcatcgataagtttccctttaattttcttctttacatctgtttaatttgttcaattttattttattacagctaatattttaagcgtaatggaatcattctttgttcgatggaggtatggttattggtttatcacacaccaaatctttctaacaaaaagtcatgacttgtaatcttatagtctctaaactatctatatgatgttctaaatgtatacggtaagaaattatgcagggaatgatgttttattgatcatttaagtgagtaccacaagcagtatgtttattctacttgtttattttattttatataaaacatgtttactctattaactaacactcccttctcttttaatttcactattctcttctaatttcactaggtcatgagcaaccgttacaacagatacttcaccctatatatgaatttaacaccggcataagtttttgttttatcataattgttgtgttttctagaagttaaaagatttatatattatttgcctatttattttataatataagaaaaaaataaatatatttatgaaatggtttatgtcatttagtttttctatctattatttttagtttctcgaaacatatgatatgtggtaacgatacttgtcccaaataatttgtaaagaattttacaaaaaaaaattcatctttttaatttttcttttctcctttttatgtgtttgcattggtccgatcacgcactgttggattgtggtgccgtgtggcccatctacacacggaggagcttttttctctctctctttttttttacaattcaccatagtaacttgcgtgcttgccatttttatagagagagagtttcttaccatttttatagagagagagagagtttcttacctggtgctctttccaccgattgtatctcgcctctttccaccgattgtatctcgccacgtgtcgctcaactaatggatggtgagggtagccaatcagctgacattaaaccagccaatatgagatagatagatagatgcaaagcgaaaagatattttgggaagtctctagaacatggatggtgtgcattttgtttgcttctcggtttttttatggatattctagatttatatcaaagatgatagataattgggtagtctataggatttatgtttttctttcttttggctatttttcatgtatagtttttctagatttatctcaaaatttatcaccaccatgtggtctaatgagatgctcaagatgagccagctttcgaaagatagatgggtctaagaaaataaataaaaaattttacttacaatttataatcggttgcatgtgaaccgatgagactgcatatagcctgccagaactaaccgatccaaggaaaagcaacgtcaagaagagctgcgtattggaaccaaatagatacagattttggttccaacacctgaaggatgtaacgctcgtataatgtagagagattcttgagaagcagaattttatttagtcattagggcctgagatacattccaggattacaacagcttttagggggctactacaggcatcactggttacatgcatatacagacggtaacacccaataataacctgaactcctgaaggaagatgataggatattaggtcatctaggacaacaattacgctggggttgctctgaatggaagcaaatccccgggtaactaagaccaacaaacacttgggttatttacatggattacatggataaggcttgagcatgtcgagttgtgcttcatacgtcgtccacgtcgcttcccccaacatgagcatcatgtgtaacaaagtagtggctgccatcaggaccagacaccttatacctgcttagcgaaaaaaggggatatggttttgaattccagagtaatacaagggcaagcggcttgatgcataactctttaatgttaaattgtagagcttgttgaaacacagcaaagcaatatatgaggttaagaggattacctctctaaaataaatttcccttccttgtacctctggctcttctcatgtgcagcttcctagagtaggggcaccataaaacttagatgctacgcaatacaacatatatgacaacataaaataatcacaaatcttacatatttccatccaacaatggatccgcagccaacacagaagatatcagacacagtatgcattccggttatcatcatgcgatcctcttttactccagaagtcacattgacactgcccacaaccaacatgacttaatcaaaagagtataatacatgggcggtccgtaaacttggaccagagtatcatctatgtctgtaaacttgtaaaatgcacatctagattgatccccaatcttggtttaatctatcacccaaggtccaaaatgcagatgacgcagcttcgatgctgatgtgattatccacacctccacggtagctagacttttccatttaaacccctttgctataatagcccccaaatcgacttccactacccacaaatcaacaaacatgtatttcctggtattctggagattcatagtataagttatgcaccaaaagatttaactgggagcagcgggagccaatttagaggcatactgtggtagaggggcctaaatgcaaattctcaccaccgtggacaaccatatcagtgcctgagttgcaccatctatactttgaactttgaatgggcctaaatgtgcattttacaacttcatggatctgtacgacaccccgatccaagtttaaggaccggctgcatattttactcttataaaaacttttggttcgtagaatgctctagagttatatcatgcaactttgtatttgtaccaaatagtgagatatatttcaaccaaggacattaatttgctagggctaccaaatactccatttgtttcatattataagtcgtttaactttttcctagtcaaacttctttaagcttgactaaatttatagaaaaatgtactaacatgtttcaatacaaaacaaacatattatcaaaatatattcaatgttgaaaattgctaattttttctattaacttagtcaaacctaaagaactttaactaagaaaaagtcaaatgacttctaatatggaacggagggagtactacatttattgatctgaatgatggtgaactttacataacaccgtaaaactgttatcttcctgtaatggtaaagaaccacaaatttattttgctgcagctgaattctacagcaacactggtaccttccggtactggactacaaatggcagtctatggagacatgtatatagaaaattacagtggtggttagtctgctcttagtagtaagcttctattaaagtctatccaggacagctggtgtacattaccagagatcttgactggctgttcaatagtccaaatctaacttcaagaaaagcaagttttcaatattgaataagagttcaataataggaaagggaatggatgctttttccatatgtggataatgtgcccatctatcattcctttttccaataatgaacttaggcatcagattggtggtgaagcaattagggaagttgtcacatacctttactcattaataaatagaatcataactacagaagttccacatacaattattcttagtactgtgttgtatgcaagtagctttagctgcaagggatgcagttcgatatcaacttcacacatgccaaactttgacttataacgcaacttcttctaataggggttgtattattgcataggagatcaatttcaagcatattgagcgtcattctatgcaagtaagtggtgtaactttagctattaacaaagcgcaggcaagggataggtcttgtgtccatccatccagcatctctaacatagcgcatatccaccactcctcgaaaagagtagaataacaagagagtaaattatcacaaatccttgtctattggactctttactttttttccaaagagaattcgggtttctgttttggccattgcctatttattggtcaccgtaatatacgcccagcgatctcctgtgcacaatccagtgcaattacaatttagaggattccctgtctgcttggtttaccatcttccttatcctaatagcggtttcaagttacttgtactaccaaagaaggcagtcaaatcttaaaacagattcgtaattctcaaatttttcattgtgttaggaaggaattggctaggctacccgcgtctgaacccaaacaaggtgtggccgcagtacaaatcgctttcaatctcgccttgtaaaacgtataattagtggcctgacgaaccaggactcaagaaaagaaagcacagtgcatttcccattttcccccaaattccacacatatctcccggcgtacgctacctaaagtttgacgagcgaacaaaaattcgagggcaagatgaggcccgggaaggagaggccacttacaccttattgaagaggtacgccttcccgtgcttgcaatggaaggactgcaagaaatggaaagcagcaaccatgaaacaatcgctcccacatccgccgtgctcgccgaatcaaacaaagctagccaacaacaacaacaacaacgagaagaagaagaaaggagggggctgaagaggcgaaccttggagatgatgtcggaggagaggccgaggtgcgtgtggcagtgcttgcagctgtacaccttcccttccaggtgcatcacgaacagccgccccatcgcctccgtctcctcctccctccccctcgattccacaccccgatcccccagagcgccgccgcgatcggtgtccacccgactccaatcgcgatcgccgctagtccccctccctcgccgccgctcgttcgcctcgaatccgagattaggattgcttttgtttgtggggggagcagtctacgcgaggaagggggtggcttgtctgcagcactgaccgggtgaccgaagcaaaagcagcaactggggttggggatggggattgggttgatatggggggtggaggccgcgtgcgtgggaatggacgggggaggagaggaatggtaattagtatagccaactaaacatatatagccaatttaatagctaattcatacaatagttatttactataatattaatatctggtccatctgtcatacacatatttcgtcttgaagttcgtgctgcagttggctacagatctgtagccaactactcttctctcttctcgtttatttctttaaaatatgtttatagttggtttatgatatgctattatatctgctataaaggtcctttgaatcgtaggaatgggaaaacggaggaataggaaaaatgtaggattctgactggaatacaagtgtaaaacagaggattgcaaaacacagaaaaaacacaggagtttccgtttgattgtaccacagaaaaaacgcaggaattagagaaaagatgaagactcataggaaagtttccatgaggtagaacctcatgctagatttcttccaaaacttacatggcattagacattacatagaaattttataggattttatagaatttatttcttcgattcaaagggctgtatagaaaaaatttaaaatccttgagaattcctgtgaatcaaggggcctaaaagggatcgcgggggatgcgatgcggtgcggtgctgtgtccgattgcgtgggatggcctgggttgcacacgacggcacgagctaatttgtgcggggggaacaagtacaactgctgccgtgctggatctggtctgcccacctgtggattttcgttcctggatgcagcaacctcctctcgtttttcctttttccacgtaaactcattaaggctgtgttcgttactagttggttggaaactcatctcctcgcacagaaaacagagcagtctattagcgcttgattaattaagtattagttaattttttatttaaaaatagattaatttgatttttttaagcaacttttgtatagaaactttttttttaaaaaaatgcaccgtttaatagtttgaaaagcgtgggcgcggaaaatgaaagagtaaggatgggaaccgaaagttccgaacacagcctaaaggaaggaaagaaaatgtagtactcgaggagtgtttagttctgccaaacttttcaatttgccctctcttttaagataagaaccactccttccgcccctaaatacaaagaattattagtggatgtgatatatcctaaaattataaatctggacagggagtatatctagattcatactcgtagaatacggagtagtatcttttatcgaaactatcaactctatacgaaataaatcaaaggccatattacgtatgatatattagagcacgcgataaataattcaccattctatatgcaccaaaactaaagttaagcttatgcatatagagtaataaaaaaaaattagacatataattaataggcaaatcggatctatgccattttaaatgtgtggtggagagacaaccgaagagtgtcatttcttataaaaggccatgattatgacttcctttcataatctacttcctctatgttatcaagtggagtatttgctttaaacatatatatcctcctttctaaagaacattataatacataccctatacaacgagtaattctacatcgctacatcctatataaagccaactaatatagcataaacaaacgcctttagactctcgaatggaaaaataatattttgattttcaactctcgttgtctaaaattattttagccattacatacttaaaaaactatcatatcctatacatttgaactgaacttttctatggtaaaaacaagtataaatgtcttggaaatatactcattactcccactgtgacatagatccatcctcataaaaaagtagagtgctaagaacgagctagccatcaatggtttttaataaaagtagatgaattttaactcgaccaatggcagagctactaacgtatacaaacctacacaataaagaacattttgttaattgtcatcaacttgtatgtccatcctcaaactccaccattccaagagttaactctgttataaatccagcataaaaattagctgtgaagaattgaatacgggttaaagcaataagtctttgcctcacatgagcataaagttctcaaataagatgaaaaaaatgtactagtccaatttgatgaactaatgaacattagtccaagcgttttcttcagaaatggaggataaaaagtatttaatgtctctgttactcaattatttttggaaaaataaccttgacaaaggatagtggagtacaaaattatagggccactctggcaaatgtgtttgaaaaatgatatccacccaccaaaggatatatcccaatactatctattcattttcatattctaatcccacttttcataacctatagtattcgccagacatgtcctacaggtaaaaacaatattatagcctggtaataaaggagttaccatgtgttcttgctagccaaagttcaagttcccccaaggcctcaaccgttactttttgctcaaaatgttttctctcttatcattaatgctaagtttctccttaatatcccacttttccttttctaaaaaaaatgctaagtttctccatagtatccccaattttcctttttttttttaaaaaaaagcatgtcccacagttcaaactaataaacgacgtttgacaactcttatagaaaaaaagagtcacaaacacaattgccgccacatccaattggtgatgtccgtacaaacggacggatcgcgcgaacgcacgatttccgtccgcggagcaggaccccaagccaaaactgtgaactgcccaactcgtcagagacccatcgctcgaaccatcttgcggcggaagaaaggaagcaaagctgtgagacaccaaaccacagggaggcgaatcgcccggagtccggagaccccggaaccagccacggccatgtggcggcgggcggcgacggcggcgctggccctgggcgcgggcgccggcggggccgccatcgcctactccgacgacccctccgccaccctcaagatctgcgcgcacctgcccccgcgcctcctccgcgacgccgccaccgccgccaccatcgccttcgactaccagtactccctctggggcctcgacccgggcaccccggcctgggtcagcgccaagcacgacgcccacctccgctccgcaaaccgcctccaggagctctgcttccgcaacggcggcatctacatcaagctcggccagcacatcgcccagctggttcgtgctacgggaaatcgggctcctccctttgattcgtgtgacgtctttgctgaaattttggttgctgcgtggagttgaggtcgagctggttgtttgtttgtttgtttgttccaggagtatgttgtgccggaggagtacgtgcagacgatgagggcgtcgatgctgaagagatgcccggtgtcatcatacgagcaagtttgccgagtgtttgggaaagatatgggagaatcaccggaaactgttagttccttgccatcctcctccttgcattactgtctgaataccacttctatacctttgctgtgggaatgtaggctgctgctcaagcgcataacgatcgttgaattcacaattcacatgacaacttggtccaattctggcacagactattgatgcttaaacagattagtgggtttatgggctggattatgcacgggcttgtcaatttggaagcaaatctgacgattttttttctctttgtcctgatgtgtaggtttttgtagaattcgatcctgttccacttgcaagtgcttctctcgctcaagttcatgcggcaagaacacatgatgggcaaaaagttgcagtgaaggttgcaatctagagaaacactgttatttgtctcgagtacactctcatattttatttgggactcttacattagcactatagagtttgaattttgtccagcatgctgtcttcctttaacatgttccattcctatcttaatctcaggttcaacatgatcacttgacagatacttctgttatagatattgccaccgtgggtttgatagtgaacactcttcattatattttcccttcgtttgactacaggtacccctcctaatttggttgtattgtttcctttttattgacatgcatgctacctcaaaaacttatggttagatccagtttagctcctctttatgggaactatatgattatgcattggtaggaaactgctagccaacaaagtcccacatctttatgggtttactgttgcaaattttgtttctgcaatccttgtctgttcatgataattcctggctcactgcttttttttggtgatttattgggaagcggcatgcctatgcaaaaatcatcaatgggttggtcaaacacaataaaaggatattatcatcttggatagttacacaagatgtttggcatagttggtgtatcagctcaagattaaggattagaattatcgattttgatctttcaactcccttgttatttagttagggcgcttaggaaggatgagtttgatgctatccatacaattccaaaatttaaaagttgctataagcaatgcaaatatagtttcttaatgataaacatgtctacattctacagtatgtgagttgaataatatatttttattactgtctagtaagttaaaaatagtgccccattacattggaattatggttcttactttgattggatcgttttttttttccttgggaagcttatgttacaacaaaaatcatagactggcatcaaaataaatgaaatattttctcttggcaatgttggatcaacggtttttcaaatatgaaaccaacaaaaggactgtgattactttgaatcaagtcaacagcagttccttggcatgcaaagagccccataactactttagggatttgcattgaaagatgcagtcccttccacttcttcagagatttttttttatggtgctgtataactgcaaatggtcatgacacatgttatgatgatttccatttagtgtaaatgaggcaaatacacacaatcctttgcattgttggacagttgaattgagctcctcacaagtggcacgtttgtgtaattatgcatttgcagtacacaattatgttgatgtgaccatagttctttcattgaaaattagtgaatctacttttccacggaaatcctgttttgcatcaaagtttatgccattaaaattggttccttgcaggtggttagtcgatgaaatccgtgaaagtgcacctaaggtacctttctaatatttcttggcaatttaacattactgctgttaacttttcttttcaatatgttctgctaccatttctttttgttaattagtaaatgcatctctggcctttacgagttgtcatcttataactttatagtccattttatggtcatggactcatggcctgttgtcagtaggatctctcgtgtttatcctgaattttatgctcagcagcatattttccagttgggtgtcttcatgttgatcttgacttttatttttttctatacaattataatatactcaagtgtaaaggaacatatttacacaatttggattggtactgatttcctctcttggtttcaggaattagatttcttgaatgaagctaaaaacagtgaaaaatgcgtgcaaaactttagaagattgtctccgcacattgcagggagtatttatgtccccaaggtctattggactctaagctcatctagaattctcacaatggagtttatggatgccaaggaggtaactgatgttaaaggaattaaagaacttgggattcgcccagtcgatgtttcaaatctagtaagtaccacagtacagtttcttgaaaaaaaataaagtgctaataacttctttacagactctcacttgacagttgtgtaggtcagtaaagcattttctgagatgattttcaagcatggttttgttcattgcgaccctcatgctgcaaacatgatgatccgacccttgccacaagatagcaaaaaaacttttggtgagaatcttgccatctagcatcagaaaagtttttatcttcgctgaagtgtatctgggactgagatctcttgtccagtaataatgcttctatgataatcttaataatgcatactggcagtattttgtcatgttattgcctcattggatgagcagatgagtttttaaatgcatggtggggtagctttttttttcttgaacacgcatggtggggtagcttcaccatgtgatgatcttcattgcagtaatatatatgttaagtgagatgtggcatgtgtatttttttgtgagaaaatgagaatatgattgttttcttaagatcctaggtggaaacaatgcatattgcagcttatatttgttggataggtcagttattgcatttgtttattacgcttatatgattttttttacttgaacgtaggatggagaaggccacaattgattcttcttgatcatggtctttacaaagaacttgattatgccactaggataagctatgcttctctttggaaggtgacaaattgacaatgttatcgcagttttttctatgatcacaactgagtagtcattactaactttatgaaatttgttgatgcaggcacttgtttttgctgatgaaaaatcaattaaagagaacagtgtcaaactaggtgctggggaggatcttcatgcactttttgctggtgttctcacaatgaggccatggaaaagtgtgattgacccggctgtcgatcatcttgttctagatggcagtagtaatgatcgttctgaacttcaggtgatttatattatgcattattaatgttctccatgactccatgaacactgacagtatatgtaactgtgcaacttcagtaataaccaatagtaccagtaactctagggtaatccatgtatcacctcctacttgaaatggaattcaatcatttctcacttttttattttgttcattgttgctcaaagtaacactgctccaaatcttttgatctttccaatagtaggaaaaaaggccaccgaagtaatatggaattgctgattatcagcccagcttgctctaaagagatcggggaccaatttagctgttttttaatctgcaatctaaaacctatttaccatatatatgatggttttaagttttcatgttttcctagtatgtttggaaactttgttatctattgccatgcttgtataacattacatcttttttttttgttcattttcaattcccgtcctcattcttcttatgatatttttctccttgcaccttcaattcatgagatgattgaactgggacatgttagtcaaggttttctttttgggctagctgtggaaaatcatgtactttgaggtccttacgtgatatgtttttctttgtcacagatgtatgcttccttatattttccacaaatctcagagcttctaaggagactgccaagggtcatcttgttgatgcttaaaacaaatgattgtttacgttccgtcaatcatgccctggtaagtgaaaaggaatcatgaccataaatatgtaggctgtcacatagtaatatcttctttcttgcatttgtcacttcccttgatgcttttgataatcaagacgtaagttgtactgcaaaagaaaataattgatataacaaggaagcatgggatagctacggggttttatcatagttgttgcactggcttgaattgtttaatatcctatgcggttataagcaatgaaccccacgaagccattataaagtaggtattatttcttttaggcttcattccctctttatccgtgttcttctctgtagaaggtcaatgcagcatcgtataaggggcactctagcaagttgtacaaaaattcgagaattaattataggtccttttttggctctgtttacacgtatgatgctttgtcaggttggaggttcttcaatggaatcatttgtaatcattggacgaatctcttctgaggctgttttggaagctaaaaggatgagtagtagatcaattctgaataaactaatgatatggctagaggaaattttactggaagctcgattctttagtttgaagttgctgttgtgttttatgcagcttaagaagttattggcctgttaagcagcagatcagcataccaactattcttggactagtgtaaaatattagaagctgtcattttagtttttctttttgagagagaaaagtggcatttagttgaaaaattctttttctctttttggtatacaccattctttttggttaaccattttgctaccaggcttttcattttgattagccacttccaaacagaagatgatgccactatgacatcgtatgtttattctaatagatggatagaattgtagaaaatcccatcactgcacagtgtatatatataactctagttccatggatccagcaaatgttggcccgatgaatatgctgtgccaattgcgttatacaagatgtaagagtaaaattgctactggaaagagagtcactctgacatttgccagagcaaatttcgtttggtcaaatttgtgttcatcgtgatgtcgatctccattttctttaccccctacttttctgctagcattttatcgttgtgctgatgttctgcacttctggttcatccttttgagttgccgctcctactgtcacgttgacacgttctatactttgtcctagaacatatcatagaccactagaaatataaagcacttaaatctgaaatacaatatggcttgtagtagttaaccacttaacgatgcagtgtgtaactaacacggtatttttcttgaaaaaaatgtttattttgaaattcagtagctcaaaaaactgccacagattgccgcagattccccaagcatttgttgcaaaatctgccacatctttgtttccgcatatttctgaagaatttggaggtaattggattatggagatcaactacgatcggaacgtatgcatcggtgacagttttactgagccgagtgaaacccagcgattgccaccgctctctgcaagcaaacatcgtcgccgatcagccgaacagtttgggctcccccgtccgccaccgttgcagttgcaggcccctcgccgccgttggccgccggtcgcgtccgccggtgcttgctcatgtgcccgccaagcgcctgccccgtgaggcacaccttgccgcactcgtcgcacttgtgctgcacgatcttcatcttgcccacgtcgctatcgccgtcgtggcttgatgcaacgacgacgccggcgatcttgtcgttctcctcgccgtcaccatgggcgaccttgttgttgcccgcgtccccgccggcatcaatggcagaggccgactcggccttaccgtgaccgcggctttcgtcgacgtccgcgtcatggcatgctgcaacgtcgtcaacgacgacggggctcttctcctcgtcgtcgtcgtagcggctgccctcggcgccatcgcatccacgctcgtcttgtccgttgatgtcggcggcgaagaagctttgcctttggcttgctggagccacggcctccgtgaccgccgtcgtcgtggcgtcgcgcgctgcggcggcaatggcggcgttcttggctttcttcttgtggccgaggacatgcccgccaagcgcctggtggctgccgaagcacctcccgcatatgctgcagacgaagcgcttggaagctctctccgccgcctctgccgccgccgccgccgccgccgccgaagccgtttgcaaaccctcgctcgcctcgaggtcagggcctctgcttctcttgccgcgcaccggcggctgcggctgcggctcctgctcctcgccaccgtcgacgaacctgcggcgcttcctgttcttcgcctgcaccaccaccgcgatcttcttgggacacacgccgcgcggaggtggcggcgccgccttatccgaaccatccagctcggccggcaacaatggcgatctgatcaggtcgacgagtcgagccttcttgcgtgataccttcccgaccccgcggccgcggccgccgcctcctgcctccccacgcggcgccattgcgtcatcatcatcagagctcccctcgtcgtcctcctcctcctccgccgcttggccgccgctgccatccagcaacgccggctggcgcggcgagaaaccgtcatcatcgtcgtcgtcgtcgacgacgcgcctcttccgtttgcaacaacccgttccttccgccccggcgtcggcttcggcatcgtcgcggtccaccggcggcgcgggctggcgtgcaaggaacacgtagcggtcgacgtcgtcgtcgtcgtcggaatccgagtcagagcagtaggggtagtcctcgccgacgacggccacaccctcctcgtcgtcgtctccgtggtgcccgcgcgcgcgcgcgcgatcgccggagttgacggccatctctctgcacgtgctctccggctgcgccgcgcggctgttgctaacgccgaaacgtgccagtaggtagcgtgcgtgcgtgcgtgcgagccctagataccgtgggtccgtggctgcagtgcacacacgaggttattatgactaataactgtggaagaacgaaaacctacagcgtttttgttacggacacgggacacggcaacgccaactttctacatctctgtccttttttactgaaccaaaatgttcagtctaattagcatagagttttgtttgtgtatatttatacttctttcttgaagcatttttgcgcttgtactagctgctgatgttgtttttgagacctaatattccatccataacaaaattacaagaccagtgccttttcatttcgccacatcggtacaaattaataatatagatgaagatgacatatgcaaggtttctagtgatctactacccccgtcccataatataagagattttaagtttttgcttacattgtttgaccactcgtcttattcaaaaaatttgtgcaaatataaagaacgaaaagttgtgcttaaagtactttggataataaagtaatttaaaaaaaataaataataattccaaaattttttgaataagacgagtgatcaaacagtgcaagtaaaaactcaaaatctcttatattataggacggagggagtagtagatatattgttcgactccatgactcatgactgcgtataggtattacagagaatactcctgtgttagtactactccagtctaatcttgttagcagcacgggaattcaagaactctgcacactcgacatcccaactggcatcaaaacagacgcaatcctcctcacatatatccacagcatcatgaagatactcgcaacgagagataacatcttcagttgtcgtgccacttgatttatcgcgagccatttccagaaagtcagtgcggccattgtacttctctagatctggatggacaatcttagccccttcacactcacaatgataacaacgaccttttaacaaaaataaacaagggaaaaaatggcaatcagttatcgtaatagaggaagaaaaaaaaatactatatcatagcttgcagaagataaggatacatcagtgacagcagcatttagcaaagcagtaaaggtatacacatgtaaagataaggataaatgttttgaatgtggatgaagctaactaactttgttattagaggaaatgatcaatggaaattgtgctgtatttcacaatgttttttatatgacaatgatgttaaggagacaaggactgagtatgaattagttagtgccatcgttggaaactgtcaaggcgatacagtcatggagttgctcatcatggtcaatctgtagttctgtactgacaccattgttagcactaaatgatcaagcaaattgatttatatcacctcagacaatgtctgagattaaacatagattcacgttttagttgttactaacattttggagcaaacagcagaattctacttccaaaaacattgcttggtttgaacaattctaggcatgaccccaccaaacaatcttggaagtttgattgaattaatttctgtggcatctcttttaattaaaaaaaagaaaccatgcaaatcaacacatgtatgtcctttttgttcttttcaagtcaagttctgcagcgtaatgaaaatcttttcagtcgatttcacaacgccatggtgaaactcaacacatagaataaagaaacatctgtaacacgctaacatcatatgatgtagcaatactcaaatggaaggagagtgtaccaggatgccccatgactggacagcaggtcagttcatcgatcacgccttccttgttgcagcactcagcaaaaaaaagtatggggactgtctgagaagaatgcaaatctcttgggctcgccaaaaagttgacgtgagaatactgagatttggatcgatgccggctatatccaggtccataatgtcggccaaacatagtataattaactatgtgtgaattcaagccacagataacatgtagctcatactcaagtccctatgattcagaagtttatacaagtgaattagataatcttgatattgacatttttggtaatggtcgaaaactgaaggggtgaacggacataccctagtcctctggttgtatttcttcagtgcatcattaaccttcccacaaataaaactttgctcagccttgaactcttcctgaatgcacgacaaagtcatggaggccctctcagagagtacaggaactgtctgaactgaaccacaggaagaggggcagaatcgcatcagattgtgcacgaggagctgcacatttaaaatcccaccagtttgaaacataaatggatctgtctgcaggggaaggggcttcatggaaaaggttgacatgaaaaacttcactagtgcatcaggatcaggatgatgtgctgcggtggctgcaaccatgcaagcaaggtctaggcccaacatgtttctctcagcatggcattcttgccttgccatttcaaccgctccccaaagattggcgcccgtcaagaacaggtaacgcatagcctgctgttcagagattgtgcaaaagcaagcgcggaggtatgcaacaagagcattgagggagcggcacgcgacacgaacaaggcttcttgagcatgtcatctgcactgaaacctcctcttgtggtggaaacatggtctcataccaaactgtgttgaggacaatgttgtgcacagggttctcaaaggggccatagcagtggccggccttgaggagccccctgtggtagcgcattcgcaagccatccatcggcaggcaggcaataacatcaaggtacaatccatagatcttgtcaagcaggatgctcttcaatgatttcatccgcacaaacggcggctgcttctccttaatctcaagtgaccgaggaagaaaggtagctccaacaaggtccactggttcttgttgctggtgcttcaccaatctgctgatgttcttgacggctctgcacgagaggcaaccttccatgcttaggagattggaagcctccccaatctgagaagcgatggaatacaacctctcgacaagggatttggggtttgggtgccacccagcaatggcggcgcaagtgagggctgtctcggtggtcagcgaggcgaagctgaaggcgtcagagctgcggtcctgctcgatgagccgcacggcgacggagaggtcggcgtcggccagccggagatactccagcgcctcacaggtgtggaggtaggggaagtagttggtgaggaaggcgacgagcgcctggagcgaccgcgcggcgacgcccatgtcgcggaggaggcggtggctcggaccgcagccgccgacgttgctggtgtcggcgacgatccgggagagcgccttccgccgccgccgccgcgtcgggatcgccgccgacttgccgtcgggatcgccgccggcgaccaccgggacgcgcttcttgtaggtgatggtgttgacgacgatgttggagacggggtccaggaagccgacgcagaggccggccttgaggaggcgcgggagcagcgccggcatcgcctccacgggaagccggtccagcgccgccgcgtagaagccattgatggcgcccagtagcttcgatcggtttcgtctcatgcggcccggtccgtcgcattcgaggagagaatttttttcattttttagatttttttaatatttaccgaaataatctatcggcaaaaaatttttgcaaaaatagaccctgccgccccagtggtgggcggcaagctgacgtggcagacggcggatcgaccgcgccgtctaccgccgtcggccaaaattgcaattatccccaatgggcggcaatgggctaattgcaatttttgccgcccataaagaggttgtgctcgtactttttgcatttgggcccaagggacccagatgcaaaaagtacggccaaacgatttttctatgttatgttaataataaataaagaagtatttattggtaaaagttgttaatattgttataaaaatgtattgaagttggttgtttcgcaatttcatatgttaagtaaggtattattttgtaacttattcgacgtattagtactcggataataattaataggcctatcgcagtctcggtcgtagaaacattatatggacttaaacaaggagaattatgtaacatgaagaaatagtagtacaatttgaacatgatacaactatttccattgcggttacatagatgatattagattcgaactaggagggaggtagtgcaatagttgaacacaacgacgatgtagtaatgggacaaggaagcatgacagtagaaatttcaatatgccaagttgtccgataatagctaaccgctacgtgaggatccctctcctctctcaaaacgcgctttagtaaccctgtattgctctggtagttcaagctgcacgacacggctaggtggagttagaatccttctggtgtctatccattctttgtattgacatctccttggtggttcctaagaggaaagaatagatgtaaagcgagcaaagttagtaaatgttgtgagaaaataaggattcatgtaatcaaaatattcttaccatgaaatcgtcgtcaagaatatttggacaaacaaagaacgttcgacccaatgttgtaggctttatggaacgaagaacctgataacgatcaccacacctgcatcttggacgggcttcccatggagggagtgccgtagttagcacccgccagtcgctctgttgttcacgacattgtcgttcataagccgcttttctccgtaagtattgctcagtactttcggatgcgaaataccagcgaccttcttgtaaacaagtggttaggtcgagaacgggattttctgtatcgacccactcgatgtatgcgcaagctgtagtgcgggtctgccgaatagagtagtgttacgaagaataaagcgattgcccatacggaatgaataagcatatacatataataaaatacctcatggtcatagttagggcacctaaaaaagcgccttcctcgaatatcaggattcctcgaagccattagttggcatcgatcaccgcataggcagagaggacgctggcaccaaggtggtagtaggtatacacaagtatcgctacgccagttcggatcctcaacacctcggcgtgaacgtggcggggcatagtgggtacgcctaattggcgccgaaagttacatgcctgatcggcgccgaatgttacattggtcgtatgcggcaaatggcgggcaaatacttgtatcgcacgcgaataaaggaggctgcatcggtgcggcagaaagtagtcgtgcatgcgctgaaaggtatcgtgcatgcgccgaaaggtatcgtgcacatataacaacaacgtagtcattatacaagcatacaatactggaaagtgaagcaaataaacaaagagaagactgctctactggccctgccctacgccgcgaccacgcttggtcctccgggcctgtgctcgcacgtggtcctgggagtaggtgaaacgatccggtggcacagcacgggtagcacgagtgtctggcggcggagtggcctgcgcctggtcctgtgtctgcaccagcggtgcgcctcccagctgtgaggggccgatgacatcctctgtcgagcctgaagcgaagtcgaagtcagtgatgtcgaagagcaaggtggaaggcagcaagcggtccgacgaggtcccagcatggtccagtggtggaccctgactcgacgtgccggctgcctatgacgaagtcccggtgtactgccagaactgcgctgagtgcgaggtcgacgcagctgcctgagacgctgaccctgcagcctgggagaagtgggcggcctgcgtcatagcgaactgggcgaaacctacacatcgacaacgggacccttgtaagctaagacataaaatgcatataaattgattgtcgaagtaatgttgttatttttaggtacctatggggggcacaacagaaggcctagccgaggaaggcagggtgctgaacggtgcacgaaaccctgaagcaatcggcaagtgaaacggctcacatatatgtgcgaggcatgtatagaaaaatccttaaaaatacttacctccgtgcggagggggagtcggcctaggaacgtgcgcagttggacggggaccagtcggtacgggtggccgctgtacagctgcgtctgcccgagtaacgttgtctgcacgacaggtgagcactcggagaatcgagcgcatcgactccaccatccgcgtgtacgtcgtcaggtgctcctctacgggtaccggaatccccgcgcctaaacgttggatcgtcgttgaaccgtcaatgacgacccggttgatgtcgtcgacctgcatggttaattttttcgtacatattcgtaaaatttgacgaagagaaagatatgaaaacataaaggaatggtgcgatgcatggtactcacagcacgagcgaagtcctggtcgcggtgcctggcgtagaggtctctagtgctcgcaacgtggggctgctgctccaagggagcgaaggtgaccctagtacgggtgcgtggctggtaccagcgtaggtaggcctggtacgcctcctcagtgtgtggctctccctcgtggtccacgacctcctcggttgcgagcaaccagtcctcaacaaaagtcgctaacttggcgggccagtcgccagctgactgctgacccttgcgtgagtaactgcgaattaatgtgtcatattagtgtgaatcgacagatgttgcaaattattgcggacaggtagattttaatgcaacaactgaaagcgtagtgaaagatcttaccggtgaacagcagctgggacggtcgtcggaaacggtactggaaagggctgacggaagccgaactgccgcatcacgcggaaaggtgcgtgaggctcaacgcagatgtcgtagaccatcggaaccgtagtcatccagtacgcctggtccctggtgcagagtgtggacagacccaacggcgcctggggctgggtagccgcggcactgtagggctcccacacgacgtcagtcggcagaaggcggtcgaactccataacaaactcaggatacgaccgcctaacctggacgtgagcccatcggcgctgcaatacgagacgatcgatgtgatgtacaatgaacttagcaattaacttaacaatacgagaagatcgatgcaacgtatccgacgatggcaccacagagtacccatcgtagggtagtcgacctctggtcgctccgcgtacagtgacacctcatacgcgtgctggtccacctcagggcggccgatcgcaatcctctcagctgcccagatagaaagaaagagagggcacccaccaaaggtcgcgctgggatccgtcttcgtgcaagcctcacaaaggccacggtacagagccgccaacaacgcggaaccccagctccactgaggcacctcgcctaccgcggcgtcggcgatgctcctggcgtagtgcacgagtcccttatcgaccgcgtgcccgtgaccgccacagaacatcacccagccaaaaagccagagcaagtacgcctccaaacagcggctgtaggagtactcgtcggcctccgcctgtagctgctcaatctgcaagtgttcgataaaatgttaggcaccttaactgtggacaaaatatgtagtacgcttgtcatttcggtacaaaaacactcacggagaactgaagcagccacctcttcataggtccggtgttgcggtggtgtgccaacggctcgagcgggagatgcggtgcgcgctgtactagtgcgaaacgtgctgtcagatcgtcctgccagtccacacccgtggtcactggcccaacatcgtctcccgcgagtggtagccccaacaagtacgatacgtcctgtaggataggggctacctcaccgcacggcaagtgaaaagtgtgcgtctctggtctccatcggtcgaccaaagctgctaggagggaccggtccacagtccatcgtctggccgggtccgcatcgccggcggcagcctccaccagccgacacatcggtaggaggccggcctcacgcagcctgcaataacaaattaatatgtcaatataaaaattattacaacgcaactaatttatagtaatacacttttcgtacctctcgacaaaggagtcgtgaaccataagtagctcaccgcacgtccgtgcccggaacgtcccaagctgagccccctgcaccgcagtaaggtgagactggtgtcggtgatctatcgccgggtccaacaattgaggtgtatcctgacgtgccatctctgaaaaatataatgtttcgtgttagaacaattcaaaaagtagtaatgtcaaacaaaagataacttgtaaaattataaaatagtaataaaatcatgagaataattatggaggctatttaaatatagcaaacgttactaagggtacataacgatgacgtgcaatttaacatatatgtagagttcgataatataacataacataacataacattacgtgtcgaagtccgacattacatcagcatacctaaagacactaggtgccttagtctaacgttacatcacgagacctaaagacatgacatgtcgaagtctgacattacacgacgaaacataaacacatcgataagttcgaaacaaattacaagcaaagccacatgccaacatagaacataagaactacaccacgtagctagacgtggcacgacgatgcctaggacgttgtcgagtggaggtagtgccttcacccgtagggcgagctccatctgctgctgatcctaatagtcctgcctctgccacacttggtttctccttgtctttaggacaatgcttgtaggtgtgcccacgttcatcgcatttgctgcaatgcttcaccctgccagcctccgactcgtccatatcgttgcggatgcgacgagtcttcctccttccagccttgcctcggagcttcgatgggtcagaaatattgagtacttcatcgttagtctctatgaactccccagctatgccgaacccataaatctcgccgctccatgtatgatatattgcttgcttactgaagtactgtgaaacatatactgcatctggtatgccacactccgctgcggcagcaatgacatgggtgcatggcctgtggagcagcttcggctttgcataagagcaatgacatgtgccgtcggctttgagaacacactcctgcttcactctcttgcggtagatacccctgcctgccttatcttgacatagtatctcaaacctgtgctgttgggtaccttgcactagagctcgatgtttcatggcctttttacgcaactcctctagctttttctgcatgaaagttccaaacaaaatgctgttgttcggcatagagggaagaactgcctggaaccgatccctaaaatacctgcatgtcccatgtaaaataaactccactatgccaactagtggcagtccatggacaccgcgcatcacccagttgtaaacttctgccaaatttgttgtcattatttcatatctagcaccacctgtgtcatacgccttggcccatttctcttttggttcatgcagaatccactgagaaaatttccgaatctccaatccagttcttctaaccaatgttggactatccgttgggagaggtccaagagcttgaggagggtcagcatcggtggtcgatggagccgctgcacgctgatcactgcatttggctatcaactcatctaatcttttccaaagctcattgaattttttctcctggttctgattgcatagcctcttaaacatgttcatgagctccttgttcttgaattgcttgaagaaattagctcccatatgacgcatgcaccacctgctctgtacatcttcccactcaccagggtatcctcgttccatactcccaaactgcaactcttctatcgctcgcagaatgccagcgtgcctatgatgtatcaggcacacatttggcctcataccaacaacttttgttttaaccaatttcaggaaccagtaccagctgtcggtattctcactctcaacaaaagcaaatgccaagggcaatacctgattgttcccatctacccctattgctgttagtatctggcctcgatactttcctgtcatgaatgtcccatcaatgcagagaacaggacgacagttcacgaatgccatcttgcatgcatgtagagctaagaacgccctttgcagcacactcttgccaggatgttcaattgaggggaatttcttcactttgtaagagctcccagggtttctttcctcgataacaccaagcaggcgtggcaaattgtcatacgaggcttcgtaagttccaaatctcatctctattattttctgtttggccctccaggccttggcatagctaatagtatacttgtatgtctcttcgatgtgtcggattattgaccttggttcatatgtgagattatcgatgacatgcgcatacatctcagatgcaacaaatgcacatgtaatgttcctgtggtatttctgaacaccaggtagaaaacatgtatgcttggtaacgactgacactgtccaataatccttccatttccccttatacgcgtgcactctccagggacaaccatctttttccttaacacaccggttggacttggcaacccaaaactctctatgaagtgacactgcaaaatgttttaccgcctccttcatatcttctgctctactataaatcgctccctgaataatctcattttctttgtactcccatctcacactatcctcttcagagacgaccagcccagaaaaatcctcactagcccattctgctggattaatatccgtctcatcatctgacgaatcaccttcctctacacgctcgttgtcagaatcctccctctccatttcatccacaatggcaccgacagtctccccctcgtcggccactccacctggttgaatgcccactggagctactacacccccgtcctctcgtgcgttgacctcctccacagaagtctcatttacttcagcacttggtccctcgccatcatccatgttcatctgtacacatggatccttcgggtgaacaaacggaaccatagctagaggccacccacgttgcaatgcattttccacataccatctccatactcgagagttttgaactggcattagttcccaataaaaaccctcagttgcccgacttactataacattgattgttatgtcacttgtctgtggatcaactctcaagcccctcattaaccatccttttatagaaggtacactcctctcagccggtctatcaattcccctttctgatacaataaaatttgacagatctaccccagttggcccgtaacggacgtttcctgggccatggtaaacttggaatatttgtttgtttgacatatctgtcaacgaaataactagatcatattactctttcatgcaataaacatctacaacgcaatatcttcttgtgtatgccaatgcaacggtaaagtattaattccaaactagcagatctacgtagttaccgatatctacaatacgcacttctagattagtacaactaaaaccctaaaaatataatgtatttattcaaacaaagttttaaaaaatacacactatttaactcaatagtcacatataggatctatgaatattacctgaaatcggcgtctgaatccggcagggcttcgccccttcttctcttctcctcccctttcttctttttttttcactggatttgagggggaggaatgagggctgggggctgggcagcaggccttttataggcagcgaggcctgccgcccggccagagggcggcaaggggccgcctgcaaaatggccggccccgactggcttttttgcattcgggcccctggcggcaagggctttactgcaaaaaaccctccctccgtcaccgcccgtccctcccccgtttgccacgtcagcttgctgccccagaggtgggcggtagggtctatttttgcaatttttttggccgatagattatttctgtaaatatttttaaaaaaatctaaaaatgaaaaaaattctcgaggagatggccggggcgggctggccgccggtgaggtttgccggccatgatcggaggaagaagggctcacagattgggaatgatcgccgttagggaacgagagagatcgtgggccgtggggatctctactcggctcgttcggatgggccaaaaatctagcacatccacgtctgtgggctgggccctggaagaaaacctaaacgcgattccatggacttcaatgctcttacatatgtatttgacatggtctttggcaatgtttatgggaggtgttggcggtatggcatgagacccttcgaccaaaatctgccgaaggttatgcgaggggtggggatccaagcccgagacgtcaaagttagtcggggcgaagccccccccccccatggcgaagactatggaacaaggacggcgagaggcgaaggatcgtgcgggtactctactaagccggaggcctcttgggcgaaggatgtagggcgaagagtatatgtcaaagggagacgacttcgccaaagcaagcttgcccccgcgagggccgaagaagcctttcccggcccatcaagcctaggggccattgggccgacgatcgcctaacggcccatcaggagtccatgaacctctattacactatgtacccatgtaaatgtccctttcataagggtaaccatgtaaattcccctgtataaccaaaaccctagtagtaagaacctgtaataggggctataaatagtctcatagggccatgtaatagggggatccaagaaaaattctctaatcaatacactttactttcaaccactgttgagtaaccacgtctttcgacgtatgcagttgtcgtttcgacaacagctggcgccgaccatggggatctccgagcgaaaccactgagagcgaatgccaccgaagaaggtcgtaaaggagaaggttacaaggcgaaaggaaagcgacgctggggcggatatggccgctgaagagggagcagagccttcggcgcctgtcgccgaagatggaggagcaccatctacttccgcacctgcgccatcactaccgccttcggcccctgctacctctgtgcaggtgccgaacgcggctgacatggcgaaggcggctgcggcggcgagggcactccagaccagggcggagatcctttcgacaagtcaactgctggtgccccaagccgctccgtcgcagccggcagcggcccaaactgcgcttgccgctatgcaagcccaagtcaaccctgaccccgagacacaaaccgaagccgacatggaagccatgcgacagaacatgacacgactccaagacatgcttcgccaaatgcaagaacagcagcaagcgtacgaggcggcaaggcggtctaaggtcgcttcggcaccaatcctccagtattcggcaggctatgtcccaccccaagtctatccacaagtgccgacccagccccttccgccacaagtcacgcaagcgccaatgtacttcgtcgggcagccattgaccgcagcagcgcatccagcccctcatgtgcaactgcaagctcaaccggtcgctacccaagtacatcctcaaccgcctggccaagtgccacaaacaatggtagaaggggcttcggctctgcaggcgcagctccaagctttccttcagcagctcagccaacctcacaacatttcaagtacagccccttcggcctgcccggaggggaatacaagtcaaggtgcgcctagttagttgccttcgaatcagccaggtctgggggcttcgccgtggagtcaaggaccacagttcgactctatcaatgctgctcaggcgccaaccgttcggccgcaagcaccaacgccaggcttcggagcaaaccaagcaccaaaccagatcgccatgacatggtcacagccaactttcgacccattcatggcggctcatcaagcatcaccaatcggggccgggcagccgaatgccatggcccaacctcatgcgcaagccgtgatttcgcccttcgccacgccgtacccgcagcaaggtgccatgaacagggcagggggcgaaaaggggctaccgctgagtgggggaatcaagacccgtccaatcccaccccagttcaagttcccacccgtcccacgctactcaggcgaaactgacccaaaggaattcctctccatttatgaatccgcaatcgaagcggctcatggcgacgaaaataccaaggcaaaggtaatacatctcaccctagacggtatcgcccgctcttgttatttcaatttgacagccaatagcatttactcatgggagcaattgcacgatgtctttgtccttaactttcgaggaacctatgaggagccgaagacgcagcagcatctactcggcattcgctagaggccgggggagtcgataagggagtacatgcgtcgcttctcgcaagcccggtgccaagttcaagacataactgaggcatcagtcataaacgccgcttcggccggtttactcgagggcgaactcacaagaaaaattgccaacaaggagccgcagacgcttgaacacctacttcgcatcattgacgggttcacaaggggcgaagatgattccaagcgacggcaagcaatacaagctgagtacgataaggcttccgtcaccgctgcttaagcccaacaacaagttcaagttgccgaaccacctcctctcgttgttcgccagccccagccggcgatccaagcacaaccgccaaggcaaggtcaagcccccatgacctggagaaagttcagaaccgaccgtgcaggcaaggctgtgatggctgtcgaagaagtgcaagccctccgcaaggagttcgacgcttagcaagcaagcaaccatcagcagcctttccacaagaaggtccgaaaagacctctactgcgccttccacggacgctcttcgcacaccacggagcaatgccgaaacattcggcaacgtggcaacgcgcaagatccaaggacgcagcagggagcagcggccgaagcaactcgtgaagtagctcaagaacaagcaccccccggccgaacagcgccaagatgcgcaatgccagagtgatccaagtgattacaatggccgacccgccgatccaactgtcgaagcgacagaagaagatgcagctgtgaacggtccacaatatcacttcggcaggcgaaggggctccgcaatatctgaaccagcaaatcttttttgggccagaagatgccgaaggagtaatgttctcgcatcaagatcctctggtgatctcagccgagatagctggttttgaggtccggtgaatcctggtcgacggaggaagttcggccgatgtcatctttgccgaagcgtatgccaagatggggttgactacccaagcccttaccctagcaccgacatcgctccgaggattcggcggagaagcagttcaagttcttggccaagcacagttgatagtagccttcggcacgggggaaaacagacgcgaagagcaagtattgtttgacgttgtcgacatcccacacaactacaatgccatcttcggccatgcaaccttgaataagttcgaagccatttcccatcacaattatctcaagttcaagatgctcggcccggcaggagtgatcgtggtcaaggggcttcagccttcggctgtttcaaaaggcgatttggccataatcaacagagcagtgcacaatgttgaggccgaaccgcatgaccgggcgaagcacgcgccaaagcccgcccctcacggcaagatagtcaagatgcagattgatgatgccgaccccacaaagctcgtatcactaggggcgacatgggcgaagaagaagctaagaacatcctagaggtactaaaaaagaacattgatatctttgcctggggccctgatgaagtgggaggtgtttcggcagatctcatcatgcatcacctggcagtcaagccagatgccaagccaaggaaacagaagctacacaagatgtccgctaatcgccaggaggcagcaaaagccgaagtcaaaaaattgctcaaggcaggggtcattcaagagatcgatcatcctgagtggctggcgaatccagtgctggtgcgtaagtcaaatggcaaatggcgcatgtgtgtcgatttcacagacttaaacaaagcatgtccgaaggatgatttccccttgccacggatcgaccagctcgtggattcgacagtcggctgcgaactcatgagcttcttagatgcatattccggctatcatcagattcgcatgaacccggccgacatccccaagacagcattcatcacaccgttcggcaccttttgtcacctcaggatgcctttcggtctgaagaatgccggagcaaccttcgccaggctggtgtacaaggtcctttacaagcaattggggcgaaacgtggaagcttatgtcgatgacatcgtcgtaaaaagccgcaaggctttcgaccacgcgtccgacctacaggagacttttgacaacttgtgcgcagcgggtatgaaactgaatcctgagaagtgtgttttcggcgttcgcacaggcaagctgttgggtttccttgtttctgaaagaggcatcgaggcgaatcccgagaaaatcgatgccattcagcaaatgaagcctccgtcgagcgtacgtgaagtacaaaagctcacgggccgaattgcggtactcagtcgattcctctcaaaggcagccgaaagaggtttgcccttcttcaaaaccctccggggcgcgggaaaattcaactggactcccgaatgccaagcagtgtttgacgagctaaagcaatacctgcaaagcccgccagctctgatcagcccagcatcaggaagcgaactgctactatacctggcagcttcgccagtggcagtcagtgctgctctcgtccaagaaacggattcaggccaaaaaccggtctatttcgtctccgaagcattgcaaggagcgaagacaagatacattgaaatggaaaagctcgcttacgccctggtgatggcttcactcaagcttaagcattactttcaggcccacaaagtcatagtgccatcacagtaccctttgggcgaaatactccggggtaaagaagttactggccggcttagcaagtgggcagcagagctatcccctttcgacttacattttgttgcccgcactgctgtcaagtcctaagtgctagccgactttgtggccgaatggacaccggcattcgcccctgaacccgagcccattgaacagccctgggtgatgtactccgacggttcgtggtcgcacaagggggcgggcgttgcggcagtactcacttcgccaaatggtgtgccaatttggtatgctgcaaggttacagttcgacacaaccaacaatgcggcagaatacgaagccattattttgggcctaagaaaggcgaaagcattggggattcggcgcctgctaatccgaaccgactccaagctggtggtgggccatgtcgacaagtcttttgaggcaaaagaagaagggatgaaaaggtatttggatgccgttcggtctatagaaaagtgcttcagcggcataacggtcgaacatttacctagaggccagaacgaggaagcaaatgccctggcgaaatctgccgcttgtggtggtccacattcgcctggcatcctttttgaggtcctgtatgcaccaagcgtgcccatggacagcttggaggtcctggcaatcgaccaggtcaaattggtcgaagacccatacgactagtgaaccccgtttgtgaagcaccttgaaactggctggcttccgatagacgaagcagaggcaaagcgcttgcaattcagagccacgaagtataagatggtctcgggccagttctatcgctccgggatacttcaacccttgcttcgctgtatttctttcgccgaaggcgaggaaatggcgaaggaaatacagcaggggctatgtggcgcgcaccaagccgcaagaatagttgccttcaaagtatttagacaaggagtttactggcccactgtgttaaaagtatgtgttgagcaaatcaagaagtgcgaaagttgccagcatcatggccgaagccaaaccacgccccagtatgagttgcagcccatcacaccaatctggcccttcgccagatggggactggacattattaggccgttcctggcggcgcgaaacgggcacaagttcgcaattgtggccgttgaatacttctctcgatggattgaggccgaaccccttggtgtgatcacttcggcaacagtacagaagtttgtatggaaaagcattgttagtcgtttcggagtgccaaaagagttcatcactgacaacggcaagtagtttgactctgacaagttcagagaaatgtgcgaagggcttaacctggaaatcaggttcacatcggtcacgcacccgcactcaaacggagcggccgaatgtataaatggtaaaattctagaagcactaaagaaaaggcttgagggggcagcgaagggcgaatggccagaggaaatgctatctgttctctgggtccttcggacgacccccacaagaccaaccaagttcagcccgttcatgcttctctatggcgatgaggcaatgaccccaacagagctaggggctaactcaccaagggtgacgttctttaggggcgaagaggggcgcgagttgttgctcgaactcttggagggggtaagagtcgaagcactcgagcacatgcaaaagtatgccacaggcacttcggcaacttacaacaaaaaagttcgaccgacggagttgttgcctggtcatcttgtcctaaggaaaaaggcgaaccctatagccgttggcaagcttgaatcgaagtgggaaggaccgtacctcatcaagcacaaatccaggacgggatcctttcgactggcgacactggaaggctaagatttcgaccattcctggaacgctgcctctctcaagcgtttctatgtctagaacgggtggcacccaaatcgccaacttgtaaaaatgtatatatcgttatgtaagcccttcggcactatgtaagcctttcggcaagaaaaaaaagagaaaaaaaagaggaaaaaaaagggaaaaaaagaggaaaatggaaaaagacaaaaaaactagatgtagggctattatccaccacggaggcccgaacgagtataaaatctttgtgtcctctgccttctttttatttgtttgtgcgattgataatttgcggaaaaaccccaaggcaaatgcctgatcagtgaaaaaggccagggggcgaaacgaatcggccgaagcatcgctcgccgaacgattgaaaccgcaacagcttgtttcggagaacaattagccgaacaccgttacactcgatcgaaaggaaagcacgagtgcttcctataacgtagaacaaaacggatcgaaaacggaagccgaaagctgaaaagtcaaaacctatttcgctaatatatgcaaaggggccgacacgttccgacccaacaaaaagcacgtgaagtgacaatgcaaaaatagcgaaaaggaaataagacgcacctttatggattttaaataaaaatgtatcgaagaatacatcacaatggtacaaatgaagagaaaggagcaatggcgttacagcccggcttacagataaattacatcttcgccctcacgatctctctctctctaaggagtgatcgaacgaactaggttcgtcatcactactaatatcatacacaaccctaagaggagaagggggtgaaatacagactagactgtaacgacgttgagagatcgcctcctgccgatcagtcttctgatggtttcgccaaaagcgagccatgtcctccaaacgtcttgaatgaacaagatcgtagtcttctaaggttcgcccagggtgcgcccgaagccacccggcaaccttaaaaaccttatagctgcgtccgtttatcaccatttcacgataaacaggccgaaatgggcatcacacctttggcaaatcctttaatgccacaaatttcttgttttggtttcgccaactcccagaagggggccgaatgcacaactttcggcgaacaccctggtagacaatgcaaaaagggcaaaaggcgaattgcatagtaagaataggcgaaaaaagaaaaaaatattgcataatgtgaaatgggcgtaatcataaatacgccaaagacatcgaccatcaaaaagtggctaagagtgagtcatatatattcaaaatatccaagggcccctttttcggctacaataagaagggttagcggcagcccgccgaatacacatcgtttgccactcctggcgaacacaaaaagaagaaggaaaactacaaaaatctaaggaaagggcggagggcctcacacctgtgggtaatcctgggcatcgcctcgacccccttcagccgtcgcgtcctcttcttcgcaaaggtctgccgcctctgccttcgctagttgctccaaaaggcgctccttggcggtggaccggccgtccttctgccagaactgtttccgccacgcacgaagtgcgggcgaaatgtcctgcgcgctaatctcccagtcccccttcgcatagttagggaactcggcgacgtgctcgcagccgaactgttgcaggagacccatagtaaaggccgctgatacacgcgcacaacaatcgccgtacgcagttgggcagtccgaaaccgaaccaccagctttctgggtccactcggagaagtcgaaggccgaggcatcttcggcagggacccctcgcacttttgcacccatgtcagtaagggtgaggcgaagcgtttggcacgccgttcttgcagattcggtagttttcgccatctcccgcgaaaaccgctgcgactcctccgcggcgctcgcttcggccttgctgacctctaggtgaagagcctccatcttcggctcagtaaggttataataatccatcagcacggcggaatgggccttttctttccttaattcggcctggaggcgatcaacctcagctatggcttctctcgctttctccagatcagccttgaggcgatcgacctcgggcctagcctctctttctttctccaacttggattggagccgcttgttttccgctttcgccttttcagggtgttggcgagggcctccatctccaagttcttgcggcctatttcgtcatccttggcccgaagacggttcttaaacccgtcaagacgagcccgcacggttcgctctgtcgaacagtgagctgcaagaatctggatgcaaaataggaacggcgaagatagcaaatgttaattatgggacatgtaaaaaagaagaggaaaactaggaatagataaaaagcatacccgaaccgtcaagcttttaatagcagaacacccctcatcgaactcattcagttcggtgaacaggctcggggtgctggcatgtaagacaagattgcttactccctccacaaagggaataaggtctgcccgggtctcgaaatcgccatgggcgaaatgaggcgccacaagggaatactccgaagcagatgtttcgacggccgcacccttccccttcgccttgactagcggcgaaacaaccggctgacgcagagggctaccgaagaccctcgccccagctgtcaggacccgttccgcggaggctgaagccccggcggcggcgctacctcctgctccatcagcaccaagtaaaagaacgggggcagtcgaaaggtccaggctgcggccagcgggtgaagtcagagtctcgtcagaagactcgtcgtcgctgaagacgcgagcgacatcgacgagtcctttcttcttggatatctttttgaccggacctcccttcgccgccttgcctgccgaaaacgcaattagcgccttcgccccatccaactcctttcgacgaaggggggagctgtttgattccaccccggtctcattgtgacccgggccatggaggtgacgaccatcgccatctccgtttgagtcaaggtcacctctatctttttcgcgtttccatctctccacacaatgccgaaccacttctctgttgaccacctcccgttttgtgcatcacagccaccggaacgtgaccacgccaacgacgccctggagcacgcaccggagcgccgccgcttcaaccatcgtcatcgtccgaccattctcgtccacctcggagcaagccgctgcgccatcatcatcgcctcaacctcctcttcaatacgcctcaagaaccccagccggagatgtgaaggacttggagaacgcaacttttcttcaccggcaccgatctagaatcgcctccgccgtcatcatcgattactgctgcctcggtgagccattgttcgattcctcgcgcatacaccatctccttgacctcacaaccctcgtgcatgcttgcttgtagcagctcatcgtcccatttgagccgtcgtcgttcacccaaggaggagcgccgtcgccgagccgttccacaagtcatcgctgccgccaagacctcgacaaccttaactcgacccacggtaagcatcctgaaggctagaagaccacatgcatgcatccttttcgttcggaatcgacttccatgcacacatgcactttcaccccatgaaccaccgccgctcacaccactgtcacgattgtttccgacaacctctgaccttgagttaaccatgggtagatgcgcgaggagcttaggaatgttttctcttttggtggcaccgcaagaacggccgctgtccattgccggcaccgacgagaagctcgtcgagtcgccgctgctctgctgctgcccttgccctcttgctgagagcctgagacactgaccagcggaccccacatcattaggcgctgagaattccgcttagagagagtttaaatcttgcaaggtctaaattgtaaaatatgttagaatgacatgtggaaccaaggactaattagtaatgaatgaaaagaatctgaggactcttaatgattttggttcatcacatactttggactgcgggttgattcctagaaatctcaagggcctttctgcatattggtccctcactgacacgtggaccccatccttaaaaaatctgaagaataattaataaaatgcccaaacaaatatatgtttagcagaaaaatgcacaaagttgtaaaatccatataaaatcaaatgaaactcattttgagatgattccagttgctgtagattcttaaagttatgaactctattttagaaatataaaacttgacactcactgtacaaataatgtctctaaaatttatctaagataggtcatacataaaacatgtacaagcttataaaatacatagaaaattcatctcaactcattttgaaacaaaatcaaattctacagattcatcatcatgcactctctgattaggtgaaataaaagtaattacttactttgcatcaaatgcctctaaaactattatctctagaatgattagttttagataagctaaactttagaaattcatgtagaacacaatttagcttcaatttgagtaaacttaagttctgtaggatcaccaaaacatgtatttccatgttatgatataagattatatacttactgtgtagtaaaagtctctaaatattcatataaggatttactaacatagagcagccattaatttgtaaaacttgtagaaaattcatttttaatccaaatgaaatgaacaaagtttctatagaaccagcaaatagttatcttcaacatagtaaaataaaatttggcaccttttgtagagaacatagatcaaaaccttaacttagtgaaataagaatttaaacacatagtgttgtttaagtaatacataaacatgtatcagtatatatacactttaggtctaattaaacctaaataaaaacttgattgaccagtgaagccatagttccatcctcatccactaaaacttagaagaacttagctcatataacaatttctaggttaatataatatattgctagtctagattagagcatatctagtttataaaatatgaaccatagtagtaaagatcataaacatgtgaactaaaaatgttttagttaaccaaattattccttttattcaacttaaacatgaagtagcaagttctgaacctacaacttgagagtcatgcacatataaaacactatatgcctaaaacacgttgtaacttgtaaaatctataagaaaatcattataactccaaaaattgtgaaaccaaatgtattagtcttagaaaacacacctctacacctctgtgaagtctaatataataaaaatcactttacaaaagtatttcataacactacctaagactatactactataaaccgataaaacttctaaaattcataactcccaaatccaaatggaataagataaaataggaattatttcacctaaattcattttagaccagtacctaatcactgtgcataaatcatgcattttagagcattttggatttttagctctttcggtgtttaattgcatatcgtgtcctttatctagataattgcataattggtgaagaagtggattaggtgctaacatttctctgatcaaggcaagttttctcctcccatcctttgaacacatttaatcccataatttgaggaatgaaaatatttgtttgcaaagttgcatgtgaatttagactatatcggtatttaaaattgggttaaggtagttatgacctatttgctgcataccccaccttgaataattgatcctcttactgtttgaacccttagaaatggttagagtacactctttgtgctcaaatgggtttatatatgctctatgtgcaactacttgcttagccatgcttagaaatatgcaaatgctcattccatctgtaattaaaatgtgaattttgatacatgaacccttgctggaataaaattaatatgatgggtatttgcgaactaaaatgtataaaatgtgattttatacttgggcggcaagtggtgtgcatatggtgctagttgcataccgatagggggagtgtttgcccaagtccataaggaccgaacttgtgtcacccatttaaagttattcgtatatccacatgtgctagtatgggatggcctaagctaattaatctatttaggactagccttgcattctagtaggccggtgtgtatgagttagtcgataattctgaggaattagtcgatgattcagagaaactttctatttgccccgacgtggtagtttaggtgactaagtctatccaatacaacggtattgtgccacgtgggtgggttcccgttgtgtccgccaccacggcgttaagtttaaggcgtgggcccgccacttaacggttctaggcatattccaagtatgcctaggatggaggaacacgtatcgtgttggtgcaaggctaggttctaagttgtgtaaaggcttcgttatgacctctagatcacattcgacatgaagagtgtgatggagtcttgcaaactcaaaacaaactagagagttcatatcatgtgggtaaagctgtacaaactctgcagagttctttaaactaatcgattagccgtactcacggtcatgaacgctttggtgatgtgtcatgagtatagactttatgttttaaaatgtgatcatgtgacattggtttgaaattgataaatgtgttgagttgtgtgtgtgaggtgatatattatgatttgttgtcaaaggatgacaaccagagattgattacgatggaattatgatgaacttaatattgtaacttaaaattttgttttgttaattgaagcatcaactcctttacaaaagaattgcgaaacaaaacttgctttatgctgaaattgaactacatattgccttcctttgaatatttgccttcctttgaatatatgccttacatgtagtatggtaggattgacttgtgcttgccagtacattaacttgtttaatgtacggactcttgctgttgatataaccttttgtctgcaggtttagatttagtctttgagtgatgcgggttccgattgctgttgatataacccctagtcggtgtgcttgtgatcgggtagtcaagcttctgctgttctctgataagtttatttggccggtcagcctatgtaattattaagatgttgtaagtcttaagtttctttcatcttagttgtgtttgctatgtataatcatgcttaagatgaaagtgtggatctagggcacatcctgggaactagattcatatgagtatgagttaggaatatttgagaggttgtagatctttagctatttttgtcaagtctcctgaatgtgtaacacatctagtcaccgccttcgagtggtttgacgggcacatctcaggctgaagttgactgacaggctaagggcccagcaatgtctccaatattcctctctcgaggcgtcggatgtttcattatgcttgtttaatgacttgaattattcacttcatctctcaaatataatggaaggtccggagagcctatggagagcctatgacaatagcgccgtccacggcgatcttgggctttcggttcggcgcaatcgccctgcgccggcaccgaagggcttgtgcggaatcagaaccagcctcgaaggggatggtgtggtaaaaccacctcgccatccaatggcggtcccacttcgacatggcggcgttcaccggctagagatcggaccgctcggggcgaacattaaagtttacgctcccgaacactgtcttcttcgttccaactggggtaatcaccgtcttcgaattcacggtggcgaagaatatggcgccgaagagttcgtcgcttggctcaaacccggaagtccggcacgcccagtcgaagatagcgatccggaccagcgccgacgggctcaactgcgggagctccacctggaaaaggcgaagaatctccggcaacgagttgcacggaaaccggagccccgcctcaaaaaacacggcgaagaccactgtccggttgtcgacgggcttcggtacaacggctttccccggggcgaaagcctgtccctcgactaacgccctagagctgaccaactttgccagctcactatcgtttatgagagaaattcctaaataggcggtggtgtcatcgtcaatccggccggggtcgggccccttcgccgaagaggggttaggcttgcggggagccatgacgaaggacgtatgaagtggcgaagtgtgtgtgcagtggcgaacaaggggagtgagtgagaaatctaaagggccaaggggtgccgtgagagcaagaacggagaaagagagtgcgagcggtgaaaatggcaagtctggcggtgaaaagataacggggaagcatatatagcccaacaaggcgacgattcgcctacccaccagtaataaagcgccacgtgtcgtgagggtaggcgaaacggtaaattcccatcgaccgagctacacagtaaaaagcccacaaagggaaggcccattactgttcctttcggtccggtaaaaataaaaaatatatatcaccgtccgcaggaggcgaagagcggcaagtcaataccagccgcacagacaacaaactttatttgcaggaacaatgtaggtttcggcaggagcatcggttgaaagggggcgccacataccataccacataccacatggtttgcatggtctcggccgaagctccaatctcacccttgcccatgaggggcttgttggcggtatggcatgaggcccttcgaccaaaatctgctgaaggctatgcgaggagtggggatccaagcccgaaacgtcaaagttagtcggggctaagccccccccatggcgaagactatggaacaaggacggtgagaggcgaaggatcgtgcgggtactctgccaagccggaggcctcttgggcgaaggatgcagggcgaagagtatatgccgaagggagacgacttcgccaaagcaagcttgcccccgcgagggccgaagaagccttttccggcccatcaagcctaagggccattgggccgacgatcgcctaacggcccatcaggagtccatgaacctctattacactatgtatccatgtaaatgtccctttcataagggtaaccatgtaaattcccctgtataaccaaaaccctagtagtaagaacctgtaataggggctataaatagtctcatagggccatgaatagggggatccaagaaaaattctctaatcaatacactttactttcaaccactgttaagtaaccacgtcttttgacgtatgcagttgtcgtttcgacaataggaggttatgattttaaaatcagctggttgatagttggcttataagaatctggagaagctgctaaacccgaattttgacatctagcttattttctgaattatgtaattattgttttatatagattctatgtgaaaaactagactatttaaagaagcttttgatttcgagagaagttaccgccaccagaagcttctcaaacttgctttttgtgttatgtgttgtatcttgctacttccgcaacaacttcaaccaaaataaatcccccccaaaaaaaacctcctatgcctctccaccatagagacttggtctaaatatttatcattgagaaatttgatgatttggtaaattttagacctgccacccgtgataatgacacctggatcaggatgacaaaacatcaaattcacaatccacagaatggcagatccacaaatcccaagagtatgcaatgtatatatgacatcttggatggttgtccaaaactatgaaatatcaaaagcaatgcctttgttcaagcatcctagcatgggcattcaagaaatttgcgcactttacatccctacggaaatcaaagtagatgcaatcctcttgtgatatgcctactgaataagtgacactctcgccagaactgactaaatcttcattgacgataccatttgaatggcttttacacgccatttcctcaaagtcaatgtcacggccgtgatatttctggctttcaggatgcacaaccttcacaccttcatattcgcaatggaaacaacgaccttaggaaaggaacatcagttatagcaataaataaaggattaacgcgacgaaaagatcaaaaaaaggaaaaccaatgtcttttcttagaggagaaaccaatatgcaaggctacatcaactaggcagtttctattccaagggaaaatttacaatatgaaaagtggatccattttacttatcttacctttttctaaaagcatggacattataggacaacactaaaaaaaatccaaaataattatcagtacaaaagcatttttttggtgtacgtccaatggacggaatgcattgcaaattaaaactaataagtaaataatagatagacacattattctctttctttttagcaagcatgacctattaatttggctaaacagacatcttgctttttttatggttctattttcttttttcctagccctaggtgatatcctaatctctagtaatcatcaagcacggtcaacacaggccttcaagaagcagctggattgtcagaatattttaattttaaccaaaacatgaaaccctgtttggtcggatgcattttgaatttctgatgccttttcttctaaggcatgtaattatgcagaatagtctatcatatagttacacaaaccatcgcaacatgctgtatatgtaatgcaacggctgcaactggcatgcttctagctccatgatctagtgttgtagaaatatgcatatagagagaagagagcataccaggatgtcccatgattggccagcacaatggttcatcggttatatcattgtcgttgcaacactcagcaaagaagagtgttggaattactgtgtcagaagaatgtgatcctcttgggctcgccaaaaagttgacatgagaatacttggatttgtaccggatcttgcatgaactatcaccataatggagaggagaaacaccagacttgataacatatggattcaagccgcagataacatgaagatcatattccggtccctatataacagggcaaataagaatcatatgcacttattatttatttatctttttttaaaaaaaaatctataaagggtaaaaggggaaggaaacaacttatagaccttagttcgttgtgtgtatttcttcagtgcagcattcaccttgctgcaaatgaaattctgctcagcctcgaaatcttgctttatgttcgacaataacctggatgcaccctcggtaagtaccggaactgtctcaaaagaacaatggggagaagtggatggttcttgtgataacatcagcgagagcagctgcacatcaaagctaccacaagctttcagtggcaatggcccgaagaaagctgacaggtaaaaattcaccagcgcatcacgatccggatgatgcgcagcggtggccgcggccttaaatccaatgcccctgtcgaacttgtccttcatggcgtggccttcttgccctgccatttcgattgctctctgtagattcacctctgccaagagcaggtatcgaatggcttgctgtctggagaccgtaggaaagcaggcgcggagataagcaacaaggccaaggagagatctgcaagcagtagaaacaagggttcttgagcagatcatggccacttcagagtactcttcctctgcaggaaacattgtgtcataccaaacggtgttgagaacgatgttgtgagcagggttcatgaaggggccatagcagtggccagccttgaggagtcccctgtggtagcgccgctgcaagaactccctcggcatcttggcaagaacttggaggtacagtccatagatcttgtcgacgacgatgttcttcagagattttgtgcgcacgaatggtggctgcttgaccttgttctggaggaattggggagcagtaactccggcgaggcctggagatcttggtcggtggttcgtgagcaatccatggaggttgacaacgtcggtgcaggagaggcggccttctttggctaggatcccggagacctgctccatccgagcggcgagggagaacgacctgttgacgaacgctctgggcttgggttgccacgccgcgactgcgcgcatctgagcgcggtcttggtggtccgggacgcgaggatgaaggccttggtgttacgatcctcctcgacgagccgcgcggcggcgaggaggtcggcgttggccaggcggaggtattgcagcgcctcccaggtcgggaggtaggggaagcaggcgacgaggaaggcgacgagcgcttcgagtgaccgcagcggcatcctcatgtcgcggaggcggctgtggttgggcgagtgccaggtgacgtcgctggtgtcggcgacgatccgggagagcgcgctccgccgtctcctcgccgctgtcttgccgtcgacgggacggccaagaaccatgggcttgcgctccgggaggcgcttgtaggagagggtgttgacgacgatgttggagacgggatccgagaagccggcgcagaggccggccttgaggaggcgcgggatcagcgccggcatctcctccaccggcagccggtccagcgccgccgcgtagtgcccgttgatggcatccagcagcgccgatctgttccgaacgatacgatcctcgtggtcgtatctgtaggggcgctccgcgagggggtctctagcggcgccgctccggcgacgtttgccggccatgatcggagaagcggcagagcggttcgctcaggtttgcccttgctcaattaatcaaaatcgattccttttagaaacttaaaatccacagagcgccagtgactgccgctacctcgttgccgatctgcagcgaccccgccaccgacgtgcgccgcctcgctcctgttgctcgcggctcgttgcgatgcctcacgcgccgatccggtttattccggtgggcactctcccggcttgaagcccaagcgtacgtcccgagtcccgacgaccgcccactctgatgggcatgggcctagaggttttaggaaaggaaaaggtacaccgaaggtccctcaacttgtcatcgagttacaaaatcattcctcaaccacagaaccagatactggacatccctcaactaataaaaccgttcactttagatcctccggtggttttgaccctagttttattccacatggcggctgagttagcgtgagacccatgtgggctacacatgtcagcattgccacatcagccttctctctcttttcctctgttctctcccatcctcatctctctctctctgttctctgcgactgcgaggctggcaatgcgaggcggaaaagaaggagggcgtcagcgaccggcggccggcgaccggtgaccggcgacgcgacggcacgcgggcggccgggggagggccggcgcgtaggctcccctgccggccgccgcccacgaggtggcggcgggggacgagctacggggaaggggcggtgcccggccagtgagagaggaggagggcggcgttgtacctgctcatctgggaccacccgacactgcaggtccaggagatgcgggcggcagtggcgcacgcgtcagacttcccggcgctgccgctagccctcgtatgggacgtgctccgcgccaacatcttcgactagctcagcgccaccttcgggttcaacgggaataaaggagcacctcgtgctcctcctcgccaacgcgctccgcatggacctcctctacacggcgatgtacctgctcatttgggggttgatgagactnctgtacaatatggagttcatcaatcaactcgc

SEQ ID NO: 7147 - DNA, 30337 bp, Oryza sativa
attccacttgtgggtcttcaaggttatgctcaagttaagttcctgaaggggttcagtgaagatgccaaggtaatccatcaaagggttgctcttcttcttgtgatagattgttttgcaaataacttctgaaactaaatattactcatatttttattaattatataaagctaagattatgatcctattaagttcaagaagtatgattgagtttctaaatttcatgacgaataatgagaaacaacattcactctagatacatttttcacaacttgcttaaattgtgacaatgaattcctggtttggcagatgttgtatgaagatgcaagtcaagtggctactgatgcagtaagcagcatcaggactgtagcttccttttgttctgagaaaagagtgatgacaatgtatgataataaatgtgaagcttcgaagaatcaaggagttagaacaggaatggttggaggccttggttttggtttctcattcttgatgttgtacctaacatatggtctctgtttctatgtcggagcacaattcgtacgccacaataaaactacttttggggacgttttcaaggttagtaaatgcaaaactttaatattaaactttttacccttcagagttttcctctttttaaactcataatccctccataaacaagagatctgcttttacgggggtgatttgacatagttagtcatgttttgcaggttttctttgcactggtgttggcaactattggaatatctcaaacaagtgcgatggcttctgattctacaaaggccaaggattcagctatctccatatttgctttgctagaccgcaagtcacaaattgactcgagtagtgatgagggtaggacattggccaacgtcaagggaaacattgatttccgacatgtcagcttcaagtatccaacccgcccagatgttcagatcttcagtgattttactcttcacataccctctggcaaggttatccaatttatatgcttgttgcatagttatattttctgcattaacatatccagcaacttactatatggatttatgcagaccgttgcacttgttggagagagtggtagcggaaagtccacagcaatcgctttgctagagcgattctacaatcccgagtcaggaaccatcttgttggatgaagtagaaatcaagaacttaaaggtcaattggttgagggatcagatggggttggtcggccaagagcctgtgctctttaatgacacaatccgtgctaacatagcctacgggaagcatggggatgtcactgaggaggagctcatcaaagctgcaaaggcatccaatgcacatgagttcatatcgagccttccccaaggatatgataccaccgtgggggagagaggggtgcagctatctggtggccagaaacagcgggtggctattgcgagggccatattgaaagatccaaagatactacttctagatgaggcaacgagtgccttggatgctgaatctgagcgcattgtgcaggatgcgttagataatgtgatggttggcaggactacgattattgtggcgcaccgcctctcgacgatcaaaggtgctgatatcattgcagttctgaaggatggtgcgatagcggagaaaggaaggcatgaggcattgatgaacatcaaagatggtgtctatgcttcacttgtgaactccgttcaggctcatcataatactcaggataagatttttgttttttatttaccctctctggggatgtaatatatcttccttgacccttttttgttttacaattgagggttgtagtagtattaattatttggattttaaagtgggatttgagaaggtgctctctgtatgtatctacgcggtgtcggtttattaagcaacgagaaagaaatattgtcctacagatgctgatatgtgggattgtccatgttcgatgtgcatgactgcaaatgagctcatttttgtgctgtacgtttatacctatgtggttatcccaagattaccgtatatgatatgtaaattctgcacatacattttcatatgcagcaattcaaatgctctacctatgtcattatcgggaattaattaaccagatggggagaagcaaaacataccatgataccgacgcaactgaagatcgtgtttgttgccgttggaggatcagtgaggcacacgcacgcgccgggatccataccgccaacggcgccaccgcgcgagcagagcggagatctcgacgaatcccccccgtacagcaagcccagccacggccgccggcgacgctccccgagttccgaaggccgctcgccgccaccgcgacaaccgcgtggtcccgtgggcatcgagtagccccagcaccgtgcggcgcctaccgtccgcaagcgtatcccaagggggcccggccggatgatggccgccgccgccggcgacggcggcggcagccggcaggcatcgcctctttcgccgcgcactgggccgcttggggaaatcgaactctacggcgaggcttctgaagcgaaaggctacgtcgggcgttcttgggccagatcaggccggtttagaggcggcaacgcaattttgcttggaataagttcactctaggtcccttaagtcaaaaatttatcattaaaccacaataacagataagtatgatacgtcctcaactccgaaaaccagtgaaataaggtcctaaaacggttcggaaggtgattttaactgacgttgcacttaaagttaagaaaatactatgggactcacatgtcagcgagtgttatgttaaaattaaaaaaaattgcggtgggcgccggcggcaagccaggcttgccatgctcagccccagctgccgttgccacactcttcttctcgctggcctctgcatccctctcgacaacgcctctgtacccgaagctgaagtcgtcccgctccacgccgtccgctgccgatcaattagtcaagtagcaagaacagagcattataagctcgccgccatatgcaaccacggaaatacgggtgcgagggagggtggtgtgtgttgtacctttacacggcgaagcgacggtgatgcggactttcttgacagcgatgcagacctagatctcaatatttttttttataaaaagtataaaattttaactcatcctattttaaatgtaggcctcaaatttagtaggctaaaatattatgtccatttccaccatgcgtgctcgcatgcctcatgttggagatatatagcgcaactctatggaaaattgaaggcaagtaatgaagagaacaactagtagagatggaaatggtcaattcacgattatttcttagcgttgttttttgtaataatcaggcaagaaacattttctttagaaaaagatgcaggaggcacatatccaggctgtaaagacgactgacaatatggtcagctggtagtccagccgagagcaacgtgtgccatcgtttgggttacttggcactttcgcactctccaccatggatgacagatgttctccggtgtggtcgatgttgtccgggaattgaagtggcgaaatacatagcgactgtgccactgccactgccagccgggcgccggccacacccgccagccgtctgggatctacggtggttatggtcgcgagagctcgatccagcggctttcgacggtagactgtagagagatcgattggtgtcaaactgtcaataatgaagcagtggagcgctggatccttgtgtctcactcagtcattaatttggtctaaagatttccaaactgtcaataatgttctgggtcgccaagaacatcaaaatgtcgtgtatgcgacgattagtctcgcttggaaagacttggacggacaacgggtcgatggaaacaataggacgcaaggcacgatcaaagaagtttcttctcgatcgaattaacgcagagcctacttgaggacgagaagatcatgatgtcgtcgtggatatataccttaccatggatacaaactgcgtccaatacttgacgtcaacacgttaagtccgcagtcttaccgcactaaccaccaaattaagtggaaattaatttgcaagctgagaacgatgccacggactaactgtatcgtgccaaactatcaaacgactcacgttatactacaatgttttggaaactgttttcattccatgggaagatatccagtcttttttacatatcatttaaacagttatcatttttttaaaaaaaatgacaagattcttactataaaacatataccgctccacaaacttgcaaactaaaatttaatttctataaattgtataaaaaatatactaactacgaatatacgttaattattttcagtttatttcatgttttttacaatttgtagaaattgatttcagttttgtatattcatggagtgatatattttatattaatctgtatatgttgttaattttttaaatttaataactatttagaagacatggaagaaataaaaatccatgccccaatgtttatataaacgatcgaactccattcgtccagatcacctcatgcataacacattacatgcatttgcaagccatacgctctctgtaatatggataccaaattgggagcgcttgctctcatgctcccgcttctactgctgatttccgctactcgcgtagcctacggcggcatccaacccacgccgcctcccgcgagcttccaagccgccttggtccgcatcgagcccgcaggcatcaactacacgcgcgccgtgcagcgctcccgctcccgcctgtccatgctcgccgccagagcggtgtccaacgcgggggcggcgccgggggagagcgcgcagacgccgctgaagaaggggagcggcgactacgccatgtcgttcggcatcggcacgccggcgacggggctgtcgggcgaggcggacaccgggagcgacctcatctggaccaagtgcggcgcctgcgcgcggtgctcgccgcggggctccccgtcctactaccccaccagctccagctccgccgcgttcgtcgcgtgcggcgaccgcacgtgcggggagctgccccgaccactgtgcagcaacgtcgccggcggcggcagcggcagcggcaactgctcctaccactacgcctacggcaacgctagggacacgcaccactacacggagggcatcctcatgacggagaccttcaccttcggcgacgacgccgcggcgttcccgggcatcgcgttcgggtgcacgctccgctccgagggcggtttcgggacgggctcgggcctcgtcgggctcggcagagggaagctgtccttggtcacgcagctcaacgtcgaggccttcggctaccgcctctcgtccgacctgtccgcgcccagccccatctcgttcggctccctcgccgacgtgaccggtggcaacggcgacagtttcatgtccactccgctactcacaaacccggtggttcaggaccttccgttctactacgtcggtctgaccggcatctcggtcggcgggaagctcgtgcagataccttcggggaccttctccttcgaccggagcaccggggcgggcggcgtcatcttcgactccggtaccacgcttacgatgctcccggaccccgcgtacacgctggtgagggacgagctgctgtcacagatgggctttcagaagccaccaccggcagcgaacgacgacgacctgatctgtttcaccggggggtcgtcgacgacgacgttcccgtccatggtgctgcacttcgacggcggcgccgacatggacctgtccaccgagaattacttgccgcaaatgcaaggccagaacggggagacagcccggtgctggtccgtggtgaaatcatcgcaagccttgacgatcatcggcaatatcatgcagatggacttccacgtcgtgtttgatctgtccggcaacgcgcggatgctgttccaaccgcccaccgcctgatacgggagattatgaccgttgattttgtgcgccgtatgtagtactagcactctagcagtgtagcacgtacaattgtgccgtagcgaataagttctgcacaaattattttctgccatccgcgcttagttgtaagtacgcgagcttatgtaatagtcttccaagagaaattgaacgggcataatactgcatgtacggttacaatatacttataaacataaacgtttaaacacatatatagtataccatatgattagtactactagttattattttccggttctaatgtaaaaatacaaacgaaactatagagagtggaatttaaatgtaactctcgacggacgtctagttgtttacatgtaaattaaatagtcatgatttttttgcaaaaaaaaatattgaaaatgtcttaacagtaatatatctctatctccatctctatatactattataaaaattaaagatgtttccgtcagactttcgacacgtcatccatgttagaatcggttttaattttatgtttgtgttaagtcctatctctttttcttacgccaaagtgtctatcttatctaagacgtgcgcgatttaattgggccccgcaccttttcacgcgtccattgccgcacgcaacaattgggcccgtgcccgggcctgtttttcacacgcgtctttgcgtgccatggcgattgggcccgcaacacccttgcgcccacgattttgtcgtttctgcatgtccgattgggactgcgtcaccctcgcccgcgatttaaaaattgaagatgtttttgccgaaactatagtacgtcatctgtttccgattcccgtcacgtgtaacattcattgcgaagtcacgactcgcgagcgaactacgagagagagtccgtgtggatatcatgtacgtcattgtcctaattatccgattctattcgtattacacggcacgtataatatgttagcatgatttcaagtcagtctccacacatgctcgtatgtactaccagggccgttacaacgatccataagaatacaacgatccataagaatcagttttactttcgaaaataacatcctaactaaaataaaggataatcgaagttgcagattccgtctgccattgattctctgccggacttgagataaagctacgcgataaatcgagctcgtgttttgaggcctcattgtttggcttatgcttattcctagccaaattttaaattttagaacttaattttaaaattaacttttgatttttttatcgtactttattttatagcatttgcttttgagtcactaagaacatgcatataaaagatttgcacacaaataggagatggattctaatctctcgggtggacgtccacccgtttcttgcatgccacctaaatgattataaaaaaattttccaaaaataattataatataggttaatatgtaatgtatcatatcacaaatatgtaagttcaaattcgacttctataagttgtaacagaaataacaaattaaactctaactagtatacacatattcacagtccaatttgttatttttgttacgacttgtagaagtcgaatttgaacgcatgtttgtgagatgatatattacatattaatctatcataataatttttttaaaaaaaattataactatttagatgttatgcaagaaacgggtccacccgagtgtttaaagcaatttcccccacacaaataatctttttttttagtaagtgattcgaataagcacatgaataaacgaaataatgggctttgattatttatccaccgatacatatgtacaaattaaattggttctagccattgcaacgcacaggcatctttttagttactctaaaaaaatacaagttaaaatccaacttttataagttgcaacaaaactaaatttaaccttgcaacatgtaaaagttcaaaattgaccttgcatgtgttatgaagtgatctatcacatattaatctatctagttaatttttaaaaaatatttttacaatcatttaagtaacatgcaaataattaaggtcatctgttttgacaagatgagggcatgtttggggggcttctgacagctgcaacacttcctggaatcaaaagctctctcacaaatagtctagcttttcgtccaaattctgaaaagctagttgtcgaatttaaagaaatgagctagaatttagaaggaaagaaacacatattttttagattttcaaaaattagataccaaccagtaacttatcaaaatcttttaactccaatttagtcatggacactagtgggccttgcaggctgcaggtgccgattgtacgtacagtactacttggaataagttcatctaaggtcccttaatttgtcaacgaatccgattttcgtccttcaaccaaaaaaccaattacaattggtccctcaactatcaaaaccagtgcagatgaggtccctcagcggtttggatggtggttttggctgacgtggcgtcttcgtagctaatttgactttgtctttatttgacgtagcattgacatggcgcttacgtggcaatgtgagctggaaaataataaatctcgtgggacccacatgtcagtttcacacagaaattaataaaaaaaggtggggcccacgtgggccccacctgtcattctcagccctcctcttcttcctcctctccccatctccctctctcttcaactctctcccctctcctctctcgcgacgcgcgcgacggcagaggctcggctccggcggctatggacggaagaggtagggggcggcgggaggtggacctagctgcggcgaccggcggagaggaactgggcgtcagcagcggaagcggagtctcgaaggctggcccccaggcgatgcggaatcgacagcgggagctgcgggaagacggcagccgctgtggccgcccgcgcatggaggagaggtgggagccagagagcgcgagctcctcctcttccgcgacgccaccggcctcaatgctcgatctcaccctcctcgcggcgttagagctccgtctaatattcttgtcgagatccggccagagtagcaccaagcccacgaggccaagctggccatcgtcccgccacagctcgatgagacgatggtgctcctcgattggtgagctcgagccggcggccagatgcagagcggaagaggacgcagagcacgtgctacgacaagtccgcccggcggccggctgtgtccggtgttctgtgttcatgtgcgctcctccatgggggaagccgccccggtgtggcgtgcaaccgcggggaagaaacaggctttcaattttttgcagcggctgcatttttcgcttgatttcgtgctaaaattttctgcttgttggaattaatgaatgggccttagcccattcgaagattaattctttggaaaatcacaaaagcccacctcatgggatggcatgcatgtggagtttagtaccaccttgcttattctaggagagggggacctccttaaaagggaggatgccctcctagccacttgaagcatgtgtggtggagagaagaggggaaacacgcgcgctcgctcgcctggcctggcagggcagggcaggcggcgcgcgtgcacgacgtacgcgtcgaatggtccgaaaaattggctcctcacccttgcgcagatgcagcctccttttgcagttttgttttgctgcaaattcggattcgttttgttttggaaacgttccgaaaaatccggtgcgtgcaaacggcgtggagtccggataagttacgcgcgacttatccggttcggttacgcgcagtagagatcgtgcgggcgccctgatcaagcgacccttctctatataaaccgacccgccgtcttcacgcaatatatgcgaaaatcaatctagggtttgcctcctactctgtactgcgccgtcgctcgtagactactccatcccgctcgccggcgtgcaccagcgatcgggagagcaggtctccggaacctctgcctttgacgtcctgcaccgggagaaggcggcaataaggtttttgggaagcgcttcgcgcgactgctccctgctcgttcgcgacggctcgccttcctcttcgctcgcgtgtttcgtgccttcgtagacacctgcgaaaagtttcgaccaagcagccggtcttttcgtcacctcggtacgtgttcaatatgttgcgcatatttgatctgttcatgttattctgcgtagtttacatgtgtagatctaatgatgcgttcatgctagttttcatctgtaatgtcatgatttatttatggaataaattaaatccttatatgcccataatctcaacaatccaaaaaccttattataggcactgtgattttactatggctggttttgccgatgcactgaggccggataaattcaccggtgtgcattttaagagatggcagatcagggtcactctgtggctgacagctatgaaatgcttctgggtgagtactggcaaacctgaaggagttcttactgctgaacagcagaagcaattcgaggaagccactactctctttgtgggatgcattcttagcgttcttggtgatcgtctggtcgaggtgtatatgcatatgaccgacgctaaggagttgtgggatgcactgaatactaaattcggtgctactgatgctagcaatgatctgtatatcatggagcagtttcatgactacaaaatggctgacaaccgttctgtagtcgaacaggctcatgagatacaaaccatggctaaggaactcgaactccttaagtgtgtcttacccaacaaatttgtggccgggtgcattattgcaaaacttcctccatcttggaggagtttcggtactgcactcaaacacaagagacaggaatactccgttgaggggttgattgcgtctcttgatgttgaggagaaagctcgggaaaaagatgccgcgtctaagggcgatggtgggcagtccagtgccaatgttgtgcacaaggcccagaacaagagcaaggggaaatacaaagctcagcagaccaccaacttcaagaagcagaagaagaacaacaacaatcctaatcaggatgagaggacttgctttgtgtgtggccaagttggtcatctggctaggaagtgtccacaacgcaaggggatgaaggcacctgcagggcagacttctaagtctgctaatgtgaccattggcaacactggagatggaagcgggtatggtaatttacctactgttttttcagttaatcaatctactaattggtgggttgatactggggccaatgtacatgtttgtgctgacatctcattgttttcttcttatcaggtcgcacggggttccaccgtcctaatggggaatgggtcacatgcttctgttcatggtgttggcacggtagatctgaagtttacttcgggaaagatcgtgcagctgaagaacgtgcagcatgtcccttctatcgacaggaatcttgttagtggctcccgtctgactagagacggatttaagttggtttttgagtctaataaagtagtcgtgtctaaacatggatattttattggtaaaggttatgagtgcggaggcctgttccgcttttccctttctgatttctgcaataagtctgtgaaccatatttgtggcagtgtggatgatgaggctaatgtttggcattcacgtttatgtcatattaattttggcttgatgtctcggctttccagcatgtgtttaattcctaagttttccattgtcaaaggttctaagtgccatagttgtgtgcaatcgaagcaacctcgcaagcctcacaaggctgccgaggagagaaacttggcaccactagaactcctacattcagatctttgtgaaatgaatggggtgttgacgaagggtggaaaacgatatttcatgacattgattgatgatgctactagattttgctatgtgtacttgttgaaaacgaaagacgaggctctagactattttaaaatttataaggcagaagttgaaaatcaacttgacagaaagataaaaaggcttaggtctgatcgtggtggagagtttttctcgaacgagtttgacttattctgtgaggaacatggcatcatacatgagaggacgcctccctattctcccgagtctaatgggattgctgaaaggaagaaccgcacactgactgacttggtgaatgccatgttggacaccgcgggactgcctaaggcatggtggggggaggcattgttgacctcaaatcatgtgttaaacagagttcctaacagaaataaggacaaaacaccatatgagatatggattggtagaaaaccatcactttcttatttgcgcacatgggggtgcttggcgaaagtcaatgtaccaataacgaagaagcgcaaacttggacctaagactgtggactgtgtttttctgggatatgctcatcatagcattgcctatagatttttaatagttaaatccgaggtaccggacatgcatgttggtacaattatggagtctcgtgatgctaccttctttgagagcttttttccaatgaaggatacacatagtggttcgaaccaaccctctgaaataattccagttcaatcacaccaccagaacaaactgatatacacatgaacttgtctctgaggaggatgtcagtgaagctcctcgaaggagtaagagacaaaggacggctaagtcttttggtgatgacttcactgtgtacctcgtggatgacactcctaagtcaatttcagaagcatatgcatctcctgatgcagactactggaaggaggctgtccgtagtgaaatggattccattatcgctaacgggacttgggaggtgacagagcgaccctatgggtgtaaacctgtggggtgcaagtgggtgttcaagaagaagcttaggcctgacggtactattgaaaagtacaaggctcggcttgttgctaagggctatactcagaaagaagacgaagatttctttgacacttactcacctgttgctagattgaccacaattcgtgtgctactttccctagcagcctcacatggtcttctcgttcatcaaatggacgttaagacagtttttcttaatggagagctggatgaggagatctatatggatcaacctgatgggtttgtagttgaaggtcaagaaggcaaagtgtgcaaattgttgaagtctttgtatggtctgaaacaagctcctaagcaatggcatgagaaatttgacaaaacattgacatctgcaggctttgcagtcaatgaggcagataaatgtgtgtactatcgccatggtgggggtgagggagttattttgtgcttgtatgttgacgacatactgatatttgggacaaaccttgaggtgataaatgaggttaaatcattcttgtctcaaaattttgatatgaaagatttgggagtagctgatgttatcttaaacattaagctaattagaggtgagaatgggattactctcttgcagtcccattatgtggagaagatcttgaatcgctttggctacattgatagtaagccttctccaacaccttatgatcctagcttgttgcttcgcaagaacaagagaattgctaggaatcaactggaatactcccaaatcattggctcgttgatgtacctggctagtgcaactaggcctgatatctcctttgctgtgagcaagttgagccgatttacttctaatccgggagatgatcactggcgtgcgcttgagcgagtaatgcgctatctgaaaggtactgtggaattgggacttcactatactgggtatcctgcggtactggagggttatagtgattctaactggatctctgatgtggatgagatcaaagccactagtggatatgttttcacactgggtggtggtgctgtttcatggaggtcttgcaaacagacaattttgacgaggtcaaccatggaagcagagctaacggcactggatactgctactgttgaggcagaatggctgcgtgatctattaatggatctgcctgttgttgaaaaaccggtgccggctatccttatgaactgtgacaatcaaacggtaattgtcaaagtgaatagttctaaggataatatgaaatcgtctagacatgtgaaaagacgattgaagtctgtcaggaaattaagaaactccggagttataacgttggattacatccaaacagcgagaaacctggcagatcccttcacgaagggactatcacgaaatgtgatagacaatgcatcgaaggagatgggtttgagacccatgtgagttatactatggtggtaacccagtctatgtgatcggagatcccgtgaattagatcctgggaagaacaaaccattaataaactagaggagagtaccaatatatataccctatccaagtgaagatgcatatactcttgtgagctgcaaggcaggttggctatgccttaatgagttctgttggctttaattagcaaagatgttgtcctgcagagcattcttgaaggaactcacctttgtgagcttgactgttggtcgcagtctatgaagattttgggtgaatcttctaggaagcttactaaagacctaggagtatgacttatacgctccacccgaggggtagtctacagacggtctagtaccagataagactttgagtgaaacttgcttgcacaagacttgcaattcaaggcgtagtccattgttcaagttgtgagtaagtgtagcttggagttctaggtggatgttcaaccttaattggtctccatcgaaccgctggtatataaacagtacattggaaaaggcaaatctcagtgggattttgagatttggtgggggattgttggaattaatgaatgggccttagcccattcgaagattaattctttggaaaatcacaaaagcccacctcatgggatggcatgcatgtggagtttagtaccaccttgcttattctaggagagggggacctccttaaaagggaggatgccctcctagccacttgaagcatgtgtggtggagagaagaggggaaacacacgcgcgcgctcgctcgcctcgcctggcctggcctggcctggcagggcagggcaggcggcgcgcgtgcacgacgtacgcgtcgaatggtccgaaaaattggctcctcacccttgcgcagatgcagcctccttttgcagttttgttttgctgcaaattcggattcgttttgttttggaaacgttccgaaaaatccggtgcgtgcaaacggcgtggagtccggataagttacgcgcgacttatccggttcggttacgcgcagtagagatcgtgcgggcgccctgatcaagcgacccttctctatataaaccgacccgccgtcttcacgcaatatatgcgaaaatcaatctagggtttgcctcctactctgtactgcgccgtcgctcgtagactactccatcccgctcgccggcgtgcaccagcgatcgggagagcaggtctccggaacctctgcctttgacgtcctgcaccgggagaaggcggcaataaggtttttgggaagcgcttcgcgcgactgctccctgttcgttcgcgacggctcgccttcctcttcgctcgcgtgtttcgtgccttcgtagacacctgcgaaaagtttcgaccaagcagccggtcttttcgtcacctcggtacgtgttcaatatgttgcgcatatttgatctgttcatgttattctgcgtagtttacatgtgtagatctaatgatgcgttcatgctagttttcatctgtaatgtcatgatttatttatggaataaattaaatccttatatgcccataatctcaacactgctgaggtactggcgtactactctggcgacatgtaccagagcgtgccgactagctgcgtccgcgacggcggcgccgcggccgacttgctgaggcccaagtcgcagatcctgacgcggccatcgacggcgccgacgaggacgttgcccggcttgatgtcgccgtggatgaccccctggcccctgcgcgtgcagttgcttcacgccggcgagcagctgcttcacgccgacgtagtccatgacgaggtggagcttgctggtctccgggtggcaagtcatctcgcggagcctcacgattgcggggttcccggtgcacgccacgagcatcgcggcctcccacacctcctttccgcctccctcgccggccggcgcctttttccttctccgtgcgcgctcgccggccggcgaggaaggatggccgggagggagagagaagaaggcgccgtggatgaaaaggatgtgggtcccactatttttacttttgtccgactgacttgcgggccccatgtttttgtttttattttaaagttttatattttgcttctagtgccacatcatcgctacgtaagacgaggaccaactcaaactagccacgtcagcgccacatcagccaaaaccaccatcgaaaccgctgagggacctgctttgcaccggttttaatagttgagggacctgttatatctgttttctgatcgaaggacctaatcgaattcgttgacaagttaagggatctcaagtgaacttattccgtactactttgggggcaggcgagacaaaccgttccagaggcccatcgttgactcgtggtaggcttgggactaggccaggtcaagtgccgcacatggcccagagcccagacgaaccatgagtcgcgcgtgaatgttttttttaattttcaatttattttattaaaatatttaaaaataatttttggttttaaaattttacaaatctacagcccaacgctttctgagagggcgtttttaagaaaacaccccttctaaagagcgttttatgtcatggcacatatccgttgactcatggtaacgtggaggacacaccattttgcaggtagcctcctccctgcccttgccttatcagctctgagcccgagatcagtcaagccggcatgacccgacttacacgccaggctgagccgggctcgccacaggatgcactaacggcccatgcatgacccaataagattcgggccgtgctgagtcggtccgaaggcacagaagcccaccgaactcctccttggaataagtatattttttatccctcacctttctgggccatttccaaatggttagaataagtctatttttcattcctcatccctcatcttgtttgtgtcatgggccgggccgtcggttggccatctatacttgtcgggatagatcagtagctcatgtggctgtctgaaaccatgagaccggaattgatgggcatcaaagataagctttcacggtagagctcgataaatcgtgcgcttcgacctcggaagacactcagaaagctagcaatcaatcacagatgaaactgaaatcatacgtttgtctactgctctttttaccccaagagcaaggaaaacaattacggtgtactcaagacagcatatagtacgaaactgaaatcacccaaagtcccagtcatgaacgacccatctctgtggtggcccaactcggtggttacgtgcgtcactttaatctccacccaacaacacagcccaccacctcattcaatcatccttcaatcatttcccacgtcatgcgctggccgcttccctccacgactccaccagccgcgccaacgtcacctccgactcgccgccgtcgcgcagcgccgccttcgcccgccgcatggccgccagcgtccgctccaggagcgccctcccgccgtcggactccatcagccaccgcaccttcgccgccacctcctccgccttcacggtcccctccccgacgtcgtcgtcgtacccttccaccgccacggccagccgcatctccttctccaggaacaccctgttcatccgctgctccgcgtacagcggccacgccagcatcggcacgccggccacgatcgactccagcaccgagttccacccgcagtgcgtcacgaagccgcccaccgccgcgtgcgccagcacgtcgcgctgcggcgcccacgacttgacgacgagccccctgcccttggtccgctccaggaaccccttggggaggagcgcgtccaggtcgggctccggcggcttgtcgaacttcttcgccgggtcgtcgctcggcgggctccgcaccacccacaggaaccgctgcccgctcgcctccagccccgcgcgccacctccttgatctgctccgcgctgaacaggccgatgctgccgaagcagaggaacaccacgctgccgttgggctgcgtgtccagccacgccaggcactcctcgctccggttctcgcccacctccgccgactttatcagcgggccgatgcagtagacgggcggcgtcgagacgcccggaggcgcgcagctccccgcggcaatggtctcgacggcccgcggctcgagcgagcggaatgtgttgacgaggaagccctgggtgcggcagaggtcggcggacgctttcagaaattccgcgtaggccgggtcgtcgcgttccatgagcggcaggacggagtgcgtcgccgggaacgaggggatgccgggggcgtgcacgagctcttcgcccatctccccgaagttcgccgtggtctgagcgtgcaggaccgggaggtacaagaagaaagccaggatctcggcgccggaagtgtagaacatgtaggcggggacacccagctcgtcggcgacgtcgagggcggcgttgcagaagaagtcgatgatgaggacgaccggggaggcgccggcgaggaagtcgcggaggccggggttggagaggcgggtgacctcgaaggtgagcgactcgtggtgcttggacgccactggcggcacctccaccttcggcagacggtggaacgtcatggccgggttggccgcggtgacgccggcgaggaaaggccccgtcgcgccggtgttgccgtacggtgggtcgacgacgacgacggtgacggcgaggccgcgggcggcgaacaccttgccgagctcgatcatggagaccaggtggcccatgcccggcgacgggtagagcacgaccggcttccgggccctcgtggtggctgcgtcgccggcgtccatcagtccgtgacggatcgagcactcgagcaggtatagaatctcggatgcgtcgagacgagtggagatgggagcgacgacgaacgaacacgtaaatagaggcgcgacgaacggttgctgcgtcacgagtcactactccaacccccgtggtccagtggtagtggtccagtggtgagtggtgaccggtgagtggagacaggatttataccgccgcgatgacgagacacagactgaaaggacacaacccccatttccgggaaaacccccacaacccccatttttggctacaggtattttaggtgtcacgccaaaattataagtttaattgaaattaaaacgatatgttggaaaaattagaagtttatgtgtgtagaaaagttttgaggtgtgtttaagccgtgtttagttcccccaaattcccaactttccatcacatcacatcacatataaaacttttctacacacaaaactaccaactttcttccaattttaaaacttttccaccatcaaatacagccttagttcacgctaaaattggaattttggttgaaattgtgacggaaaagtttgaagtttatgtgtaggaaagttttgatgtgatggaaaagttggaagtttgaagaaaaattttataactaaacacggccttgatgtgatggaaaagttagaagtttgaagaaaatttttggaactatgtgtttagttcacgctaaaatttaaagttttattaaaattggaacaatgtgataaaaaagttgaaaattttaagaaaaaacgagcatggtggcccgcgcagattgcacggccagcatcattatattttctcttatataatagcatatatgttttttcaatgtattattcaaatatattaaaatgacaacataattttaaattttatactaactttacgaaactactaatatgtaatattcatgttgtattttataaatgtattagttgttaattatttttaatatcaaattttagttatttgtaaattatatttctatatggactctagtctcgtctttcaatatttctttttctaattccgaattttcgttatctgtaaattgtatttctatatagactctaggctcttcttacaatattatttattttttaatctgaattttttattatttataattgtatttctatgtggactctaaacttatctttcaatattctttaatttttaatttcgaatatcagttacttttaaattgtattcctatactgactttagtttcttcttcccatgtttttttaatttcgaattttagttatctgtaaactatatttttatacaaactttaaactttacttttaattttatgtttattctgaattttagttagttttaaattcctatatagactctatactctatttctaatatttcttatgtttaattctgaatatctattatttcttaattgtatttctatatagactctagtctcctcttctaatattccttattttttaattccgaatttcaactatttctaaattgtatttctatatggactctgtttttctttttctccaattaatataagaatttctaagccgtgagagcgaacgtggatgttactttttctattcttttaataagttaatagattgggaactaaacaaggcctaaactcggccttactctactccatccggaacccattgataatccaccagaactgctcgccgaaaatacagacggaaaaaactactgttgtcgttaagactggtcacgtacagcggccaacaaacatgacactgccttgaagtcaggaaaatgaaaaacgcctataagtccttccctcgttgcgccagctcagattttcaccgatgtgaagcgggcgaccgcgctttgctaggtttctcgcttcctatgtgagcgacgcagaacctcgccaaaacgaggacgcgcagcgaggagaagacgagggtcgcgcacgctgtggacagcgtagcctcgtgctcgtgtgccctagcgcccaaaatccccttccgccacagcaatatcccctattcgccctcccaatatccccttccggcacagatcggattggaagagcaaagcaaaaaaaaatcttggggattgaaagggaagaacagatcggattcaacaagatgaaaaagaaaaagaaaacaaaatcatcacaggattcgcgctgcatcagctccaaccgtcacgacggcggcaacgtcgccgctggcggtggcgttgagggcggcgaactcgtcgaggctgatgaagccatcgccatcgcccacgaaaaaccccaccccgatctcaacggcgtcggagcatggcattgccgcgcgccgcgccttccccatccggcgtcgagggggggggagcagcgggtggtggtggtgttggtgatgacgtcggcggcgccaactcgagctttaggcggcgcggtcgaccgggacgaggcgccacggtcgacggaaggcgaggcggcgcggtcgataggaccggggacaacgccgccaccgtgcccgatgtgcagccgtcgcacgttgtgcggcagcatccgctcgagctccgccacgccgccgcggcgtgggaggtgagaaggctcgccggcgtgggaaggaggagtaggagggggccggcgcgcctgagagaaagagaaggggcgaggtcgcgagaaagagaagggtaggtgaggaattaatttccttcacctgcccgtgtcccccgtgcgctagggtacgctcactatgggctttgtacccttcaacaatagctttatcttattaggtcactcaataaggtacttatattgtgagcttgagtgactttggaccattttcttaggttaagtctctcattacgtgccttacaatatcaataccttaaggtggtgggctatacgatctaagtttaaaatcttatcccttataattatttgtattaggttatttcctaatattcttgtttttttaagtaaggaagacacattcgaatcgggtagttggatcgaaggattgtcggcttgtcgcaatgtcatcgattacgaatggaaccacgtcacccgttcacatgtttctcccgaacctgcatgacaaattaaatactagtaggttataaccaacgccgagtttatatactggagtactactccatgcatggttgatggctgatgtcattgctaccgtatgtgtgtgcatgtactctctcatctcaaaatataaagcatttttagtatagtgataatttaaataatttaaactttaactattaatagcaaaaatataaaaagcatcaatcacataaatttgatattaatagatttatccttaaacaaactatcataatatgcatatcttttttatttaaaacatattaattttatagatattattgattaaagtagtatctcgaagattgtatcaggtaaaaaaatacttatatattttgaggcgggtgagtatataattcgtgttatgcatggccacatgggcatatataggagtataatcctagggggtctgtgttatgcgatggcaatgatacggcaccgtgccgatagccaaacttaagatcttcttttgatttcattcgctatttcacatgatttctatcattttcatacttggtattgccaaaatacccctttggttggttaaatcaagatgagctggtcgttagattctaatatattgacgtgtaattttttttcgcgttcgtgaaagctggttgttagattggcgcacgttaaggcccaaagtgatcgaagcggccgatgaatccgatccataaggaaaaagtacacagaaggtccctcaacttgtcatcgggataaaaaaacgtcctcgaaccgcaaaactagatatgcggagtcccttaactatacaatgccggtcacccgaggtcatttgatggttttgaccccggttttgatctacgtggcggctaagtcagtgtggtacccacataggccccacatgtcaggtgtccacgtcaccctctctctttcccctctctttctctgtttctctccttcctctcactctttgctctcgcactcgcagggcatggggatgccggcgctagggcgcccatggcagcgcgcgcggccggaggatggtgcggccggtgacgggggctcctagggcggcgcgagcttcccccaggtgacgcacaggctcagggagggagcaccgagaaccaatccccactacaagaatcctgttaatccatgatgaaaaatatccgtcacggatcactagaaaaccatcactaaacagcatctgtgatggtttaagaaatcatcacggattgagagtcatggattgacatgcgtgacggtttgtcgaaaaccatcacagagtactagaatcagtgttttaaaccgtcacaatattgcccaaggcctagttagtccaccccaagcccatttctgtgacgaaaataaccgtcacggatgaattgccacatcatcatagatgcttacatggttgcttacatggatgatgacgtggacactacctcagcccatttgttaacaggccagaatcaaagatgggccaattttggcccaatttcagccattttcgcagcaattttccagccatttttgcaagcccatttcagcatattgcagcccaaattcgtcactaatttttagcccactcttcagcccactactgcagcacatatagcccatatacacagcccattgttaaacattcagcccacacacacagcccacaaggaattaatgtagcagcacattaaataaaaaaaatcttatgtttccatccaacaacatatcacatgaattttcatccagcatcacattacacaagtcttcatccaacaacagttaccatacaaaagtgcacacaaccttatagtttaccatggcacaagccaataacacagactcaagaaatgcatacaagtccagcagcttgattcatgcagcatgcagcagcagcaaaatgcaagtagcagcaacaaaatatataccaccatgtatgacttaacctggtcgaaattgacttcacacaagttagcagcagcaaaatgcatgtagttataggcaaaagatatgcaccatgcatgtcttaacttggtcgaatttgactgagcaaaagattaagttttgcttccatctcagattgactcctcttcatctcctctcggtctttaatccttgcctgctcagattcttgcactttgtttgacaaatcagccacctgtgcacgaagctcagcattggcccttttctccgcttctagttctgtctcagtgctctgctcactgaatctaggctgggcattattgaagcccacattctgcaagaaccgattcttcttggtgttctcagcaagcacgtcagcaacaacttgagccgctgacttaagttcttcaccttctgttgttgtagatagcttgttttccatctgagtctagcaagaaagtagcaaacatggttgatgttgagagaattaaaaataagcactacaaagatcaaagtctgaaaattatcttacaatagcctcctgtacaactggggtgtagcattttttttttcttgctgtagtggaactccttgaataaatcaaatgcattaggttcttcatcattgtatttgtcatcctgagaacaacatatatgcattaggtccagcatgaattaagatgttacaaaaatctggacagctactgttcaactgaaaatctaaaagaacatgttcaactaatttctagcctcattcgttgcacacagtcactatgttttccacttagacaaacaactgcaacagaggtctttcactgcatacacatagacataaaaacaataacttttaatctattaacacactcaacttagatatagatggaaacctaactcgtcacctgtcacacaatcatgtattggcataatgtagggcggcggtgctgcagatctacaggatggcgttgtagggcggcggtggtgcctgatgtcgttggtcggctggtgtgcagcggtgatgcgcgatggcgcggcaagcaaggaggcggcgttgctgaactacgcggcagtggtgggcagcggcaacgccgctcctgccaaatttcgccgtgggcggcggcggcggtgtctcagattggtcgcggctggatgtcgaacattacggttggtctgtttggttgttgcctaacattggcataactcaatttgttataggtgtggcatggcaaacaaattgtggcctgttggccacaagtgtggcaatgtttggctagaaaatgagtatatgacatgtaggcccatgaaacaagaaagtatggcttgccataactgaaacaagcaaccaaacactaagctaacaatctgtggcatgcctaacatgtggtgtggcaatgtgtggcatcaaaccaaacaacccctgaggggttgaggtaaccttactcctccgtacatacacagaccaaaattagtacagaatcctacaataacacatcaaaccaactatcgcagtggtaggacggggtgccttctactggcaggtcatgggttcgattctcgttgggcgcattttgtacttctattttaccaattcgagttcttttttcctttttttttgaacggaaaaaacagcacagtagtgctttttcattgaatatagaaggagaaaatacaacccctaggggtaaaacaaaaagatctttagactatacactatacagagtgcgggatgagctcgcgcaatcttttagccccagctaaagcccacaagctggcctcctctttgatttttgctaggagaacacctgttgccatctctttgtgatcaaagattcgccggtttcgctccttccaaatttcccaaactactagcaggataagggaccgaaggcccttctttggaatgccgggtgtattagctaggctctcccaccactgatggactgaccgggcttcctcccattgggccggttccaactgctgatatcccgcccatgtagcaacgaggcgccagattctcttcgtgtatctacacatggcgacgaggtgcaaggctgtctcggtgtcacaacgacatagggggcaatgtccgttattccgccagccccttgtcgcgagtcggtccgacgtccagactctattttgaatgatgagccaggcatgaaatttacatttccctggcgcccaaactttccagattagggagttgaagtttgtgtttggcgcccccaaacattgggcatgataagccgagaaagctgtatagtggccgctgcttgtgaatttccaaacaatctgatccggctcctcgctgtctaagtgcacattccgtaccgcctcccacaggcggactagctgatcgaggaggttgattgtgatagatgaacccgcatcgagggtcaggtcatgcacccaggagtcgtcttctttcccttgccgtagggatttcttcctatttttggagatctcatagaccaacggcattaggtcttttggtcttcggccattaatccatgcggagtcccagaagcgcgtcgtattcccatcgcccacagttatctttgttgaggcggcgaagaggtccctatccacaccatcacaaggcgtttccaaacccacccaaggcttgcttggatctctccattcgttccacaaccatcgcaatctcagagctcttgtaaatttctccaagcttaggacaccaaggtccccctggctggtcggcaagcatgtctttgcctagttgaccttgcatttccccccggtgatatcccccgtaccagcccaaaggaagcgacgtctctgcttgtcaagctgctccagggattccttcatcaccttcaaggcagtgaggagataaattggctgtgctgaaagcacagactttacaagcgtggttctcccggctgctgccatgtttttccccctccaacttgcaattctccctgatattttgtcgaagaccggttgcaagtccgtttttcgcagtcttcccagaacaagcgggaggcccaagtattttagtgggaaatttgctcgcctcgccggaacgccttggaggacctcttccaggtctatattgccgcatcttatggccgcaacctgggatttctgaaggttggtgacgagtcctgtggctgtgccaaaacgatgtaggatgttcgcggaagtcgcaacatcgttctaggtgggattaatgaagatcacagcatcatccgcatacattgagatccgcagccgagttgttcttcctcgtaattttgaaattgcacccaactctgttgccttggaaaggatacgctgtagaggatcaatcgccaagatgaagagaagcggcgagagggggtccccttgccgtagtcctcttccatgtttgatccgttgccctggcgagccattaaggaggacttgggatgtcgaagacgacagtaaagcccctagccagtctatccatcttgtcgggaagcccttgcgctgcagcaaggccagtaggtaatcccatcacacggagtcgaaggcttttgttatatccaacttgaagagcaacattgcccgtcttaggcggtggtatcttctgatcatgtttcttacgaagaggtagttgtcatgaatacttctcccctttatgaaagcgctttgattgaccgagatcaactcatgcatgtggggccttaaccgcagctctagcatcttagcgaagatcttggcgatgctatgaattagactaattggcctatagtccgaaacgctttcagccccatccttttttgggattaggacgatgtttgctgagttgagcaaattcaggtgcgcacatctcaggttatagatggagctgaagactagcagaatgtcatccttgatgatttcccagcaaactttgaagaaggccccagtgaagccgtctggtcccggtgctttgtcggctggcatttccttaattgccctatgcacctcctcctcagtgaagggttcccccagcgtggctagatcaatcggtgtgatgtccaacgtctcccagtttagctcttttggcctcggccccggcctccctatgaagcttgcgaagtgatcatggatcgtcaattccttttcaccgtgcgtcaccgcccaaccactgtcctttttcaatctttggattgtattccttctccttcgcgcattaaccctgaggtggaagaacttcgtgttcgcatctccttcacggatgtgagttaccctggaggcttgctttttccttgccctttctatagaagcgagtcctaggactttccgcttgagagccgccctcagtcgcgtttccgggggggagagttctctgtgctcttgtgccacgtcgagtctttggatgacattgagtgccatatggaattgcaatttagcctctgagcagatgccttttgtccaatctctaaggccgaccgccgtacgttgcagcttttgattcaggcggtgcataggctcagtgtgcgaagaaggttggctccagatgtccttgactttgtccttgaaccccgggacccgtgtccaaaagttttcaaacttgaaggtcctcggacgatgtgggccttgcgggttggacagtacaagagggcaatggtcggatggccctgtaggaagggcatggagaacatggtgggggaaagcaagatctcattcctcattgcaaaagcaacggtcaagcttgacaagggttgcctttcgacgctcattactccaagtgaacttcctgttttgcagggggatctcatgcaactcacatcgatcaatgactacgcgaaaacgtctcatgcgtgcgaggttgaggttgctattgtttttgtccctagcacagtagatcatgttgaagtctccaaggatgagccatccttccccagggctgggccttaatctcctaatgtgccggaggaacgaatctttgaggtggtgccttgttggcccgtagacaccagtgaggaggaacgtaactcctgagcgaatatctgttatttgcgcggagatcgagaagcggccgattcgaaactcttggacatcaaaatctccactactccaaaggagaaggattcctcctctcgtgcctctcgccggcttgaaggcaaatttatcaagcttgtagcctcctaagaaacgagcaaggccgtcatctatgctttggagtttggtctcttggaagcaggccaaggtgcactttgtgtcaagcatgagctcatggactgcgttgcagcgcgcaggtgagtttaggcctctcacattccaggagatgatatctagactttgtgccatttaaaaacgaagagttctctatatctggaccggcccttagcctcttttaaaaaaggccacttcggggcgcatggcccattaacgtttggcggcccaattcgcaagtctgtgttgaaaaggcagcctttgggcaggcgcggcctgatacgcacgcggcccacgagctggcgcatggccggtcttgtagtgcgcgcgtggcccaggtgacgcatgggcagtcttgccgcgggggggggggggggacgcgcggcccaagcacgagtgtgtgcggcccaaaagccggcccgtgaagaggcgggggcgcgtccgagcgcctgcagggtgttcgaccgcgggcgacggccatggagtggcggccgggtccgaagtgggaagcaagtctaacaacagtctgtcggagcgggtgcaaacacaacagcacgcaagtggaagaggaggaagacgaagttcttgccaacattggctacaaaagcacaagtcttttaatgaagttgggcaggttgcacgcaggccgccggcaatccaaccaggagaagcagctcgcaggccgccggcgatgtaatcgcaaatcgaagaaggacgatacatggagcgaagtggactccgaaaccaactccagccgaggtgaatacgcattaggcggcgacggtgtcctcagcatcctccaccgcgtcggctataccttcgccaactagagatatcagcgccgcatccattgtctcctgttcttcgtcgtcgatgccgaagatggtggtgagggcggcgatgacgtgcgccggcaatgggccatcgaacatggcgacgtactcggcgatgacctgctcaattgaagcgccttcttcgccgttgaggcccagccttttgaagagaacgcgttggcagcgctccatcgtcggccgtgctggttgcttggcaatgcgctcactgcgtcgggtgggctggctgtgctgccttgtgcggatcttgaggcgtcgtcccatgtggagcggtcgcgcacacggcgatcttggtggcgacctcggcggcgaggcgatgatcggttgcggcggcgaggcgaacagagcatcgaggacgcccgtcgagatcggtgacgccgaggctgctgcttgggcaagctgggtggcaaccggggaaggtggcggcggcgccacaat

SEQ ID NO: 7148 - DNA, 36297 bp, Oryza sativa
ccccctgcatcatcagtcatttccaagttgacgcccccccttgtggcaacgggagagctcaacaccgggcgttgggctaatgccggcgaggtgacccgcgggggcggcgagtcaatctgcgggaatggctctcccacaggggggtcggtcgccgcagccgccagctcaatccgcaggagcgcctcctctacttgttggcaagtagtcgtcgaggtaggcggcggcagcgccgacttgatgcgcgcgaaggcgtgttcgaccgggatcggctcccaggccgcgttctggaaccaggcttcaatcctcggtttggctgggcgacccgagagggctggcgtggcagccttgtctgcgatgatggagagccgctgcagttggctcaccggcgacaacgcgttcgtctggggttcctgatacaagaagctggagttgtgcagtgcgtggagcaaacgaaattcacctacctctgcctggttcgcggatttgtgtagaaggggaatgttcatcagtttgctcgagtcgtagaccggatcagccgtgcgccgcgtgccgccgccgctacggttggcgcctcccctgtcccggcgacgcggggagcgcgtgcgctcacggcggtagtcgttgtcgcttccccgcctatcatcccggccacggtcgagatcccggcctcggtcatcacgatcatcatcgcggtcattgcggcgccagggtctcgggtggtcattgccagacccccgacgacgaccacgcccgccgcgcccgccctgatcgcgggcatggcggccatcgcgatcagcacggccgtcgcggtcgtcgcgctcgccatcccaatcatcctcgtcatcgtggtcgccttcatcatgaaggcgtcctccccgtgctgcgcgtccacggcgggatcagtccgcgcggccatcgatggcgtcgcggtcagaccggcgttctggccggcgagcctcccggtgcgctcgtggaccgatcgtggcggcggcgggtggtgcgggaagtcttcaaagactcgccctgggacctgttcaccgtcgagcactcccaggctccaaggcggtaggcggcgcttggccggctggaagctgccttgcccctccaaatcaatggtcgccgccgtgtagtcatgaatctcctccaagtggaagagcaccggatggcgcacccccctctgccagtgctccagtgggttctccaccgcaaataggggcgccaggttcgggtccttcgcccgctttgtaaagccaagccacatcctcttcgggatggtgctaggattcgccgtccacgcccataggtcgatggagcgcgtgttaccagactccactgggtggacgacgtctgtctcgatctgttccagggcgcaagtgcgaccaatgatgcgctcagcaatgtccgcggcccaggcatgcatggggacgccgtcaagacacaaccgaactcggaacatcaaggcgacaccaagcgcgctctcgaggctgcgccacttgatgaagtggatctcaatgccgtgccgcttgacgtatcccttcgccagcgcttcctcacaatgttgacggtgctggaacttgatgaggaaagcttgtgggtgatggagagacacggccacctcgccacggcggagcttgaactcgtcgaggaaggcctgctcgacgtcgcgcggctcggtggtcggcggagcgtgggccgcccaggagaccactgcggtctcactccattcacgcagctcctcgtcaatggcgtacgaggtggggatgaagcaagtgtcctcctcagggcgcgtcgccgggtcgccgagctgcgacatcttagccaggggcggtcgcggaggcggcgtcgggggccgggtgacgggatcctgcttggcgggtgatggcagtggagcaggggaggcgcggttgcgtggcgaatgcgctggcgagcgggcgcgacgaggggcgggggggtgcgtgtcaggaaggcggcgcgtgttggtacgacggcgaggtggagtgcgttggcgaggcggaggcggggagtgtgaggtagaacgaactcgacgtggtggaggggacgagagccgagcacggtcagcgcgagacgcgccgcggagtcgaggcgtgcggttcgcagcgtcacggtggcgacagtcgcgcgcccgatggccggagcgacggcagaggaagcagcggactggatctctacactgggctgcacggtggccgcgggagaggcaaatgaaacatttcccactgatctgcgcccaaaagtcgcggtgggagaggcagcctcgcctagtccggacgacgtcgtttcgccttgaaggtggccggtgcgccttgcttgaatgctctccgcttgaatgctctgcacgtctccaccaatgccaactccagctgctaggccacgctgtgggcaacatcctgggccaactcaactcgagtgaatggcattaatgggccacgccaacagggatgctgggccaataatatagataaataaaaatatataagtgcagaattggacatctaaaacaagtgtttcaaatggtaagacatatttcatatcttcctgctcaatgtgggttcaaatccaacatgctgcggattttttccccatgcgcaccatatttttttagtttgccatattatgcatcatatacatgtaacaaattaacaaaattattttgttcaaatttaacaaatcatcatatacatgtaacaaataacaaaaatattttgattttttccccatacgcaccatattttttttagtttgccatattatgcatcatacacatgtaacaaattaacaaaattattttgttcaaatttaacaaatcatcatatacatgtaacaaatcaacaaaaatattttgttcaaatttaacaaatcgtcttttgggtttgattcttcttgcaatcatattttttgtttttctttgcgctacaatttttttatttttctaggctaactagagtatgatgaatgtaaaatcatacattgtgacggttctgataaaaccgtcacgagttcgcgggctatgaatatccacagggctcatctgtgacgaaaaacaaaatatcgtcacggattacgtttgtcagtgacgatccataaatccgtcaccgagaatccatcacggattaacaagtttcttgtagtgcccgcagcagcctccaccggctcgtggtccagcacgacgacgtgctcgccgcggacctccccgctcagtgccgctgcacctctttgtcatgggctgctacctcggcggtgccgacgcgtgcgccgagctcgttgagagcggcaagctgtcggtgatggtgaagaggttgggggaggagcggctgatgcaggagctcgctagtagggtccgggtgctcatgaacccgacatggacgacgccgcggaggtggccgggagggagaagcggagcacgccgtcgatgcggcggcggagaaggaggagcacgctggccaccgcgccgcggcgggatccggcggggacgagggagacgacgacactgacgagaaggagaggatcccgtcgggagtagcgagcgcggggcacgctgacgccgacgaccaccatgccaaccgctagggggctaccgcctccacaggctccgcctccgccaccgctgcctactggccgccacgcgctcgactgcccgccgccaccgccgcgcatttgctccactccgcttcgctggccgtcgcgcttgcacgccgcctccgcgaccgccgtccttctctcccgcctcgcccctgccaggttacagagaagtgagagagaggagtctaacgtggataaccctgacatgtggggcccacgtgggtcctacggtgactcagccgctacgtagaccaaaactggggtcaaaaccaccgaaagacctcgggtgaccggttttgtatgcttaaggaaccccgcatatctggttttgcggttgaaggacgtttttttatcccgatgacaagttgagggaccttcggtgtactttttccgatccataaccataatcataagagcaggtataatagcaggctataaaccagctataaacacatttcaaaaagataaaagaggagagagaagggcagcgctccgggttacagatttgtagctagctgtagcacggactctaaagtacatatgtgtatgacaaatgggagcagatattaattatgtagtatatgtttatagacaactattgtataaattagctatcaagttgactatagatgatttggagccagcaattgactatactattaagcttgctctaagcagaaggcctaccttcctttgcggcttcgggacgatacgatggttacgcgcagaccggcatgacgccccgtttgagaggacggcaatcggcacggtggaaaacgaggctgaaatccagacaaacctaagctcctgaacgcaccaaagccaagcgttctgaacgcaccaaagctcctgttcaaccgagtaaccaaaccatacatcaatcagaagataccacggtaccaacaacaaaacaaaggggaataaccagcaaccgtgtcgtggcgagctcacaaatcgtgtcacatcatgcaacttgcaaaacaaagtagaaattcagaaataactggcagaaagactagaggatttcttagaggaaggtcgccacaaatacctctgaacatgcaagcatgaagcagtggcgcacccagttcagatgtctactccataatgggcgaaaagccgagtaaacaagagaaaatttagataacaatcagcgatcagacgaagttaatgacatttgcttacgacggtgcagccagcaggcgcctacttgtccgagacgcatccaaaaacaaggctaaagaacaacgacggccggtacgtgtcgcgcgcgcggatgatcagaaagaatcgacgactatcaaacccaggagaggacgagcagcaacacggtggagaccatcacgaagaccctcaatggccccagcgccacgccgctcccggacacggcgaacgcgagcgcggcgaccgcgaggagcacgctggggaggcggcgcgcgcgccgcctagcggtggcgacggcccggaccacgacgagcagcgtgacgacctggacgagctgcaggcgcgcctccagggcgcccacgacggcctcctcgagctggtccatcagctcggccgcctcggcgtcgacgcccgccggcgccaggcgcctggctcgcgcgagcaggggcaccagcatggcgaggcgggcggcgttgtcgcgcatcctggcgtgggcgacgtcgagggcgaactgcacggtgtcgacgtcgcggaggagcgggaggaggttgcggagcaccaacgggaccatgggatgcgcgttcgccattggggctgggtgggagggggcgatccggcgatgcagctgtgggttttgcggtttggagctaagaccaaaagggggttttggtcttggggtttttggcattttgcagtggaaagggagaaagaagatgaggcgagtccgcgagtggtgcagggatgtcagattgtcagagtactttgtgtgccaggcttaacttgcgtggaacgttagcttaaatcagcaagtgcttcgtttaagagctgagaatcataattaggtctactcctactagatgctgataccgtttagtgatgacaaactggagttgtgttcttatttgacgagccgagtttagatacaaagtttctcttcgaacttcaggtgtgtagttaacgttaaaattgaaagtttggttaaaattaaaacgatgtgacggaaaagttgaaagtttgtctgtgtagaaaaattttgatgtgatggaaaagttagaagtttgaagaaatattttgcaactaaacacggccttctaacttttctatcacatcaaaactttcctacacacacaaactttcaacttttccgtcacatcgtttcaatttcaactaaactttcaattttagcgtgaactaaacataccctagaatgtttactgatgccaatctagctatccaataaaggctgtgtttatttcacactaaaattagaagtttggatcaaattgagacgatgtgacggaaaagttagaagtttgtgtgtgtaggaaagttttgatgtgatgaaaaagttaaaagtttgaagaaaaagtttggaactgaacaaggcctaaacacggcgaaagacaagtaattctttcaaaatttgttctcctttccctcgagtccaccggaggtccggactagtatactaaagagttcattcatccattgcaatggccaatggcaatatggcatgcaaacggttttagttgtgtagtatggtaatttacttttttttatatggactagttatacaatgttattaggtggcttatggactatttttatattatatcgtggatgtcttaaaggataactaatttagaatggagggagtaaagttgatcaatgatccctatgcatgaaaaaacaaagcggaaaaagagcagtacactactccagtcagcacaagcattccagcgagcaaacgtagggtgtgcttggtttgctaccatgttaaaatattggtactatcaaaacctagacaagttttggtagtgccaagatttcggtaactttttatgtgctattagtagcaaaccaaacactattaaaatactgttcaaaatgccaaacaatttgataaggcatattttagcttcaaaccaaaatggccgtactatcactccgatcaatgcatttgtagcacaactgtgcagaacacttgcagcagggtgcaggcgttcagctcaccacgtttcacggacaccatcactccgatcaatatactccatcagtgccgggaggtcagctggacaggttatgaagggctgttttggatttgcccatattttggtagcttgaatatttggagccaactaatttggttatgcccatattaaatttggtagtaatccggaatattcttcactatagtatcacaattcggctctagttggaagtaaaccaaacatgagtacatgacattataaacttatggtagtgccaaaatcgcctctattttttgtactatcaaagaattggtaaagtactgaaccaaataaacacgagcaaacttagcgatacaccacaggttcaagacgacatagacctcgtttgctcccagatgccactcgccccatcgaagctctggcaagtggcaacaggggatgatctggaatgcgtcggtatccaaacagccagaacagctgcaggatcgtgactctcacgtagcttgaacatccaaacgcatcacttttgggggcccccgcgtcgctcccagggcaggggcgacacgggaggcgactcagccgctgccgcagcaccacccctcgctgccctccttccgcctcgccaccgcccgagcgggctgccggaaaccgtgcggccgcaaggacggcggcggcggggccttctcccccaaggtcgcggcgttagccttagccctgacctatcttcggggcggcgacagcggcgctgggcgacggcgaggcggcggaggcgctgggcgacggcgagcgcaaacgacatggcgaggcggcgctgctggatccggcgtctgctgcgcggatctggcgcgagggttgccccgagccggcggcggcgcgcgcgggggcggcggggtggccagatccggcccccttctgtccggatccggagcaggaggccgagccctgaccccaggcggcaaggcggcgggtgcggctgtgcagagccggcgagggcgaggctgtggcgcggccgtacggaggcgaaggcggcatggcttggccgtgcggagacggtggtgcagctgtgcggaagcggaggcgcaggcgctgaggtggaggcgcgggaacgagccggctggtgcggcgctggcgggaggaggagcgtcggctggctagccggccggccggcagcggcggaggcagcgcgtgtacgaggtgcgactggcgagagcagaggccagtgaggctcggccggtggcagcggaggcggccgtggtgcgtggaggtgcggtcgcggtgctggtgcagcgcgacgaggctgcccggcgtggaggcagtggctggtgcggcgggaggagaggccagtggcccggtgaggcgcgaccggtggcaacgcgcagagactggccaacggggggcgccggtgcagtggtgcctacgctccggcggaggttttggatggcggtggagcaatggtacatgtgtggtagatcgacaggtggtggacggcgggtgaaaacctagcccggccttggccggacaggtaacgatgacgttcgagtgtcattcccctcctgagggcgttgtcgtgccgtcttgcccctcaaggatggttgccgagcgaaagctcggtctcggctctctttgagaccttgacggatggcggtggcggtgttccgtcgcttctctcgttggagatgtcgtctaggcatccccttgccgaaaccccccgagcaattggtgcaagcacactctagattctcaccctcttgtggcggcgtcctaatttctacaagttggccacgtcggagggcctaggggggagaggtgttccatcttctctcacaccctctctccctgaatcctgaagtcttggatagagttggctttgtgttgattgtatgggtcgggttttgggtgatctcggcagtgttctgttgttggcctagcggcggtcggtcacgcttagcggcggctggtccggtgctagccttctcctggatctgtgtgttggcactgtcggtgtgtgggtggtggtataattttcttttttcctggttacgaccttccaaggttgaaatcttgtaattttttttcactctatcaatataacttcgcaccgtctagtgcgagtcgttcaaaaaaaaaaacttatccagaacagacagaaaaaaccattttacccacgagcttgactctcttaaccaaaatccacccgcaacagattgtagcagaaacatggcgtggcaaaggtttaaacagaacacacaacacattgctgcaatcagattctagaaaattcgtgaatggattaatcatgccatccaagaaggcaagaatttataatagatccagcaaatgaattggcagggggagatcgaaacaagatcggcttggatatctctgaacagaacaaggttttcgcatcagaaatcaccttgtctcaactgtcaaaatcagaaggggagggtgaaacaacaagacgagcaaaaaagcaaacgaaaaagctaatctcccgatccatctacgctgctcaccaccggaaagccaaggaacaacacgaacgcggcgccgtcgcgcgcgcgcgcgacgtcgaaagatcaggcccacccggtagcactcgaagaagccgcacatcgccagagcgaggatcctcgcgaggctcctggacacgggcacgccgcgcctcgactcggcgtacgccaccacggccgcggatccgggcgtaaccgagaggagcacggcggggatgaggcgcgcggcgcgcgtgacgaagacgtaggcccggatcatgaggagcgtgcagaccacctggtccagctgatggcggcgctcccggaggagaagcgaagaggccctgatatcgtcgtggatcctctcgagggtgacccgggcggcgtgccgctgctccacgccgtccacgatcatgggcggcgacgccgtgacctcgcgcaccaggcggcggacgttcctgagccgagcccgcgccttggcgaggtgggcggcgttgtcgtcgaggtcggcgcgcgcggcgtcgagcaggatcttgacgtcgtcgacgttgttgatgaggtaaacgccgaggctgtcgagcagctcgtcggccaagttgttcacctccattgctgtgcgtgggttcttgcgcttttggcgtggttcagtgttcttctcatcttctggccttttctgttctgggggatgctttttggactaaaacatgggtggtctgtgggccagacttgtcatggtgtacaatagcttcgtggtagactgggatgttagattagctcacactgctaatccgcaatcaacactagtccataggagagaaaactgacatgattatggctctggtgaatttcaaatttcagatatcaaacatttttttcttgcggaatggatcaggaaaaattctcacatttcactcccacacatcgacagcgcgagcgaaagtagcgacacaccagtacaccggtagcaaaaattaacgtgacataatcccagatgtcactcgctcgcccaaccgaagctgtaacagtgggggatgatctggaatgcgtcagtaactcagtatccaaacagccagaacagcggcggcagtatcgtgatcctcgcgtaggtcaccgcgcgtcatctcgtcgactcgtcctcgtcgtcaaccccttcgagctcggggcggccgaacacctccgactccacgtcattctcaatcgcaacagctttgcagcttcacatccctttgcagctttgcagagataaccatccaaatcaaccagaaacaggttgaagcagaaacacagcgtggcaaaatgcttaaacagcatatacaatgcatcgctgcaaccaaattctaaaagaaaaacatgactggattatgaatgtcctagaacttataatagatcgaccaaatgaattagcacgggaaaaagatggaaacaagatcggcttggatatctctgaacagaacaggttttcccgtcagaaatcaacttgtctcaaatgtcaaaatcagaagtagacggtgaaacggcaagatgagcaaaagaaaaagaaaaagctaatctcgactcatctacatacgatgctcaccaccgaaaaagccaaagaacagcacgaacacggccccatcctcgcgcgcggcgcggtcgatcagaccaggcccacccggtagcactcgaagaagccgcacatcaccacggcgaagatcctcgcgaggctcctgaacgccggcacgccgcgcctcgactcggcgtacacgagcgcggcggcggatccggccgtaaccgaggcgagcacggcggggaggtggcgcgcggcgcgaacgatgaagacggaggcccggagtaactggagcatcaagatgagcaggcgcagctgccggccgcgctccaggaggagaagcgaggacgcgccgaaatcgtcgaggacctcctcgagggcggcgcgcacggcttgctgctgctccacggccatgggcgcggtcgcgacctcgccaaccaggcgccggacatggctgagacgagcctgcgcctcggcgatgtgggcggcgttctcgtcgaggtcggcgcgcgcggcgtcgagcaggatcttgatgtcgtcgacgttgttgaagaggtgaaggccgacgctgtcgagcacctcgtcgaccaggtcgttgtcctccattggtgtgcgtgggttcttgcagttaggcgtgtccgcgtgtggtccgtgttttgcggactgtgggtggggggatgcgtttggactaaagcctgtgagcctgagtttacagagtatcaggtttttgtacgtacaaagctagcttagcttggcttgggtagtttggccagttgggtaggagattgggaggttagattagctcacacttctaatccgcaatcaacactagtccatactagtccattaggagaaagaactgccatgattatggctctcgtgaattccaaattttgtactataaaacatttttggttccggaatgggtcagggaaaattttgacattcccttcccacacataaacggatatgatcatatgaagtacccttcaatccctcgtcgtgcagcggaaagccaattgcacgattgcgcgcgtacgttcacgccgccaaccacaaccgcaccgctcgacgcggcgcgcaggacggggaggagccagatgcggctggtgccgaccgtgacacggcccggacgaggacgagccacgccgcgagacggaccaccagcctccgctcgataacatcctgcaggagcacgagcgccgcggcggccggcagcggcgtcgacgacgtcacccgagtgcgcgggtggcgtccaccaaaatatcccccgccgttcggagctcggcaatcgcgcgagcgaggagacgtcggcgaggaggtgataaagattgaggaacgcgtgcagctccatttcgtcttcttcgtcaaccactccgagttcgaggtggccaaggtcctctgctgcctccgcgtctgatcaaccccagaattcctgaacgggatcgctcatctcctggaacactcacgcacgcgaaaaatgaacagagaaattttgctctgcaaacttcgcagccattttttctgcttcctttctcctctatcgattcgcgaaactgaacaggaaatagccctggtggcctccaaaacacgcgccatgaaacgtcggaacggcatcgcgcaccatcccaaggcttcaagatcatgcctcatcactaaactcttgcactgtgccgacacaactggtcatgcgctgactcaacgaggaagataaccagcgtcatcgtcgtcaacgacggataaacagcacgagcttcacttggtgaagagagtttcccctatcttaattcttaagcatccaaaatccaccagcaacagattgaagcagaaacgtagcggggtaaaaggcttaaacagcacacacaacgcattgctgcgatcaaattctggatcgtgcaaatgaatcactacaagtggactatagcacacgatcgagcaagatggaaacaagatcggtttggatatctctgaacagatgttccccattatcccatcagaaatcaccatttctcaaatgtcaaaaatcagaagcgcgggcgaaacaacaagatgagcgaccaaatcaaacgacgaaactacactaagacggatagtgcagcgcgagcttgacttgatgaggacagcttccccagtctgaattcttaagcatccaaaatccaccagcaacagccaaccgattgaagcagaaacatagcgtggtaaaggcttaaacagcacacacaacgcattgctgcgataaaattctagatcgtgcaaaatttcaaatgctacaataggactatagcacgatcgggcaagaatgcaagatggaaacatgttctgtttggatatctctgaacagattttttttccccatcagaaatcaccatgtctcaaatgtcaaaaatcagaagcagagggtgaaacaacaagatgagcgatcaaatcaaacgacgaaactacacagaagtgatgaaacaaaactaacaaatcatcaagaagcccgtgctaatctcccgatccatctacgctgctcaccaatgaaaagctactagcaaacaacacgaatggcatgtcgcgcgcggtcgatcagaggcgcacccgatagccctagaggaagaagcacatcaaccgggtgaagatcatcccgaaggtctcgaacgtgggcaccgtgccgcgccttcactcgacgtacacgaccacggcggcggttccggccacgaacacgagggccgcggcggggaggaggcgccgcaaggcgcgcttgatgatggcgtaggtccggatgaagagcagcaggttgacgacctggtccagctgcctgcggcgctccaggaggaaatcgacgcgcgccctgagatcgtggtaggcctctacgagaaagacgcgctgcgcctcccgctccacctcgtccatgggctcggtcatgagctcgcccgcccgctgaaggacgtagccgagctgaatctccacctcggcgatctcgtcgtcgttgtgggcgaagtcggagcgcgcggcgtcgagcacgatcctggcggcgtcggggttgtcgacgaggtgatcgtaaatggcgaccacctcgtcgaacagggggttctccgccattgctgtggtgcgcgtggcagcgtgggcgcgtggcgtggcgaggctgcgtgttcggggaatcgggggtggttttgtaggccagagttggggctccgtgacgggtggctttgtgggccaaaggtgtcagtgacacaggtaatcaggtaatcaggtaatcatttgtccagtacaatagaagttagatgtgttcacactgctaatccgcaatcagccaatcgccactagtcctgaggagagaagtgacgtgatcaaggctctcctatgcatttcaagttccatatcaaacaatatgggttccggaattgatcactaattaagtactacttcttcgtttaagagctgtgaatcctaattaaggcctacattacaaatgccaacatggtgatatcgttggtgacgaagccaatgaataaaaaaagaagaagaagaagaagaaagagagaaaaaaaggacaacggaggcaaaatttggagctgtttttcacttgagaaagcttgactgatgccagtctgtctagctatccagtaaagataactgattccttcaaattttgttctccttttcttttgccgcatactggtctactggacaaatgatcggagcttgtcccgtacactccggtcagtacttcgtgcaggaaataacatgtttatactttgcttctgtaaagtaaatcagcaacaaatcatactagtgcacatctatgctgttttatgtacgagatcaaccgtttgtaatcccaagacaccactcgtccaaccgaagttgtaagttgtaacaaaggggattgatctggaaagcgtcagcaactcatgatcactaattaagtactactacttcgtgatccccgcgttgtccactcgtggagctcggccatggcgtttgcgaggacggcctcggcgcggccgacgtcggcgaggaggtgatagagatctcctgaacgcctgcaactccacgtcatcgtcttcgttaaccactccgaactggattgctcagcctcagctcctggagtactccaccccgcacgcgaagaaccgagacatgaacagagaaattttgcgctgcaaacttcgcagcctttcctatattaaggaacggagggagtaccatctatttgccaaaccgaacaggggaatggccgtagtggactcctaaacacgcgcaaaatccaccaacaacagattgaagcagaaacaaacgcattgctgcaatcaaattctagaaaattcatgaacgggttataacaatccaagaacttatgcttgatcttgcaaatgaatctagcaggatccccactgatggaaaacagtatcgaattggatatctctgaacaaaatttttcccatcagcaatcaccgtatctcaaatttctaaatcagaagcagagggcgaaacaacaagacggagcaagcaaagcaaacgaacctacacaaaagcaatgaaacaaaaccagcacatcatcaagacgcatgtgctaacctcctgatccatctacgcttctcaccaatgaaaagccagcgaacaacacgagcggcaagtcgcgtacgcgggcggtcgatcagaggcgcacccgatagcccaagaggaagaagcacatcaaccgggtgaagatccccccgaggttctcgaactcgggcaccgtgccccgcctccactcgacgtacacgaccacggcggcggctccggccacgaacttgagggccgcggcggggaggaagcgccgcaaggcgcgcttgatgatgccgtaagtccggatgaagacgagcagcttgacgattcggtgcagccgcctgcggtgctccatgaggacatcggcgtccgccctgagatcctggtagagttcctcgagggcgcgctgctcctcccgctccacctcggccatgggccagtccatgatcggctcgtccgccgcacgcaggtaaaaatcgagcagattctccaacgtggtgatgtggccgtcgagggccgcgaagccggagagcacggagtccagcatgatcttggcggcgtcgggatcgtctacgagttgttcgcaaatggcggccacctcggcgagcagggccagggtgctctccgccattgctgtcgtgtgggtggctcactggctccgtgatgggtggctttgtgggccagagttgtcagagaatcagattgttgtacagatcattggcttgcgtggcaagtttttacattagctcacaatactaatccgcaatcaccactagtccagaggagataactgacgtgatcaagaatttggttccagaatggatcagtggaaaattctcacagtatgccacttccacacatatactgcttatttacaatctctcgaaataactagggaacttagcaaacttcaattaaaaaactcaaacaaataatctgctttcctcgaatcagatatctttgaacaggtacgcatagcagaaaccaccttgtctgtccaaatcggaagcagaggaaggaaacaagaggaacgagtaaatgaacccacaaaattgcacctagcacggtcatcatcaagatgcaatatgcatgtgttgatttctcgatccatctacattgtacgctgctcaacaatcacagccgaaaagccaaagaacgcaacgaacaccctgttctgcattacaacagctctgccatttggacttgacttggagaagacagcttcgcctctcttaattctaaagcatccaaaatccaccagaaacagattgaagcagaaacatagcgtggtgaagaattaaacgacacatacaaacgcattgctgcaatcaaattctagaaaattcatcaaagggctataacaatccaacgatttatactagatcatgcaaatgaatcagcaggagaaagatggaagcaagatcggcttggatagctcagaacagaattttcccatcaggaatcaccatttctcaattgtcaaaaatcagaagcagaggacgaaacaacaagacgagcgaccaaagcaaaagacgaatctacacaaaagcgatgaaacaaaactagcacatcgttgagacgcctgtgctaatcacccgatccatctacgctcctcgcctcctcaccaatgaaaagctcgcaaacaacacgaatggcacgtcgcgcggtcgatcagaggcgaacccgatagcccaagaggaagaaggacgtcagccaggtgaagatcctcccgagggcctcgaacgcgggcaccgtgccgccgcgcctcaactcgacgtagacggccaaggcggcggttccggccacgaacgtgagggccacggcggggaggaagcgccgcaaggcgcgcctgatgatggcgtaggtccagatgaagacgagcatcttgacgacttggcgcagctgcctgcggttctccaggaggaaatcggcgtccaccttgatgccgcggtagtcctcctcgagttggacgcgctgcgcctcccgctccgcgtcggtcatgggctgggtcatgagctcgttcgtctggtgctggatatggcggagctgaatccccaccatggcgatctcgtggtcgttctccgcggcgttgaagtgcgcgtcgtccagcagggccctggcgtcgtcggggttgtcgacgaggtggaagtacatggcgaccacctcatcaagcagggggttctccgccattgctgtggtgtgggtggggttctaacttctaactgcgtggctccgtgtccggggaatcggactatcggcgggggggtgcttgcttttgtaggccagaattggggctccgtgatgggtggctttgtgggccagagttgtcagagaatcagattgttatccagagctttggcttgcgtggcaagtttacattctgctccattgctgtgcgttgggttatttgccctcgcagcctcgctcttgtgcgtggctgcgtgttttgggggtgtttttggactaaatatgggtttctttgctagagttgtcagttgtaacagagtcgggtactcgtgttactgtccaagcatggtttggttggttaagtccattagagctcaggctgctgatctgtgagaactggcatgaacaaagctttaacggaatttgagtctaatgtcgagcaatttggttccagaatggacaaggggaaattctcgcattccactttatgagcagaaagctaatcacaccaccaaagaaaaccctgttgcgtccaaattcctgagtactcgtggtcaatagcaaaggggttgcatatgcatctgaaatgggaggcgtgagtccataatccatatgaccataattactgcatacagcataataacaccttaagttgaaataacgagtgaaccacctaacaaacttcgacaaacaagactcgaagaaatcaacagcattcctcgaaagttcgaatccacacagcattgcaggaaatatacaattcagaatgtcacatgccggttaccagcttttgggtgaggagcggtagataacgtcaagaattgcatcttggagaaaatcattggagaaacaaaggaatgcatatacaacaaaacgcgaccaccattcttcaaaagttcttgatgagcataagctcagttccgcgaatacagcgcgtcagctgtctcaattgcatcatctgccggttacccagcactgttatattgcaacattacagccaggcaacaaatgttgcacagcaccagatttacgaactgtgctggtaaacttaggcctagatggctagctcaacgagagaccatcaacctttgcaacaacaaacaaaaaaaaaatcaacagcagaggtagttcagagaagtctgaacagaacgacgtaaaaagaaggaaacaccaaagaatcacataataggtgcatatcatatcctacttggctcacagctgataattcctaatcattatgactatttcaagtcaaaatagcatcagtaactgacagtcctcatcaacacagccaagtagccagaaaaagcacagatcatctccagaaatatgatgtccaacaaacttcatacttcacagaacataaacataaaaaagttacacagatattgcaacacaccaattacccactgtgtgatgtactgatgtattgcatgccaattagttcagttctacaaccagctaaagtgagttcttaactaatcagagacaaccatttcaggaactattgggatgctaccaaatagcaaagtggctacatcttgaagtcagactggcatttataatcgcgtatcaaaattcacaaaaaacgtccaaataagacatctacagatggattactactatgtggccaactgaccaccagtgtgcacatagtcatggcaacagaaatgattcaccattgagcatgaaacattgttataagccacagtcgtttattaaataaattatttgaccagctatcactaacaaatgaagtagaaaacagcattcataaaaaaaggttatgtcaaagaaactctgatgataatcaaaacctacaaatctgaaagtgaactatgtattctagctacagaaaagagtcagactaaagttttactgcaagaccgattcactgatgatcagaaatagtcaatcagacgccaggaaatggtaacaaatgacagtgagtactgatcaccaaaatgatcacatactaacagacaaatgagcccaatgagtataaaacaaccagatagtacaactaagaaacagatccgagttatctttagtttagtaatatcgataacctaacacatttatggatgtatggatcaccctaaactcttaacctaaatccaaaaacattcacttgctaaatccaagacagtaaatgtaccacatcacaagatgaaatatgtcgaaatataaactgccaatgcttcctcataggccaaagccaccatcagcaacatgacaaaaacatcaaatgtgatgcaaacagaaagcacggatataaccacataatcaaagtaagggcacaccatttatggcatcaaacggccccagactatttcatggtcattagcatcaatcaatcacatgtacatgcatccatcaaacatttctttccaaactaaagaatatagaagtgcacccaaagcctagaagcagaaaatgaatataatgaaacggtgaaaatttgtcccaccaccatgttttccacaagtgcgtatccacattccatataaccatctatagaggaagcatgcacatgccaaaaggcatatacaggacatatattgcacagcataaaagaagcaacactgaatctaatcaagttatagttcctcggtgactggaacggcaactagaacccgtaggtactattgaacagacttgagcagcagaaaacgcctcgagatcagacagcatagcacattaatcaactgtgacatatggcaacagattaattagctcatttcatccattcattaaaacgggatatctcaaaatcatcaatcaatataagggcacatccagatatgcaaactgcaaaccatcagtaagaagtaatgagaagctcagaatggagaaaaagcataaccgcacagcaaccattcggcgttcctcagttacgcatcacaaattgtttcagacatttagcgtcaccaccgaagaaggtagaatgataaaaggaaaaacaggaatggaacataacaagtgttcagatccctatgtttctgtaggctattaagcaactagctcatagaagtcatactattctcatccagcactctaccatcatcagttcatcaccacaaaaaaactcatcaaatcttccataggctgtcgcagcagagcaaaacttcctgtgcatcagatcaccagtttacctcttgaggcggaggaagatcaccacggcaacagctgccgcggcggcgccgacggccgcagctccagccatcaccggccacgcgacccgcgctccctgcagggtcccaggtgtcggagcagccaccctctcgtcctccgcagcggcagcggcagcggcagcggcggccctggccctggccctctccttcatggcaatcacctcctcctcgagcctcatcttcaccgcgcgttcggaccccaccttgccggcgagctgattggagtcgcgcttgtccgccttgaattcatctttctctgcttggaggagtttctgcagatcctcgagctcctcgcggagcgcaagcaccttcgcgtcggaagaagaggcgatgtactggaagacgaccgagttctgcttggccttatcggaggtgtccttcaggccgtcgatctccgtggcacgccccttcttctcacggtcggcagcggcgagcttctcctccaggtcgtgattggtggtgcggaggtcctcgatctcggcgttggcggcgacggcggcgtaggacttggcggggttcaccggggcggtgacggtgacctcatcctccgcaacgctgccgtccggcacggtcttctcggcggcgacggtggcgtaggacttggcggggttcacggccgcggtgacggagacctcgtcctcctcgacgttgccgttggggtaggtcttctcggcggcgacgtcggcgtaggacttggcgcggttctcggcggcggtgacggtgacctcgtcctccgcgacgctgccgttggggctggtcttctcagcgacgacggcggcgtaggacttggcggggttctcggcggcggtgacggtgacctcgtcctcctcgacgctgccgttgggcaaggtcttctcggcggcgacggcggcgtaggacttggtggggtgcccgtcggtggtggcggcaacgtcgtcgccggcgaagcatccgatgggcgcggtcttctggccgccggcggcggcggcggggtaggcgagggtttcgtcgcccttctccatggggaacggtgggttttggagtgtggattctctctgcctctctgcgatggggacgggtgggggaaattcgctgtgaaaaaggcgagactactttcgccttcccaatcgcgcagtgccctttttatgccgaagggggggcttgatggattggtggagaagaaaaatctcggacggcatttgggggaggggtttcgcttcgcctcactgaccagtggggcccacgaattggtgttgccccgtgaccccacctgtcagtttgggtggtaagtggtaaccgctctggcgagcatgcgtgccagccaccgcgacgccggtggggtcgcggtgtcagcttggatcgtggcactcgcgttgcgccattgcgtgctgaagaagatggtgcccccggtgcgtggggaaaaaatggttgctactagtgcgctgcaccgggcacgggacacgcgtcgtgtcacatctccgcgaacctcgcatcgtgcaacaaaacagtgtgaggcttgtgcgctcgcatcgtgtgacaaagtagcaatcgatatgctcccaagtcccgtgatcccgtcgtttagcaaggggcactgtgaccaggggcggatacaggaacaggtagaggtaacagaacaaactgaacaaactactcagggtgtttagttggggaaaagtaaaattttggatgtcacagcgaacgtttgaccggatatcggaaggggttttcggacacgaatgaaaaaactaattttagaactcacctgaaaaccacgagacgaatcttttaagactaattaagccgtcattagcacatgtgggttactgtagcacttatggctaatcacggactaattgggcttaaaagattcgtctcgtgattttccccataactgtgcaattagtttttctttttatctatatttaatgcttcatgcatgtgtccaaagattcgatgtgatgtttttgggaaaaaaatttggggaactaaacgggccctcattgcgtctcaaaatataacaacttttagttggatatgatatatcctaatactacgaatctggataggaggcatgtctaaattcatattattaggatatgtcccatgcatccaaaaattgctatattttgagacgaacactatattgtcatcttctaatggattatgacagttaattttaatggaggcttcacggttgtaacaccgatattgggggctcgagacccccaacgacctcacggtgaatccgtcattgagtgttactgcgtgaggcctatacggttgcatcttatcagtgtatcacaaagtatcaatcgatgctcgcatatgatcccatcgtttagcaaggaaaaatattggtaaaacttttgtatttactaacttctctctctgttttacgatgtaaatcattctatcattttccacatatatatctatctagattcattagcatcaatatgaatatgggaaatgctagaataacttacattgtgaaatggaggaagtatgttccataaaaattcatcttatgtatatttgtattaaacttactctgtccgtccaaaaaaattgtattaaacttactctctctgtccaaaaaaaggcaacctagtactaggacatcctaatacaacgaatctggacataaagtatgcataaatttattgtactagaatgtgtcacatcctagtagaaggttgagttttttttggacggagggagtatgtatgtacttatgctatgtgctatagaacaccaaaactctgtgttttttttattgtagcatactaaaaaacatgttacgtgtatgtatgataggataaaaaacctgataattaattgttaaacaccgatggtactgtattattttgttacatttgatgtaaatgaagagagaaacaatgtgaaaagtatgaatgtattcttggggatatctaatgcgcactattttttttcccgctccaactcaatatcaagtgatagaggggatgagtttggacgtcggcactctagcgaccaaatagcgacagtggcagctagtactgtcccatagcacgacgctcccacgggaggtggcagttgacgtcgtcccgtcatgccggttcgattgagttgcaacgatggtagggggaaggtaccaatgatgctagtgtcgtaaaaaagatccattactacaataagttttttttaaaggatctatttgcaaaaaaaagattttaaaagatagaatgttaaaaatctaatgaagatgagcgagaagaggatatagagtaagaagatagtgacggtttggtttagaacttttaggaaaatatacattttggagtaagtaatgtcatatattgtgtaactgtgaaatttaaattgcatgactttaaatattaaaacagtaatgatattttttgaaccataaagtcattagcaatagcatttatctaattaacctttttgtattgattattgaaaagggaaagctaggagagcaatcaagcgaaattgacacgtgtcacggcagtggacgaatattccatattgcccttcctttcacccccccccccccccccccccggggggcgtcccgtttctgccatcgagtcgaacaaacaaaccctagaactccaataccccatcgagccccggaatagtactccgcccgccttgcggaaacaaatcgaagaagaagaaggaagacgcagccgcgtgcccccccatccatggatctggagatcgtgggccggcacgcgctgctgttcgacgacgacccgacggcggaggtcgtcaactccggcggctccctcgtcccctgggccgccgtcggcgcggacgacctcctcctcgaccgccacgacgtccggcacctgctcgaccgcgtgcctcctcgcccccgccgctcctactccgcggccctcctctctgccccctctctggatggcgtctccgaggctgaactcgaccgcgagcgcttcctcgacctcaccgccgacgatttcggcggcgagggctctcaagatgcggtctcttcaggtatacgtctgttcccgctcctcttgacctgcctatgcactctttccctatcctctatcctgtattgcaactattctgcgtatccatcagctgccctttcacctttagttgcaattgggcgatgcgagctctaagaatccagtgtttatcatcttaagagtgctagcaagaaattagactctcaacaacaccgcctgatgtatcatgtagtagaggttagaaaccaaacagttttttctagtcccctttgctctcactgggatccacagagaataaaaatctgctgtagggatcaaacaagagtgaaggactgaaggtaccagacaatatgttgttgatctgtgtgcaagagttgcctctgcaattgtaaggacatacagcaaagataatttgttatgtcataatgttgtttggtttcagttgtgtgaattttcaccatctcggatttgtttcaagtcttactgaggcttcatttggatgggttcaaatgacatcattctgaacccaccaaatgaaaccctgctgaggttaagtccatgaaatgggagggaacttacatcgttctgacttttgagcccatccagatgaagctaagtacatggactgtagatattcgatcttcttggttagaatattattttagttcaatcttctgaaacatcgcccttgaatggatctcagttgtttaaaagttcttttgtttgaatgttagtagcaaaattaagcttctctctgttgaattcctgcagtagctattcttctagcaaccaaactaggaaatagttacattgttatggagctcgatatagtgagagtgagcaatacttgcacaagtagcacaactagcaatgctaattggacccaaacatttttttgttgtaccttttgtaagtttgcaggaaggatgcttgaatttagttgatgagcatctttaatcagttcaagtaagggacttctatttcttctaagatgcatatttgcatctacacgtcttcctctacattcaacactatattttatgttgcttgtggtaaacaatgttacatctgacatcttttctttatacaggaaatgggacagatacaggttgggctgattataattctgtccctttctcatatgggagtactgctggttcagatgatccaaataatttgagcacatattattgcccatcttttcccgtgcctgacagattgttgaataagctggtaagtacatggactatggagtctgtctgactgcttacattgaacttcttttaataaatcggaattttatttctttatgcatttttgtattaatattcttcagctgatccagccataattatccaaggtgcatatgttcttctaaggattaaatgcctatttcagatggttggagcagagatgaggttcctactagtgatgcacattgtttccttacatatatcatgatgtaaggaataggcaggtgggattagaatgatgtaaatgttacacacaacagaaaaaagtactggcatgggatagctgttcttatgatataccagctaaattcatttgagctttgatcataatcttgtacttccatgcactcagacccttactgagacaatgttttcgcccccatattttttttcatttgcagcctccttctgagaaggttcatcaaattattgcaagaactgctctatttgtcagtgagcatgggggccagtcagagattgtgttaagggtgaaacagggtagtaatccaacatttggtttcttgatgcctgaccatcatctccacagctacttccggtaccttgtagatcatcctcagttgttgaaagatggtctagatgctgattcaaacaagggctgcaaaactgccaatagtgagagtgggcatgatgcatcatcaggcggggctttgtcattgcttggggctgtctatgagtctggagatgaggatgaaggcatgcttccgcctagtccaaaaagcacggttcctggaaaagacgtggttgtgcatgagcaaggtcatgaaagctctgtatctgctatacattgcaacgaagaaacacgggatggtcagaaagcaacggcagcagctactgttgcagctaaagataaatctattttgactaagaagaacccaatgattactggcagcagccttcttgctgctcgcctagagaaggccaaagatgccatgatggcatcaagtacgtcagatgtttctgacacaaaagttgtgattctggaaccaccatctttcttgaagcgtacaatggagaaaatagttgaatttattatcaggaatgggaaagagtttgaaggaaaactcattgagcaagacagaacaacaggaaggtttccatttcttctgccatctaatccatatcacccgtattatctgaagcttctcgaggaaactcaagaggtaatgtgaaccacgcttgtttatactttcagattgcaatatttcctttattatccccctttctgtttgctgtttggtacactaagttttattaatcccttatgatatatgcattgtttcaatgtatatattcattatctttacaagtttacccagtgttttatgactgaacttctctcaaaatttcacgcgctcaatcctttcaattgattgttcatcaataatgttttggtgaaaccgcactaggcatcaactgctagatatgttcatataaaacctcttgtgatgatgggctgatagaaatccaaattttcttcattcgttggttcatttgattgttctttttggacaagcatgtgttgatctaccttatgtttcttttttttttttgctctttttaattcttcagcactttttttgtgctagtgcctgaaatgctaatggcttttctataccaagctttcctcctgtttgtttctttagtgcacatgatgtcttacacttgatctctgaacttcaggtaagttcatatgtggacatatttcattgctgatgcactacctacctttccccccttatttttttgttgataattccagtcactaataaaatatttggtttcattttctagcattggtaaacagcagattaatttaaagtttttcttgttgttttggagagtcttgtgttaccatttccatacttgatttacttcccagtatgtttgtttgtaaattcctagttgctttgttctactttttttctcagtactgattttattggctaattgaaatgcataccatctatgttgatgtacttgcattctgcgtattcttgctttttgagaataaatctcgaacttccagagcgtgtttggttgctattttttatttgcgtggagaatattattatatgtatatgcaatgtttctgaacttgtctgtttgaggtgttttgtaggcctccccataccaataaacaaatggaaaattgtaaatgcacttaactgtgatttaaattctgaatgattttgcagtccaagtcccgtggtggttcttcagagcccaaagacagaaaaagctcttcagagcacaaagaccgaagaagctcttcagagcagaaagacagaagaagcccttcagagcgcaaaggtagtaatcatggtaagggagaaagtaaaagcaagaaacggtcaagtactagcaaggatgccagttctcctgatagaagctctgctgagccgtcagagaagcagctctatgacaaacacaaacaagggaagggaaagttccacatgatcattagtggggccaagaaggaacctcctcggaatgtcactgcagatgaagctgctgctattgttatggcagctactcgtggatttggccctgccaatattcaaacaaacacactgaaggacactagtggaattggtcagacccgtggagataatggacatacttcaagctttggaagtttctcctctttacaggacccagatgtaccatccaaacctgtttcaaatagtgaggcatgtacctcactcacaagtagtggtcagcctaaaaatgaaggcactggaataattgatgatgattggattgcaaacactatcgcaaaagctgctgctgttgcagcctctaaagaagctgattcttctgaagcatccatgacaaaagagcagaagctgaaggctgagaggcttagacgtgcaaagatgtttacctctattattaagagtggtggcagcaagatggctgatttgtcaacttcagctgatcaaactaatgaagctggaagggcctctcctggtgatttgaacttatctgagtctgatccacaaccatcagctaaggaacgtgaaggtagctctgtgccatttgaacgtgaaggctctaatctggccaagcaggagaaagactctgatgacgaacggaacagggcaaggaagtataggaaaaaacatcacccagaatctgacgaggagaactatgattcagaggagagctataaacactctaggaagaagcaccgttcagaggattcaagagctcatactagtgatgttcacaaacataagctcaagagacactccaaggatctggaacccaggcatcataggcaccgtgatagctcttcagaagatgagcatgagcacaggagctccaagtcaaggcatcgtcacagggatgactatcactatcacgaggatgatgagcataggagttcacatagacaccagagggaccaccgttccagttcaaaaaggaaaaaggacgatgaccgagataagagcaaacaaactatagttctcccagaagtctcccagaaccaggaaaagccccctggtgacactgctcaatcctcccaggcaacaactgaagtgccgagtgagttgagagcaaaaatcagagcaatgttgctagaaacactgtaaatctgtaataccctgtggggattatgctgtacaatgggataatgtagccaactctccttgttcagcaccgactcagggtatcaagaagtgtacttgttcggttatctctctcatttgaaatatgtgtactgtgtacaggatagcgactgcgttccgcaatggccatattggttcactactcggtaccaaggccatccaacatggggccttggatgagttggatcctattcgtatggtattgtgtattcgctgtttttcctcgcctccccgtttgcatgagccgagcgccgaacttgggctaatgggcaccgttcgatcgaagttcgaacaaatatatgcaaagcacaggtttcaaaaaaaacgaagagcaaacgtaaagcacgtaatatcacacagattaagtaaacaggcatgtactcctactctcctagtacactaaaattctcctaaaaacgcaattacgcctaattaattagcactatcaagcaaacatgccaatgtaatcgagttcgacggagcccaaccacagcttgcccttctgctccgccacctcgctgagcgtgacgcccttggcagccgtcaactcctccacctccacgccgtcggggttgagccgtacgccgaccaggtgcttggctgcgggcgccgcgcccagccgcatcctctcctggttgagcgccacccagtagcctccctaggtgtcgcgcctcacgttgtcggggtagcccgggaggtcggcgaagagctcgtactcgccggctttggtgccccgcagccagtaccggaacgcctggcacggcacggtgtgcgccacgacgaggtgcgtcctgtctcggctgacggcgacgccgttcgggtacggcaggtcggtcttcagcacggtgacccgccgcgtccgcgcgtcgtacttgagcagccgccctgtcgcgtcggcgttcatcgtgatctccccgttgaacctgcgggtgtacgtgctgctgctgtcggtgaagtaggcatcacccgtagcttggtcgacgtcaaggccattgaggaagtggaaggggacgccgtccgcctcggtcgcgaccacctgggcctcgccgccgtcgggcccgaccttcatcagccccttgtacgcgtcggcgatgtagagctcgccggtcttcctgaacaaccggatccccagcgggcgcccgcagatgctctccctctcctccggtggcacctcggacgacgagcagagagggattttccggtagttcgcattgtacgcgaacgtggtccagccggcggcgctgcctccccacttgagcacgcggccgtccgagacgccggtgtagaggccgtccttgccgtcgaaggcgaggctctcggcgccgctgacgccgtcgggaagcgggaggtggtagctccaccgcgtgtcggtggtcttgatctgctgggccgcgcacggcgagatcaccagcagcgacgcgacgctgagcagcagaagaaacgtcgccgtaaaatcgcgagccatgggtcgcctcatcgttgcacgtagccgagaaaacgttttcgatggagaactagccgctacctgcatgtttttataggttatggctcgtgacagcctcggcgtttcccggtgtccaagttctactcgaggtcgtcagtaatcctgctcgaactagtactctatccgtctcgtattataagtttaattctttttaagttaaaattatttagatttaattaaattatagaaaaattaaaaacatctgtaataccattaatttagttaaatttaaattatattttaataatatatttgtttactaaaattattagtagtatattttttataaatttaattataaatttagaaaaatttagaaaatgttaaacgactcgtaatacgaaacgtattgagtattgcagatggacgggaagacgaaacccaaccgaaacggagccacgacacaggcttggattcggttttcttcacccccgcgggctccggctccgttccaagttcccaatgccaacctctccttccacgaacgccacgtcgcggtcgcgggcaacccacgcgcccagccgcccacgccccaaccagattggcatcgcggccgtccatcgccgcatcggcgcaggcgcggacccgaaacccaccacacggcaaaccaaaaaaaagaggcctcaccgcacggacgcggaaatgggtcgcgacccaacccacgcattccgcccccggctccgatctgctaagccccctcggatcgggttgcgggtcccctcctcccccccgacccaccaccgctcgccgccggccgcctccgacgaggtcagtccccgctcccttcctcgcccttccccccatccccacgctgcctcctccgcctcctccgtggtgttatcgggtccagtaaccggagtcataaaccctagccgagggcgcggtctacgagctgcttcgtgcccgatttcatgggattcgagtgtggggattggacccatggaggctccgatttagcttgtatcttccagatcgctcccttgtatacgctgattgcgtcgttggtttgggacactggggattcgggcgggttgagccggtgaggtgaggggatttaatgaaggtattttgtgcgtgtttcatcaaccgggcggaatggcagcttgctgcatctccagatgttttaatgggatttgtggattatcagaggcgttctgtagtgtgagtgtatgcttaggatatgagcttttcctgccaatttctacttgcgcgtgtatagttatagcttgtagctacaagtagaagagggcatggagaaaatatagtaacatcaaaggtcactcattgctttccagtgttttggacgcgtgagagtttgtctggaaaagagagtcaaaatgatgctattaccttttctttgtatggatgtagtgtctttatatatactatattgctactagcgttgcatgatgtgcttgtttggatctgctgcagtgggcgatcatatttagatacaagatagcatgctggagccaacagctatggaagtgccgattactagctcagtgaacactgcagtggtgcctgtgcctgtggtgcacaatccacgggcacggaaattgcggtctgcagtttggcaggacttcactaaggaacggcgtgctgatggaagctgtgttgctgtctgtaaccactgtaagaagcagctcacagctactagccggtcaggcaccacacacctacgcaaccacctcgcaatctgcaccaccacctccacgcgtcgtgctggtaagcgccggaagcttattgtgcgccgtattctccacaacaaaacctccactgatggacagtctggtgacggacatgcttcgggagaggaccatgacaacgatggcacgcattttgaccaagaactcagtcggcgagatcttgcccatatgattgtccagcatgggtaccggttttcaatagtggatgatgtgggcttccaaaagtttgtcaagaacctccagccacggtttaggatggtgtcatatgaaacagtgagggctgatagcatgacaatttatgaaagcgagaagctgaagctgcaggatgctctgctcaagatcccttgccgacttagtatctcagttgatatgtggcgatcgaatacacagatggacttcttgtgtttgacctgtcactatattgaccatgccaatgatgagtggaaagttaggaaaaaaattctgaactttgtgcatgtggaggcaccttttacagatgatcagattgctagtctcattctagagaagttgcgtgagtggggtattgacaggaagctagctgccattgtactggacaactgcgcctctggtgagattgttgctagagagcttctcgtagttctgcagcctaggagactcctcctattaaatgggaatttgttccaggtgcgctcttgtgcgcacattcttaacctcacagtccaagaaagcttagaacagacatctgatataattactagagtccgtgagatgattcagaatgtcaagttctcacaagaaaggttcgaaaagtttcaggatactgcaaaactgttgcagatggaccaaaaactgctagttcttgattctcctaataactggccgtctacatacttaatgtttgattctgcatgttactatcatgatgttctcatgcgccttgcagaacaggaagcacattatggtgcttttctcactgcgaaggagtgggccgatgtgaaagccctcactgaaatacttgatgcgctctatcataagatggagaagtttcctgtggaaaatccgactgcaaatctctattttaatgacatgtgtgaggtgcatgttcttttgaatacctggcgtaatagtccatctcctgttgttgcacaagtggctgaccgaatgctgacaaaatttgaggggtactgggatcttactagaccagtaatggcattcgcatctattctggatcctcgatataagatgaagtctgttgagtacttctgtagactcatttatgctgctgatcaatttagagcaaagacaacaatagatgacattcggcagagttttaccaatttgtgcagtgaatatgaacagtcaggaaattcattcaagaatccatctgctctcttctactctgcaaccagtaattcttgcatgagttcggtatacagcaatggtgatgattttaagaccttctcccgtatcacattatctgatgctcgaaggggacttgatcaatatatacaggagacgtcatcaggccaatcctttaagtctgacttagacatgtaccttgaggaaccggtctatcgccaaaaggaagggcatttagataattttgacatcctgggatggtggaagtcctttgcagcaaagtatcctgtcctttctcaaatggctcgtgatattttagctgtccctgtatctatcatcccattggacagtgatgctcggacattaaatgagtatctcagtaccatggacccttcaacagtgcagggattggtatgtgcgcaagattggttgcgggaagatacagaaggtaccactaggtcacaccttctacagtaagttatatttctgccgggcatgttaatctgaattatttgtttcacttgtgcttttgcagttgctagttcagacggtcatgcagatgacaaagcggcacgtggtgatgaacttatcgtgttaccaaaataggtaatatattggacgcagatcacttgtttcagtttgctttgatacttttatcttttcccagatgtgcattcatgtgacgttctcatgcggaaagtttgggaggagcttcaatatttatgcttacatattcaagtgtttgactttctctgtttgctcatgttttcaaaaccttgaatacattgaagatcaaatctatatctatactctggtgcaaagattatgttcaataatataatttatccaacagcagtgcttgggcttaccctgagcagaatatccctactttcaaatagtagtatgcgttggaagtttgagttacatttttctcgaacaccagttcaagttacatgacaccattgattgagaagatcatgtgcacagatgttgctaagcttacaaactgcctaattgaattgctcatgaattcttgtttgtacaatttcataaatgcataaggggaataaataaaaacattctctaaaaagaaatggctacgtgaagcaccatttgctagaactgaaacctgttgaccatagtatttgtactcttaggcttgtagcctgctaatttactcacggcttcagatctcgatattagctaatactccgtattacttaagtacttccttctatacgttttcatataaactttctttactctccatttgcaatcaacttagtgtgattttttttaaaacccgtacagctaaaaaaatgaagaaaaatagcacactgtatatttcttttcttcactagactactggagtacaacaatcggagtatccgatccacagtaattcaccaccgaaatggtagtgttttaggtgcaattttcttcgttggtgcaggttgcacaatggtattaactttagccaattgcggttgttatgcttgtggcctgatacttgacgaattggttaagttaaaaatatgttacttcttttattgtattgggcaccaggattattacatcttcatttttacttgtctgcagttgagacttctgattgatggctcctgagtcctgaggagaccaaggaggcgaggacgcaagtaactgcattatttatgttcaacagtccaatttccaggcttccagctacacccctgtaaatgtatcgttctagttctagatctgtttgtacaatgaagtcgtaggtacctccaagaaggtagtatcaatttaggcaattgactctgcattaatgacttaatgtgtattatgctgctaagctaagttatctccatcgtagctaagttatctccatcgtatttcttaagaatatgcagttatgcaggcaacactcctgaagtggataactttgaatccaacatttcaaatgtgacaaaatttattctactatcaaagaatctgaatctgacgagtgacgacttgtgtttatgtcttttttttttctttcttaaattagccagtataaagaacggtcaagtctcttgaggcttatcaagatgttgaaaatcgtctctctcaactcacagaactttaaagttggtcacgaaaacgcaaaagtatgatgctag

SEQ ID NO: 7149 - DNA, 50013 bp, Oryza sativa
tattatatttttaacaatagatttaaaaaatcattacatatttcttccacatctaagggttaaattgactttttttaacctatttaacggttagggtatggaagggatcaaaatcaaaactcagggggtatacaaggaggtgaataaaaattcaaggacatagaaggaaattcagggacatagaagggatcggctaaagtttcaggagcatagaaggaattttctcgtgctttaatgcataatatttgtgtgcatttttccagcttgtagatgaacaacgctagggtaaaagaaattacatctctttatgtcgtgtcatccaataccctgaaactacgaaaacaaattattgtgcaattttaccttggtgtcttaggccaaacaaaacctaaagtataggcaataagtgatgttccatatatctttgatgcataatattgtgtgcattttcccaccttgtagatgaacaaacctaggggagaaaaaaatacatctctttatgttgtctttgagtgtaggtctaccaacgatgcatagactccaccattgatcctcatgagagagtcatgttgtcccttttcagcgattgaaccatccttgatgactgcaatcacatctgcccctttaatcgtggacagacggtgtgctaccacaatggtggtcctgcttaccataacttgatctagtgcatcttgaacaatgcgctctgattcagcatcaagggcacttgtagcctcatccaatagaagtatttttgggtccttcaagatggcccttgctatagctatccgttgcttttgcccaccagatagttgtgttcctctttctccgacagtagtgttatatccctgaggcaagcttgatatgaactcatgagcattgcttgccttagcaacagctataatctcttcttcggttacttgtcctttcctcccgtatgctatgttggcatgaattgtgtcattgaaaagtattggttcttggcttaccaatcccatttgatctcttaaccaactcaattttaagtttttaagttctactctgtctagtgagattgtgccagaatgtgggtcatagaatcgctccagcaaagcaattactgtggactttccactgccgctctctccaacaagtgcaacagtctgcatatgacaattggtttatagcatgtcagtacaagtttaattataaaggaaaataaatatagagaaatttgtattattggtaattttcatttgaaaggcatatttagttctcttgccttgctcaatgaggatgagaagacaaggatcagggcaatccaacatactgtaggaactatcaagtttaaaaaggcaaaccttagtgcataggaactcatatttgtaacaattgagtgcacaccctatattaagagcgtacaagcacaatagttgtaggaagcaagatatttcctccaaaaataaagcgctcctagtttgctgcttttttttttgggtgcacaacatctaaatgttttacccttagaagtaaaggaaaaacaattaaaagtaccaagttaactgtacctttccggaggggatgcctaaggtaaaatcacataaaacttggacatctgggcgagatgggtacttgaagttcacatgattcaattctattgtgccattaaccttttctagtatgattccttcatcaatgcttgagtcaatattggactttctgtctatgattgctaatattgaagctgcggattcatgggcttttgatgaatccgatgccattgcgcttgtttgagaaattccaaaagctgtgaaaactaaagcaaagtaaacctgcaaagcgattacaagattgacatattgtcattgaataaaaacaaccttatataagtgatgccaaatgtgtatctcttactctgaagacatctttaaaggttgatttccccccatgtacaaactgtgcaccaacatagaaacaaagagcatatgtgagatacaccattaaatatgaaaagctgaaacctaggcctccaaccattccacttctaatactttctttcattgaagcttgacatttttggttgtatgttttaatcactctcttctctgcacagaaagacgctacagtcctaatgctaccaattgcttcagttacaacttgacttgcatcttcatacatcacctgtagaaatcgctagcagttagcaaaacaatatttactaatattgcaagaaaaaaattcattatgcgatgccaatcatgaaatatgtcagttgtaataccaaattaggtgtcatctaacaaaacacacatcttcatcaaatgtggaaagtgtcaggattgtctgtgaattttttatataaaaaacagaaatggtagaaattgctttgttcatactagggactttgttttcaccttagcatcttcactgaaccctttcaagaacttcaattgtacataattttgcaaacccaccaaagggatcggacacatgatggtcaatgtgagcttccagtcagaagcaaatgctatagtaaatcctgcaataagcgttacaatgcactgcactagtatggctaagttatctcccacaaggcgtcggatgttcaaagcatcaatgtacaactttgctccaagtgatccgctgtaaaatttagaagggtgaattgacattcaaaaaaagtgttagatataagaatgaaacttataaatccatttgagtaacaaacctagaatgggaaggatcatcaaaccaagaaacttcttgatggacgatgctttggaaagacaaacagcggacacgttctataagttttccaccagccattccaaataagaaatattctaattgaatcgataccagagaaatgattgccattagaatgcacatcaaagcccagaacctagaatcttttcgaagttggtgtggtggatagtaaaaagttcttataccaccagacatcattatactaaatatcgggaaaagaagtccatgcacaaaagcagttataatagctaatagtagaataggtgcttctggcttgttgagattaaaaagtcgcctgattggtgctttattaatatccttgttgtcaccacattctttatcttcaggttcatctgtaagaccatgcttgtgcaatccatcggatccagatgagccaatatgttttgctaaagagttttttcttctatttctaggagaatcattgatcattgattgttccaaagacaaacttctacttttaagtcttgaagttgacacctcactatattgtacatcatgcatttcttcagtatgagtctgttgtaactgaataagttgagagtaagctccatcgggatccttgatcaactcatcgtgggaacctgtgggacattcatttttggagaaacaaattgaactacctctgattcacaatgattatttagtacggagaaaataccaagtaatgggtatggaagtatggcttaccttgatcaactatttttccttggtgaaccactgctatgcagtcggcattcttgattgtactcaaacggtgggccacaatgagtgtagttctccctatcatgaccctatttagtgcctcttgaactagcctctcagactctacatccaatgcactagtagcttcgtccaacaggaggacttttggatttttaaggatagctcttgcaatggcaatcctttgcttttgtcccccagaaagctgagcaccatgttgacccaccattgtgtcatatgcctatatcatgtgaagataaaagggatagttaattctaatacactagtatatatggtactgttggaaacaaatggcgtatctaggaactacattaggcaacttatcaatgaagtttgctgcatttgcaagctcagctgctctcttgatttcttcatctgtagcattttctttaccataggttatgttatctttgatggaggtcataaaaagcaatggctcttggctaacaagactcatttttcctcttatccagtggagtttcaaggtcttgatgttaattccgtctattaacacttcaccatcctgtgggtcatagaatctctctaccaaactaattattgttgatttaccacttccactttgcccaactattgccattgtagtaccattaggtacttgtagacataagccatctagtatcaactgttcaggccttgcggggtagctaaagcacacatccttgagttcaacattccccttgatatcttctaatattattccagaagttccagtgatgtcaatatttggttttctattgattatttcgaataacctatgagctgcagattggccttctgcaatagcagaaatagagggtgatgcgttacctatagccctgttacaaacaaaagatgcatttagtgtcaaaaaaaaagaagaaaaaaaacctatttttgtagttgaccaaatagtgcagatcatcactacatagttatttgacacatgaagtttgggtccacttgttgagttgaacaagtttcatattatcttatgcttcaaaagtaacactgttgagaaatatggtatttagtataatcataggttaataccataataattagataattgggtgaaataacaattgtatcaataacaagaaatctttttaaagagaactggatacctaggcatggagttgcaaaccctattcctacatatatgatgaaaaattataaagctttacaaaatctatacttgtaacaaaatagttgtgtcatgttatttaatttaatttaatttatttttttagcattattcgtcttgattttggcatatggcaaaggagtattatattgtaatgtggttaattctaactattgtagaagtaggcatcaagtgcctagtatgcctcagtctttttacttgataataacatggtagctgagaaactatatcaaaatgtttagtatatgtactagtgtgctctagcatatcatgttacagagtcaacaattaggaaactcacattgaaccagtcaaaattgcaaatacgacattgatgacttgccctccagtgtagcctttgctaatgactaacttggcaccataccaaaatgcaagagagtaactgcagtaaacaacaaaaaagatagagcctattccaaaaccactgataatcccttccatgatagtggccttgtatgccttttttatgagagtattatacattgtaattgctctcttctcaccattgaaggagacaacctgtttttttaaatgtttttttatgttaaatagttgcaagtaagcattattattgatgtacaaaactaagcattattatttgtcataaattgaaataattagaacataccattcgtatagatccaatggtctgctcaacaacattccccgcatagctatatgatacatgcgtctttccagatatttgagcccgtaatcgagagactaatgcaaaagagaaaatacttggaggtatacaagccatcacaacaagagccagcatccagcctcttatgaatccgatgacaaaaccacctacaaaggctgtcaaaacctgtatatattttcctacctgaacatgagtagtcaaattattagtgttacatcagatctttgcattatgtcatgagcatggaaatctatgtactgaaattggaccccccccccctctttagaaaaacagagtgtcgtactattaataaactagataattaccctgacatgttgctgtgagaaattaagttgcctaatatgtacaaataagttgcagtatgcttttttaaaccaaaacaaaatgacttctaatgttttatataatttgcacgtggttgcaaatatagtgcacggtgagcatattttatgtataattgatactaattattgtgagagaagaaagaagagacaatttgtaccatagatctattatctaaagactacaaataattatgatgatgtggcttcatgagagaagagagaaataacattaactatattttgtggggatgaactatataaatatataacccagtaacactaaaaacacatctttctagttaatgctatttccaaagaaaaaaattctcaatgcatgtgcatcttttcaaatggtgctctaatggaagttttcttctagtttcatttagactagtctagtgtactttttagtcttgttaccttctcaccaagggcatcttggatcagtacggtatctgcagatattctagaagcagcttctccagttgtcatctccacatcaaagaatgcaatgtcttgtgtgataatcgcttcgaggtacaaggatcgaatgcatgccgactgcctttctccagccattgtccaacatgacacctctggaataggtagatggagcactcatgagattctgtcatatgtgaatgtacaacccaactaaacagaaattttgttgcattgttaacatgtccaattgttccagaaaatttgtaaatagaaaattactggtaaatttgctttctaattgtggcaaatgtaattaattaatctgttgtctcatgaagtaatagaccaaaacctcttaatatcattttgctgatctgactatgaagttcaggaatggtaacaagtagtaaaactatgacattaaaatagccaaacattcaacaactttagaaaccatttttatactcttggtgtgtggatcgctatgttactcttgctagtgatcttaaataatttctacggagttgatggtttaagggcatgtacaatggttgataggggtatttttcttttggaagttcaactaaaaacaacttaaaattcaacatataggcatatgcaagagacataaaatatgacaactaatgtcactcgtttgtactttgtgctcataatatagttgtgcatatatatgcccttcctctcttacccttctctcatctacatcgttaagatgtactatgaggcgatatgttaattgtggtgttttacatgcccccaacatatagcttgagattaagcattcttacggagaaaagaagccattgatgttcccactcccaagtagatgtaatacagaacaacctgggtaaaagaaaatgctagagggtaaaagaaaaggaaaaaaatcataatagggaaaacattttgagatattgagtgaaagtaagtcatatagaagcacaaactggaattctatctttttccccgttccaatattaaggttaccatgggaaagtcatttcatgccttaataaatagttagaaaaaattaacctaaattaccatgtcatatttgactttacaaacttgtaaggctaaactcaatatacatatggagaaaaatataaatgtgactaaatttgttgatagaatgcagcattacaagtttgtactttgtagggtgaaatatgaaatcataatctattgtaggctccattcaaaaaaaaaattctattgtagggcaaaatacgaatcataatataaattatcatcccattttcaattcttgataactatttaaatgatgtgtataaaatgaggttatgcgatcctaaagtatgaaacctcacaactaggtcggtggaccaaattaatattgtaaattgatacaagtttgatatgatatatgtctgatttgtagtcattgtgtcatgcaaattattgtggatgttggagtttgttttatatgttaggattagtcatatacctcctaattatttcacatattcagatcatttttttgaaaacaaatatattcaaagcttaatagtattgtcgtttgcaacacaaattaaaatgaaagtggttgaaatcttcaaggcattctcctatccgtgtcacttccaagggtgaccaggccagatggagctcaagcaattgctgccaccacccccacctcccttgcaccacctaagctactcatcagaggtccagacggctgcaagataacaaaggtgggactattttcttctccccctcatgtgcactagagtggtcacggtgaggtgttcgagacgagcggtggtcatggcagtgcctagatccatgcctctgtagctagatatagggtatttccttagtggagactaggaagaactatgtatgtacccaacgattggcatagtttcttttattttattcaatggtcccatttagttgattacatggcccaattacataccatgaaaccttttctttttgctactttagatgtccatattcaggcaaggtggtcggtggctgacggggggcagtggtgaggcaggaggccaatgcacatggtggagcggcggatgcaaggcatgacgatggcgaccgtggtctaggtgtggaggttggtgatggctgtggggcaagcccacccgcatgaaggctggagacaaatgcctttagatcgatgatgaggctggtggctagttgtggagaagaggttgacaagataaagtgcttggatttggccacatagagtcaaatggtggctgcagtttgtcttttgctacctggcttggctctctctttgtatggcaggtctacttctagatatggtagcaaggagtaccatggtgaggggtgtgccagtggcttaggcagcaggggaggagggctgttgcatcttgagaacggtgatggcgagtcatcttgtcccgccatcttgttttttccgatctgatctccccttctttatagagccccccacccccacccctacccaaaacaaaaaaaaattgtggccgatctgcttctagattcagccatatggagctccacggtgagagtgagacaaatgggtcgggtaacaagagcgagaacaattcgcgaggagtcgggtagaggggtgtcgctgcgcattagccatgtgttggcaatggtttgaatggttgtggctggctaggtggatggtgaggccacaacggcaataggaaagcatgtaggctccatgcaaaaaagcctaagctaaaaaaaggacgacgctttgggtgctgcgatcccccttgagagcattgccaagtaatcttcctctccttcactaacatgatcctctatgtgaaaatcatatctaagatttcttgaaaaggctacaatgcttcggtgtcatgatgtctatgggtgaaaatggtacggaaattcccaaccgaaccgatatcgtttccataaaaataaatatcaaaataatgttattttttaccatttctatttctagccatatacaaaatttacttttttaaaaaaaatatgtcagtgttgtattaaagtcgctactaaatagttaaattcataaatctacgaactgatgtcgtttctctaaaaataataaataatgctaccatttccaaacgttttatccctaatggtctccatggaggtaatgctttgggaggtcccattcaatgggatgtgcatacgtggatcaactataaattcataccagtggtttgcttggtgctacgctccttcccgcattgtcggcatgtggtgtagtatcctatttttttatcatgattatagcctccggttctgtagtcttgtattttattctattttgtcagaagaaatttcacgttgtctagtgtggttcatttaaaaaaaataagtaaaactatttttctctcagaataaatgaaattaatttgccaaacacttttttaagataatatttgtcaaacacctacgctaaacatacctaaggagtggcattaaacaagattattaaaaaccacgacaatatgaaacaagcgtgggcccatcacgattgttccatgattccacccacttgccgcgcgtctaggtaactactactactttctccgtttcacaatgtaagtcattgtaacattttccacattcataataatgttaatgaatctaaacatatatatctatctagattcattaacattaatatcaatgtgaaaaatactaaaatgacttacattgtgaaacgaagggagtaccaagcaagcgcggaccactaacgtaatctagtgcaacggattgactccactagagacgcctagatcgtgaccggacatctgaaactgcagttgcatcagggtgaggtaattaaggtgagccaaacgaagcgtagttgattacacctacagtaaattaaacgcgatttagacaacatactccgctacgcgtacgagagcatctcgtccggtggtctcgcgctaatgttccatttagaaaaaaaaaaggtcggaaaagaaactttaatcatttctgtggctatattttattttatttttgaaaaatggaaatcgaaacggtattaaaaatatcagaaaatcaattggaaatcagtacttaatgcaggaatcattgagctacagaatcacatatttgatttaacatggctatatgttgtgatcacggaaattcaaacttgcactatataaattagaatctctcttatatttattaatgtactcaaaatagctatttggttgagaagttaaactataggtcaaacagagacatgtatcacaaatattggatatttagaaatagagtaaaattcataaaactacagatattttgactaaattatcacaagatatagatttaaagtgatgtataacaaaactataaatttaacaataaatttatcacaaaattataagtttaaggctaagtatcaatttaataatagaattatcacaaaactacagatttttggggtttaaatccttaacactaatactatgttgagttataaatgtccgaaatttatgattaaatttatattaaacctgtagttttgtgatacaatactttaaatatgttttaaatatgtagttctgtgataaatttagtgataagtgagtgattttacgatacatcatgttaaatatgaagttttatgataatttagcaaaactacttatagttttgtgaatttattcttagaaatatggtgattactatattataaaactataatttccacttaaatataaaaacagttgataaaacaacagtcgttttcgttccatattttaccgttttcgtttctgtcagttaccattttcaaataatttgaccggtaaaaattatactccacccggtgcctggctgactgccgcccgatcgatcagagttgccacaacaggcaggccgcgggtacgtatatatataggctgtgttgctcggtgtgggtcgggaattaatcccatgcaaaaaataaagtggtagattagcatattattaattaagtattagctaaaagtttttaaaaatagattaagatgattttcaaaacaacttctacatataatttttttaaaaaaatatatatcatttaacagtttagaagcgtaaccgcacgaacgagagagtcgtggttagaaaccaccacaaacaaactcagccacagtacgtgtgacaataccttgctgacccggtggagaacggtactgacgtcgtcgccgccgaagcagtcgatgaccgcggagaagacgacggtcatgagcggctccgacatgccgttcgccatcgccgccaccgtgccgaccgccatcagcgccttgtcgacgccgtcggcgtacctgaacatccccaggaacggcagcttcccggcgtcgccgtcgttgccgctcccttccttcttcttcttctccctctcatcatcctctcctctacctgcagtcgacgccattggcaagagttactgtttctctcagctagctacctagctgctgctcctctgaatctctggttaagtgagaggctactcgatctctgcccgtctccgttttataaatttgtcgggtctcttcgcgcgctctcgtggtgagtggccgacaaagacgcaaccggagcggctgcgtgatggatatcaaaagcgaataaataaatcggcaccatatgccctctccgatccatcggttgcctgtgctgtgaggggatgtttagttcgcgaaaaagaaaattttaggattatagggtgttatatcaaacgtttgtccagatataagaagggattttcagacacgaatgaaaaaattaatttcataactcgtctggaaaccgtgaaacgaatttattaagactaattgatccgtcattagtacatgtgggttattgtagcacttatagctaattatggactaattaggctcaaaaaattcgtctcgcaatttccatgcaaattgtgcaattagtttttttatctatatttaatttctatgaatgtgtccaaagattcgatgggacgattttgagcaaaattctcttggaactaaacaaaggcctgagtttgcctgtgtgctctggccctctttagatttcaacttttttctttaaacttttaacttttccgtcacatcgaatttttctacacacataaactttcaacttttccgtcacatcgttccaatttctttaaattttcaattctgacatggaactaaacacagcctctgagtccctccgcatgcagtgatacactggtacagacgtacagtggaacaagggcctagatacaaccacacaaattggcacccgttatttgcttgtgaattaagcgtttataaaaaaatttaaaaaatagttatattaattggattatataagtatgtaaagaaacatgtcaggcaaaattcgacttttgacttgagggtaaaaatcagaaaatgcatagtacattgtacaacgtaaataaaatttgttattttcttcttaatgtaatagatcaaatttagacatgtatctttgtgtggtgtcttatattatcataatctatcttatcaaagtttataaaaaaatttatataatatttaaaccgcatatatacacctacacctaggtatattgtggaaaaggctatacgtactaactttttcttactaataacactaatgtgtcatattatgagtgcatctagattttttttgtaacttccatctacttaaatcaaacggttgagatgattgttagtaaaagtttagtaaaaaaaatttacgtgtagcattgctcgtatattgtaatagtacctagtgttgtagaaaatattttctggaggtatggtggggggcggcagtttcttaactactggtggaatttaaagtgtttaaagtcgattgccctttaattcatgtgcgcgagatggtcacggccactcgtacagaaacagaagggatatgatgttctcctgtgtagattcggaaaaaataaaataaaacgattatgatcattcccttctgtttttttatggtggaatctgtgcggtgctaaaggtcgaatgtcttttaattcgtgtgcaattatggtcacttgtacaaaaacaaataagagggcacatcttgatttgaaaaaaaaaatgatgatgaccgtcccatcattgttgtttgggttaaattttacggtttaaaaatataccattactatccacctaattgaaacaatgtcattataaatatgttgaaatcggagatatgtcactatatatcccttcactgtatttttttatatttttcttggaccaaattatcccttatctgctaccttcatccgctgcactcttcttcctcccacgatcgagcgtggcggcggtggcgctctgcactcctcttccaatgacggtgcggatggcagcggcgcttgagctcggcagcatagaacatgtcggagctcaagcgtagtgacgcggtagtcagcagcgaggccagcgcaacactcatgactatagaggcgagcatgcattattcactcggtactcgtcacggaaagccaagcacccaaaaccccaaatctccaaaacctccccaatcggtggcggcaaccatggacacatcctccgtatggttgtctcccacctccctgtcaagaatgtcacgctctcaactggctagcgcggcatttggcgctctaccctgctcatcctcatggacgccaacctccttctcgccggatgtccgaccctaacaccatggctgcatgtgaggaggctcgctctatcatctatgccgtggatccatgggctagagggattggatacggttgaagagagaagaggagagagggaggaagaagacatggacaatttgattaataaattttataaaataggctaaaagagtaagtagtggtatatctcaaatacacattgaattgtaatggtaatttttaaaactaataaatttataacgatatggatccaattaacccttgtttttatgatggaatatgtataatgttactataatcgactttcctttagttcatgtggaattaagtccaggagatgtttatggtcactcgtacgtaatgccgtaaaatgtagaaaaatatttttttgttgatttgaaaattttaaaatagcgatggccattccgttctttttatattggaacatgtaaaaggttaaaattgactttcctttaatttatgtgcaattaattaagcccaggagatatttagggtgtgaaacaaagtagattatgtgtgttggttatttaaaaaattagactaaattatatacatcgtacattgacttggcatgtgggtggaatttagaacaagaactttagaagtgagtgtgctaatgcacgtataacttggtagataggtgcaatctagtaaaaagaacttaacaaatgagtgtaggagtataacatcttgtaaggtgagtacgattttaatacaataacttaataaatgttgcaacaacgttattatttcaagtatttttttacacgttagtttttaagtacttagtttatcaatatacttgtgtgtatgtctataagcatacataatttttgtcattcaataatgaaaaagtcaattaaattttattgtgtaaaaaaatattgtatttcggttaagatttgagaaggtgaaataaaaaaaatccaaaccgatggtgcaaattggataaatagtgtgattcctatagattaaaacaaggattgtaaggtcctatagattaaatcaagtattgtaaggtaatatccttaatattgctatgtaatggtatattggcatcatgaaaaagtttgtggagcactcaataactaaaacagcatacgtagccaagttgttgcaccaaattctaaatcgtcgttcttgtacacctactggccaagttgttgcaggccagttgttgcacttgaatgtttaattcctaagtttatatactagatcatatccacttatcaacttacactacaagaaatttttctatcaccatgaaaatattgcaacaaaatattatttgtagtaaatgtattattctattaccatgatctaacttttcgtgcaattgataaattatattaaaaaaatgtaccattgttgttatagtttattttttgttgcaatatatagtgggctatagccacattgtgacgtggaaaactaacattgcgacatggcaattttattgccataatttttattttcgtggaaattggcgtaatctcttcgtccatgctacattatcgttgcattaataattttgagcacctcacagtatgtaattgttgttggcacaattatagttccttgtattaagtttgttgcaatataaattttcaacatataagttttaagggctttaaattttcatattttctatacatccgccgatagattcttttggtttaaattagtcaaattttcatatgttggattatgttgagagatgtactctcgccataaattttcctgtagtgatagatggtttttcaagtagtggtttttaccgttagtacaatttactcaaaaagtaattatggtatttcatttatcttaattcaatttggttatgtcatctctccatccacaaataatagcatttctacctttttaaattctatacacaaatatataagcattcctatatttttgctgttgtgcttttcattagctgctaacccatatgcacacacccaaaacataattggcctgtaaaatgaggggtattatcataaatagaaacaaagaataactttcgtttgtttttatcttaatctgtattttaaaaagataggaacgcttatatttgtggatggagagagtaaatagttcaactaaccgatatgatccaattaacaattgcgaattgaatgaaatgtactactggtattttatcagaccgcatgcatgtaaagcgcttggggtcaccatattaatcaactctttcttttccttcgtgtgcatgtgtgcgttatatcatattttcgccaaccttttcatttattttttcgttatctcttcttaattaagtttggtaaagatattctgtagagtgcattgttcgatgattgagacatatatgatcttttgtagttctcgcctcgaagggaaatatgatcgatacctacagatcgtctaattaatgccgccaactacaatggttggtaagagtaggacgtggcctctctattttatttgtcccaacctattttatttgtcccaacaaaagttgtttgtaccaccagtcggagatctataagtagatttcctctgaattaacaatgatgcggtgctgatgcttgcgtgatgttgcattattaattggcagtgtcactgaaaatttcttatgtctatagctggtgattagctagcataggcatcatctcgatctccgaatgacagataatataataaaagatgatcaaggaaatttttctcagctgttgttttcgggtggtcgattggtacatgtatggtaatggttgctttgcggtcaagatgaatagatatctgtcaaaagtaactttgattgcacgctgattcccttttggtgtttcatcttctctgcctagctcgcgttgttgtcgatcgatcgggttggttgttcttgcaacgtaaaggttactacgtgaccaaaaactgactcatatcaaacagacaacgaccaaggttgtgaaaggaactctgctatctaggccaggacagcagcgattaattattccgactcgagttcagacttcagacttaagctcaactgaagtctaaagttttgttaggtgaggcgagaacatcagctgttccatcaggcatgggttgctgtactgccgacctcggctagtcgatcaggtgagacacacgcatggtcccttcgcccgtgcatctaccgtaccaacctcggctgagaccgcatcagatttacaaagaaacggaaaaatgtgttcttgcctcttttatactttgtgattttatccttgtttcttaactgaatcttgtgttgccgatgtttcgcttagaggacttaatataatggtgtaaagacatgtattgcccttgcaatttgtccctactttcacgatggatttgtaattttgtccatgatttgatatcaagcctattgatatgaattttgctcctattttagcatgaatttttcgcattgttaaagccatcctaacagaataggggcaaccgggcaagcataagctttagtaaaaaaaataggataagattacaaagttgggaaaataaagataaatcaccattagagttactaacatggctaagaatacaattgtctatataaggaatggtttggttcacatcacatgtttttaatatataacgcaattgacattttgttggcattttttaaacaaaattgagttatatattaaaaaaacggaggtaacagtagtatacttgcattctctacggttcatccggatcggtagtctagcagaggttgagtagcacaaaaggaatatggatcatttgccgtgtcgctaaccaaaagaggacaatgataaaagtgtataattaggcgcacgcccgaccatttgattcatgatcaataatttagattgaaatgctacagtaaattaatgcatgattgaacctgtgagagatgtgtataagggtacaaacatattgttttcatgccaactgcatattgttttcgtcaacgggatttctcagattacttgcaatcgtatagacacatccagtggcatatgtatgactcttttcttatatatagctccaaacaattgcccaccactgatagtttggaagaccattatcgagtatatatatatgaaaattctttgataggacgacttgaaatagctcttttattaacgacaacatctgttcgtaatggacgaaccaagaaaaactagttcttggtatgaagtttaggaccactaatttttgtcccatgataataaggcaaaattggacaccacctagacactgaaagactcctctcgatcgggtagacaaagaaaaaccaaaaaggcacactgacgaatctacagatgtacaaggaacaaaatgtaccgtacctttccaggatgcaataggctagtattacccttaaaaaatgaaaaaagatgcaataggctacagtacataactgcattttttaggtatccatccaaaatctccacgaaaatatttttcggtgcgtgcttttggtgtcagtatccttaaatttcttctcctttatgtaaaaaaaatatttgtaaccattaacccagggaataccttagtaatacttatgtattttcctactgctttcagtcaaatataattattctgctttctttttctccaatacagtttgatacttgatagggattttgcctttatatattctcaatttgcactactgaagaataatgcgccacatcttaactttgtggatgtgtcaatcacctcaggcgcataatgttttgttggtttatcatgcaaggaggagcatatgaatgctcgatgtgaccagctaatttaattttattcgttaggacttaaaactaacggggtttcctaaaaaaaataatcagggattttagaggagttaacaggatttagttcaattcctctattaatttctagcttcctccactctaaggaaggcctaagatgattttattgtataattagggtatgtttagttggtgaaatgaaaatttttgggtgtcacatcggacgtttgaccagatgtcggaaggggttttcaaacacgaatgaaaaactaatttcaactcacctagaaaccgcgaggcaaatcttttgagcctaattaagccgtcatttgcacatgtggattactgtagcacttatggctaatcatagactaattaggctcaaaagatttgtctcgcgatttacatgcaaattgtgcaattagttttttctttttatctatatttaatgctctatacatgtgtctaaagattcgatgtgatgtttttacgaaaagtttttgggaactaaacatggccttagcatgcatgttttagccaagtactctctccgtcccaaaatacaagagattttggttggatgggactttttggacagagggagtaattcattttcatttcttagacaaatctctccatctcaattagttggcacctttcacttggctgtaaggtgattgccatagtgccatcaaagatcaagatatgccaatcaattagagcaatgctaccgtactaaatttttcttactaaacttttactaacaatcatctcaaccatttgatttaagaaaaagttaggacgtatagccttttccaatcagttatatggtcatgtccacctcccttgttgtcgtctccgactggcagtttgttctaccactcatttttctagcatgtagtagtagctggagccggaatgtcagttccttgcgcttacaacttgtcattgaaattgtaagtttgcctattgccatgttagtattcacttgcatggcagcatatgtatgtcacatgcatgatgtcatcatggcatcatctcactgaaataaattgttgacgatgattgtctcctaagtctgcattcttttcttcaattctaaactataacttccttctttttcattaacacatttttcaaattgctgaattatactttttttcaaaaaagaactttatatatatatatatatatatatatatatatatatatatatatatatatatatatatatatatatatatatatatctttaaaaatcaaataaacatattttttaaattgtaataactaatactcaattatttatgtgctaataatttatctcactttgcgtgctaatgaaaagctaaattaagttggagattcaaacgtaccctaagtcctaacaaagttcatttggtatgcacgttaacgttcgatttgcataggttatattgatcttaatttggaattattccctatagatctttagaaaaaaaggtcttaatggcaaatcaaatattgtcgtgaaatgtagtgcatgttaggaccaaagtataatgagactatttactgttggtattgctgtagaagttatgggttagctctaggggtgaaaacagtatggaaacttccggctaccgtttccagtttgcaccaaccgttttagtcggtttcagtaaccgacggtggcggaaatggaaacggtaatatcttctggaaatggtagcggaaatgggacgggctttttccgaccgttttatcggtaaccatatttgtatggtaatttccgttaaaattccgaaaagaatccgaaagttccccagcggctcagccagcccaacccatcggaagcctatgaatgaagaaagcttggtaggcttgcagcctataaaaaagtggaagtgactagggaaaatattgttaaccctatgacgttgcatgtggattttgctgaactttggtcttctcaacttatcgatgttgaagcattgttgaactttgtttatattgtttgtcaaacttattatcatatcattaattatcatataacggtgttatgtggagtgtgatgatgcaagaataaagttaaaaaatatctacgtgcatagttaaatgtgtgctatgccacactccgctaatttcgacatgaatttttgactttcgagtttcgaccaatatcggtatattccgttccgatgatcccgtttccgatataccaatattaccgatatcgttaccatttccgggtctaccgttccgatttcgttttcaagaaaaaaaaagaaaatgaaaacggtatagggtttttccaaccgttttcatccctagttagctccatggtttgtagacttgtagttgtatgtctaagagaatggtttccaaattttctagtttatccactcaccgaaaagaaaaaaaatatggtgtatcgtgagacctgagataccaatatatcagacatatttagcgagcttcttataatcaaaaccttcatccagatcttgagaaatatatttacagaatttttttaaaaaagaaactaagagttattttttagcttctccaaattctcgtaaactggttatcaattagtagttgctactccgaacaacacccaatcaggaccgtaatgtctcacgtaccaacactccatgttctccgccaacgcttcatgaaggcgtactttgactttacgtgacccgtccccggccgccatctgcccatctcctcatgcggccatcgccggcgctcgccggcggcggcaggacggtcgcaaatcttctctccgccacggagtggatgcttccttctccggccacccaagtccacaccatctccgtcctcccctcccactcaccgccgtcccctcctcaccacttcgcgttctccaacctcaccaccgcgcctaagcgcaacggaggcaagggggaagaggagggccgcccaaggttcgaggtggtgcgcgacgatctcctccacccgctcgccaatggcaacaaggcccgcaagctcgacgccctcctgccgctcctgcgccgccgcggcgctactgacgttgtccgtgctcaccgttgcattccccttcacccagccttgatcacatcttgtttttcaaatctgatggtatcttcactgttctggacttcggattgcaggtgacttgtgggggttgccagagcgcccatgctgcggccactggtgagatatggattacccattttgtttttcttcattccacttgaatctgtgtgtaatttccagttcattctttacatgagctatgaccttataagccttggtaaacgatcccaatgcatccctgcaaaattgctctctaggtcatgcagatttgtcccttgattagcgcgctgatatagtgaatgtgctgcttttctttcttgaattcggttgagtccaacgaaaatgttgctttgctcatagcattcactttttttttttcatttactgcattagcggtccactgtgctgagtggggaatgaggccacacatattgctgagaggtgaacagccagatatcccgacaggctacaatcttatctctttgatgtttggcaatgtggcttatgcctctcggtcagtgtacgcacacagagatgaaatgctttacaatcacgccagaaaagttgcaggcacaggtggtacagtgttgtgggctgatgatattagcaaagaggattttgttttagatgaagataatggttgtgaaattggttcgagaagagtagttattattaaggaaggggctggtgacgtccaagcattgctaggtaagtaatggactgtttttgccctgaactcctgattttagttccgttcatcagtaaaaataaattttcgacaacagaataatctaatacccataacttagaatgcatgtgtccttgtattgctatatttgcttataggttgaaaattttcactttgagtattaggatcagggcagtcaattttgctttcacagtatgttgttttcttattcacttgttaatctgaaacctttaacttgggccccaaagaaaagggaatcttgcatatttcacatggctttgttgtaccttcaggtgttattcggctagtggagtacctttacaatctgtcgtcatttcataaacatgagaatgttcatgtcgtggtagatgctgggacaggcacaacagctgtggggttagctcttggagcggtatgtctagggtgcgtttgttaatactacttgcatattatgctgccagaataaattgagagttatcattacagcttttgtacactttgaacttttgagagtttctaatggtattacaggtatcatgattttccatttcttttatataaaggctttgttgttggagatacttttggaatatctaaagcacaacaatgagaacagttcttgcacttgatctatcaaagaaaaattgggataaattaatgtctctgatgacaaatgtggtgcattttaacttggtcaagcaatactaattaaaaatcgtgtcaatcaaaatgttcatcacctagtatttccatgtctatgttgttgctttctccatccatctttgctagagatcacagtttttctcacgatccttgcagattgcattggagagtaactgctgtcatgcttgctgacacactcgaaagatataaagaacgagagaagtccttaatatctgactttaagaagctttgccataacaactaccatgaaatggtgggagaaaatgatattggtgacagtttagttgaatgggtggaacgattttcaccaagacggtatgcttcaatcaattaatttaatatgctgcattttactgagcattcattttattcaatacatgctgctttctcaagtgtttctgcaatacaatgttgtcttgggtcattttcaaggcatgtcactataaattacagaacattctggacgtattcatgattttgtaatttgagggtgttcatttactaagtactagtttccttattagtatctagtaattttcttggtaatattatagtcggcggttgaagtggacttgatgttctgattattatttgttttggtgaataattatgtccttctcatgcctttagttcttgctattagaatctttagaatttgcgttcgaatactgatttttcttggggcctttttttttttgttcagatttggcaaggtgctgaacggtgaaattgcattatgccgccagattgcgcagcaaactggtatcctgttggatccaatgtacaccttagctggttgggagcaagctgtggatctatgtgttggagacagtagaaccaaagtggtgatgatccatacgggaggaacgcttggcttctgcggattggcgcagcggtactcatcgcacttcacctcggatgagcaaacttaggccctgtttcttttagcttaggattattataatccagattattaggagtaagctaaaagatagcttattataatctgataagctcatttaggtgagctttttctagattattgggtgaaaaattacccatcatgccaccccactccctctttagacttgcaaacccaataatctaggctctaataatctaggaaagaaacaactaaccacttattctactacagattataacaatctagattatagtaatctgactcaataatctagattataataatcccaagctaaaagaaacagggccttaaccaggccaaccttactgcaagagtgcaattgcatttttacctctatttatcctccttttttaagtccttttgccacttcccagggctagagaggtactacttttgtatacgagtcagaattgcttgaatagtcagaactctgaaactctgaattgaattgcctaagccacactccagaacagacaatttcatcctgctgatctattgtgattacccatcaaattcatggtctttggctgaatctgcttcccattttcatctgaagattgaaacatacgcacgctgaaacgccgtaactctgatggtagtgcagtgcaggtatagttctgaagtctgaaatccttgcggtccttcaccgcctctggatcccgcgcagggaaagtagtggtggagacgcgggcgatttttcccgccggggtcgagacagacagtcctttcaggcggggacagaccacgtcgccgtctgatcgcgaggcgtcgagaacgacgacgccgccaacgacgtcgtcgacgaccccacgagagcgcggccgccggtgtcgctcgctccagtccacccacgcacgcacgcacggcacgttggcgcgcgcacggcgtgacgaatcggagaaaccgcagcaaatttctcgacgcaacgcgacacgacgtatacgtcacgacccccaccgcgcgagatcgattgggccgcgcgcgcgcgcgccacgcacgcacaccggacgcaacgcaacggaagccgcctgccccgtctcgtcgtcgccatcgggacggctgggccgcacgctgctcctcggtccttcgccgctcgtctgctctgcctgccgcacgcggacgcgggtcggcgcggcggagtgggggtctggggtctatggccgccgcgggtgcgggggcgagcggaccggcggcggagacagcggccgcgacgttccggcgggtgtacggcacactcaaggcagagcttctcaaggacccctccttcgacttcaacgacgacgccatccaatggctcgagagcgtcagtgcaactcgtaactcctcaagtttttttttctttttttttggggggcactgtccttaattagataaactacaatacatgaaatatttgatgttttttgtctctttagctttggtacgatctgcaagttgcaacttcttcattgtttttttttttgggtattaaatgcaatttgtcaatgtttagctgaaaaaaaaaatcactgaaccttatctctgaacagatgctggactacaacgtgcttggtggtgagaaaaacatgctattcagaaacaatgcgaccaaaccaaacaatggcacattgcgatatggttggcaagtgatttagtcatttaagatctctgctcttgtacaggaaaattgaaccgtggcttggctgttgttgagagctacaaaatactgaaagctgctagcgcaacagaaccgagcgaggaggaattgtttcttgcatgcatccttggttggggcatcgaatgggtacatgatacttgtatgatttagtgacctgggattatgaaacaacaatattagcaaaatattttctaaacttttttgttctttgagtaacctgcagcttcaggcctattttctggttcttgatgatataatggataactcacaaactcgacgaggaaaaccctgttggtttaggcttcccaaggtttgtcaagtaggattaacttgtccacatagaaatgtccttgtgttactgtagattctcgagtgttgttaaaatgttatgattgtactccaactaaacaaaggaaaaggtaaaaataataacggatgataatattgttctcagatgctactgttggctaaatagcaaggggcagctccacactagggataggtttgatcatggtattagcttgattatctagtaactagcataagatgcaaggaatgatatagatatgtagattaatgctgtttacaatttgagtcctttccttgtcttggttaaatggtgatttagctcatattttctaccttgagcaggtcggcctcatagctataaatgatggactcgtccttcgcagccaaatttcaaggatctttaggcgctattttcgtggaaaaagttactatgttgatctcctagatttattcaatgaggtagttttacattcttaggatttctcttatttgagaaccaatttcattactgaagcataattttgttgcttcctccctaggttgaaattcagacaacttcaggccagttattagatcaaattacaacaaatgaaggaaggaaagatctgaacaagtataatgtacatgtgtatgccactgaattacgaatttctccatggtgtcatactgacatactgcttgcttagtgccctagaaggcagttgtttgtcagtttcatttttactcttcttgcttgataataatcatttttgaattttatgcagatataggcgcattgtggaatataagacagcttactattcattttatttgccggtaaaaatgaatgactcccatataatattttgaaacttttatagcatcaattcaggctgttgctcgtcgatttcttcaaactgagaaaatgtttccgcttttgctgccccttggggaaatgttttatacttttcatgaatacttacactgttccaatatgtggctaatcaaagtaaacttagaaatctaattcaaatgatcagctttcgctgtaccatgactcatgactcatgagcatggttcctcacaaacaggggtacatatagctcagaatgaaacttgatagtcctagaaacaacttcttgtaattcatcttgtggaaaaatgcttgtgcacatgtcgtagtgaggttgagttttgtggttgtttttgtttggtattcacaagcaaaactttttcaaccttacaaggttgcatgcgcactgctgttgtttgatgagagtttggacaattatgctcaagtgaagcatatcctagttgagatgggtgtttactttcaaagccaggtaagatcatcttgatgtttcgttctcttttccacttgaatgcttctcttcttggtttttctgttttcattcatatcagtatcgctagtaaggttttctttccaggatgattatctggactgttttggtgaaccagaaattattggcaaggtaagtacactcctgcagtactatcacaagtttcatagtacactatcaaatgttctttggacttgatccccaagcaatcttaccacagataggaagtgacattgaagatttcaagtgttcttggctatttgttcaagcacttgagcgcgctgatgagaaacaaaaaggagtcttgtttgtaaggcccccgcgcagtactaaactgtatctttgcatagttaagcatgacgtcttattctgtgaatggcatgattgcaggaaaattatgggaaatcagatccagcttgtgttgccaaagtgaaggatctatataacgaacttcatctccaggtgttcccccattatttttgttttcttttaaaatattttttatacataaaatggttttttgttttccattttgtcgttcaatgttgaaaaatatgtcttttttttcttaagatggtataatccagccaagtttcagccttcaatccttgattttgaatgttcgactttttacaaaaagatgcaatgaagccttgatattatatgcaaccgagacgcttacccaaaaaatgctgtgatctgtatctgtttactcatttctttctgcagttgccgcgtgctttcctgccatgacaaattcatttatcatacctgatttttttttaaatctttcagcgggtgttttctgagtatgaaagggagagctatgaaaagctgatctcagccatcgaagcacaaccgaatgaagcagtacgagcggttctgaaatcttttctgcacaagatctacaagaggagcaagtagaacacggctgaaaaataaggccaattttggcatctcgtggattattctggttcttggcttcttgttgggatgtatagcataggtgtgataggtttctaacttctgggactttgcaacgaggaacgtgcctgataaataagaaaaatagtttctcattatatgttccatggatcatatggctagcaggatatttcgtattgcacaacatgaccagtgtgctgaacagcttggcgattacagaaaaaaatttgagaatatattttctttttaaatatttgcatttatatacatgcataggaataatttgtaaaaatatacctcttccgcacagtgttaacgcgggatcgctatgtaatcacagcatcaatacgcggtcagatcgttcagcgcggcacggcttcgatcccgcgggacggatgcgcggaaccgcggtcccgcggaaccatagtgcggcaccgacgagcggtaccgcagaaccatcccgcggcaccggcgcagaccagcgctcccgcatgccagtggtgcggcaccaattacttaattaacctaattaatcacactggccttaatcaaagcaaatcaaagcaaataatatatatagctaagcagctgcgcaagctagcttcctctgctaagcagccggtgccgcgccatggttacgcgggaccgcgttctccaccacgctcccgcgtgacagggcagcgcgatcgaccctattccgcgcttccgacctgcggaaccgaagctatgtcgcgtgtttgtaacggtcccacgttcccatcatgcgggagaggtatatttttacaaatcattcccatgcatatatataaacataaaatattaaataaaaaggtatattttcaatttttattcggcgattacatctattccctgcttgcataagttgcataatactatgagattaaacttgtaacagataaattgctgggatgtttttctcttgcggaaaaatggaataacaaaaaatattttctttgtactttattaaatttgttaatgtgtatatgatcatttatcaagatattgttacagctttcctatcctgtaattagtaaataccatcgggagaagggttgagcattcttcattcttcgtcacaagatacctgatctgatcctgcctcattctgtcgttggatattgcaatgtagccgagctgacaagctccaaaactgatgctctgtacatcaaacctcttctgtcccagtggtctatgcacaaatctgaacactatcaataataatacactatggtactccggtcgctccgcagattcagctgcagatgctactgaacctaatgatgctgatggactataaactatggccggccatgataaactaaaaatgagaactcgtgtgatcaaaattttgtagtaatagttaagccagtagagcagattttagtggaccgaccgtcccagcctctaatagatgcatggctgcactgtaggagaacttcctggcaaataggaaacatggaacggatgtagtattgcattggcaccactcagttctgtgctccatctgataattcacatgatcaataccctgtaaaatgcagcaaactttaagtgagaatcaattaacagaataacgtgccatagaaggtagaggtcctgcactacaggatgcggtgtctgactttattcttaggaatagaatttaacatcaggtagtatagacagggaaaccagtcaacataaacatggaaacacattccttgtaacaaaggttggagttcgcaaactggaaaggacctctgctatgcagatacatgtttctgagtagattagttctttattcaggacaaaacaaggagaattgattacactatctaaattgaatttcctacgagatggacaggttgtgaggcaaacaagtgagatagaacactagagcttttttatcattcacaagccaactgaaaaagaaaaaaaaagatgacaaaacaaaatccacagatattaccttaattgaattgatttgctcaggacttgctgactcatactcaaatgtcattggatgccaagtcattttgtctttaggatctgaggactggttccatgatgtatatgtcaaagttcttctttccagttcattttcatgtccattgatctacaaagttaaaagaatgggaaacattatgaattgttgtgaagaacatacgattatgtcctgcagtctgcaaatcaatatcaacaataacaagccttactgaaaataatgtctgcacatagtgttcatctggaatgcaatcatgctccattcgagtagatcctttctgcaaggtttagcatggatatcatgtctcagtgaagagctcaattgcaagaaacttttgtgatgtgagcaacagcttgaaattgacggtagcatttcatatgcaaacatatgaacaagtttgacaatctgaacttccatttgtcaaataaatatatgaaagttccatctgaatgcgtgcttgacatcttgagaatagataaaagagaatgtgaccggttgaaactttaccgatatctgctttcgacgaagtccaaatcctaatcttcgctgcaagagaagcataatacttaataagtgcaacaatcgtaggtattgataaatataattaattcagggaacaacagtactattgggtacataatgaaacattccttagaagggtgtaaaaatgagataaatcatttgattttggtgatcaagagaaaacaaaaaagactattcgtattcacatcatataaaactacatgtcagacagcagaataaaaactcgctttagttatcattgagcgaaggatagtattacatatgaaaagttgtttatacctacggtaaagaaatggtgtcacttaagaattggaagacaaagtcaatgattgttattatacatgatattagccaatgtatgttaaaatgatcctctcttcaaactagactgaaaaggaatccaaattaaactaaacacttacataattaggcttctgtccaagcaaagccttagttactaccatctgcaacaatcaggtcaaattcaatagaatcgttagtgctacatatagaagaatatgtaggattaatggaccaaaataaatacgaacagttgtcttaattcagcataagaacaatttaactccattcatttttttttcagttttacacaacttttagaagttggattaatctaatgagaacataatcagttcgcattgtgcataaggacaattctacaaggaacaaacaattggctaagataaatatatatattcttatcatgcagtaattatgtagctggatgatataggctatcagaaaaagtattgctgataaaatgtaaatgtatagcacaaaacccccattctgaacatatatagatttttttttttgactgaactgaacatatatagatttgatggaacttttctcagacaattatgctgcaacttggttggcatttttttcccctaaaaaatagcatatatatacagacaaagcattgccatcgaggcagcagagcactaggatactatcgttcttaattgattagatagtatcatttgattatttaacactgtaaggcatcaaatatctacaaacaagggaacagaaaactagtctcacattcacatcccatataagcaagccacatacctactaacatgtttgctaaacaagttgaagttcaagtcacaaaggttctaacatttacagcagaaatttgagggaaattgaaaaggatacttggaacagactagtaacctggttaataactaattttcttgaaatgggttaacatgtgaaggattgaaaaggactaaatcaagctaagcaagtactccaatgtcgaaaagaataaactcaaaaggcaatataccttgcaatgccttctgaatacttgcaagacaagtttgtcgccaacgactacttctgcatgtcttctggtcaatgctacccactgaaatgagaggatagatggttcagtgtaaaactctgaataaaaatgaaatactgattacaagaacaagaatggcaagaaattacagaaacctgtgatcctttcctccatttgtcctttaggataacaggagacatgcttggattgtaacgcttctcggtcttgtcaacaaaactggaaaatatcaacatactaattttgagaaataaaaattgaaatatggcatgtagcctataggaacaaacatgaacttgcaagatttcagatgatctttttactcttacctgtctacaaaacttttagtcgaagccatcaagtaagtatatatgtagctgaaattgtacagaggaacacagctgcagtagaaaaggatattttgaaatgttaatgttgaaaacgtctataagatgataaacattggtacataaaaaaaattgaaattcaaactacaacataaagacttaaagcatactgactagtggggaatatgatcagaatgtcactctaactctctctaacctatagagatgggtaacactcatcatgggaaactcttcaaggtgagcacccacaagggaaaccaagaaaaggcattcacggaattatgggatgccttcacagttgcatttttttttctaacattacttatgagaccaagcaaaagcgagagagcttctcaagaaaccttagcagcaccacaacaggaaaccacaatctaaatgcatcactaagaagaatgccctctatagagtcctgcaaagtacaaactggttccgtacgagttcacttgccgatttgccattactaaaccttcagctattaaaccaatcacgagtctgacagccacagaccacagttgaacatttaatcatggtccactccccataaaatttgaactatgtacgagcaagaacagggcactcgcatgtgggggaatgtaccgtacctatcagagagcaaaacaaagcgctggttcgctggatcctcgagggcggcggcgaacaacatcctctctgcctccaccatggtaggttcgccccacgccacctgcaaggcacaaccatattcctcgctactcaaatcgtacccaggtctcatgtcgatacacgccatcacatcagaagcaagagatcacgcaaaagaaatggccgaacctttacgctcctggcgagctgccgcccgtagaagtacgacgatcccgtggtggtgcggtcaagctggaagccaggcgccgagtggacgtacaccgagaacttgccctcctcgccgttctgccgaacacccggtcgatcagaaccaatcgaatagtcaaacagggacgaacaaatgaacgaactaaacgaaaatcagcggaggtggatgattggggctcacgcggaagaaggcgtcccagaggaagtcgagggggacgcccgcgcggacgaggaagaggaaggcgaccctagcggggcccccggagggcggcggcgcggaaggcggcgccgggaggggctgggtgcggagcagcgcggcgaggaggagcaggaacgagagcggcgcggccaggcggaggcagaggcgggcccgcgcggcgcggcgtccggccaccgtgagggccagcaccgaccccgccgacgccgacctcttcgccgccggcatcgtcggcgtcttgcgcgggcgcggcgtgcggtggaccagcccacaccgtgggcctcggtggcatttaaaagcgagcgcgaggagagagagagagagagagagagagagagagagagaggggagatctccttgtgatcgccgcggcggcggagaaacggagacgtgggggggcggtggtggtggtggtgttgtgttttcccgtagcttttggtgcgatttttgggcctcgtgacgcgcgcggcgtctgcgtcgtgcgcgggtgggtgcgggggccggtcgcacagaggcgaggcgaggcgcggcacgggcgtgcaaagtggctggccagtcgtggctcgggccggtgggggattcgcgatttcgcggcgtggtggacaggtgggacaggcgggatcagcgtcagttatgacggaacttccgttaagggcaaggtgttactgcctctaggctaaaatacagagtactccctctccctctgttaaaaaaatacctagtgctaaatgtaataaatccttataccataaatttagatatatctttatccagatttcacttcagttctaaatttgtttttttttggacggagggagtattaagtactacctttgttttgctatatagctacctaatactgtaatacatatccaatactatgaatttagacaagttacaatatggctcatatagtactatggataagctatagtgattgatagtatcagatgatatctcatatattgtattaggtacctccattttaagacgggtggtagttttggctcctttcaactgagtaaatttagtggaattttgtattaagtagtacttaagaaattaactatattctatgattctttttgtaaaattttctgtgtcctaatggaaccttttagtttcaccgatgaccatcgaaaattatcattggttttgagcatgataatgtggagctttgccacttgttttctttcttgatgtcattattttttgtgtatgtgtgcagcccttgggtcacttttataccacacagaaccaatgttggcgtttaccttcaagaccacactgtccattcgacgctaaaaatcaatggcatgtggacggttggaacggcatcatctgccatcgtaagaaaagaagaatatatatcaccacagtccctctcgaatctttggtttacaaatcaaaagagaagacaaacgttgcagggaggaacaaatccaaggacggtgcaagttcgtttaccaagttcgtcgtttaccgcggtgagaactgtgcatccccacgccagcagtagccagtaggacctctggagtctgcacctgagataaaagcagctgattatttttttttctaaagaaaaagggagctgattagcattctctaaaactccggaagcccgcctgtctagcattctctaaaaagagaaaatgcaggaatgcggcgatggttgtagaggagaagatgcagcaatgcacatggcgccatcacgcgcgtacagcggtacaggcaaggcagacaggcaggtaggggcagccttgtagaggaagagagtctgtgtcttggccaaactctgaagactgaagtcatcgtccatgccacccgtgttgccctgccggttgccgctacttcctttcagctacctgcctctcgtctctctccgccacgtccacgccctttgcgcattgcgcgtgggggatctggacccgttcctggttgactacttggctcgtgagaaacggatgtggcgtcgttggctcgttttgcggtttcggcttccctcccggtccctgtagaaactaacgcgggaagctgcgagcctgcgacgggagatgcatgaagtgcgaggacttcacgccgctagttattccggcttgctgttctgcaattgcccacggataacgcttttgctttaaggaactgaactttccagctctacaacaagtcgaaaacaatgggggccgaactttggtttttgtttatatccaaacaacatcaaaagtttcacaccgagtacacctgaattttctttatgcaactgaactttccagctcaagaagtcgaaaacaacgcgggctgaactctggttatttttgttttttgtcccaacaacatcaaaagctccacaagaagtacaccgaattcgaaattaaataacttgacaacaaaaatgtaatatgatggacacacggcatgaaaccaatttatttgcgagtcccccccacgctgcgcatcttgattcatcacttggtcgcgatgaacagcccccacctctgctcaccagcagaactcctttgaagttttgccttccatccattcacaatggcgtcgtagtcctcctgaaaataagtgaaacaaagaatttgatgtgcataccagcaacatggaaagaaggcagctactaaactcgcagttttgcctaaattacctggctgaaatcagagacgaactcgtttttgttcttttcaactttagcaagctccctctctagaacatcgaggaactgcaatacaagattgaatatgatcagtaccacagaaaatcatatctacatttcagttgaagagaatatgggaatgcagccagtgtagctccagagggggattacctgatcggtgcggtcttcagcaatgacatcatggaaaccagcattctcaagcatctggataatttaccaaacagatgttaccatagctctacactttcatgaaagaaacagtactattaatcatatagagtgtagctagcaaaagcacctgtccgtaagccctgacgtcgtgaaggtcataacccctttgcttaatgtaagctgcgaactcttctgaaggtttcccagggcacttgcagtaatcactaattaggaccttacccccaggtttgagccacttgaagaaacttttaaatagtgagggtttatcctgcaaagagcaaaaacagcactggtcaaaacacagttgttctggcatcaaagaaagggtaaaacatatttagtggcaggtaattcaaatagttccaagaatttatttttcccacaatcccactaacaattactacaaatgtatatacaggttctcagggcttgcctaaaacagtccatttcaagctgaaaatatttaaactgttgtaggctgtagagcaataaaccaggaagaaacaaaacatccaaatgggttgtaaataatgtgtaaaacgtacttgtatgtgaaggatagtatcacgactgtagatgacgtcaaacgtgttgtctgggtatgtctttttggtgcaatcagcgacttcaaactcaactgagcacttacgcccaatagcacgctcaagtgcaaaagaaaccatgtttatcgaaagatcaataccaacaacatgaacatcatacttgtcagccatataaaaatcaccgcccccaattccacatccaacatcaagaacgttctggccaggtttgagatccagcctgtccacaaattcttttgtagtttctggtgaacgaagataaaagaataggcatactacaaattagaacaaattagaatattactgatttaaaaatgacaaaaaatacatgcatttactaaccaattccaccagtgctcacaaagccttctccaaagatgcgttcatagcgtaatattccactggctttgtactgcacattgtccaaaaatctttgaaacccccgatcttctgttgaatcaaccttttgccatagccaacatatctgcatagtatggcatcaagtccatcagttcacttgatcacaggacatgagtgtgtatgtggatgtgcaaggacaaagaagtacctggttttgatttttcttgcttttcacgtaagctccaacacacttgcaagtaagtacagagagttcaaaggaattcccatcttgatcaagagcttgacactctttaaacacctatttttaaatcaatctgttagccttcaatcatcacaacttgttacaaagtagcgcaaataacattgctcagtgctgctataagcatactgtgtgtatagtttagattcagtaaagtgggtaacatttaacgaggcaagtctagtagaaaaccttgaactgtcaagcttgagattcaaatgatagaagggaaccagaaacaagatagttagcatactgaccttagtgtaaaaccttggctcccggtaatgtgtaggattcactttcctttttgaatctccagactgatggaaacaagattccctaaagaagatatagccgccaacctttagccatcttaccattctctttactagcttctcaacctacagtaacagtatgagttagcaaactcagaagacatagccaagacataccaagtttcaacacaaagtcgatttatatcatccagggttcatttcccaagacatattcagatgtgcaaagaaggatcgcaacagatcttaaatatgcttatttatttgaaatgagacacgatatgaggcctattaagtactatctgctcattacctcctcgtctgaaagatacatcagtaaccagtttgaaaatatcagatcaatggagttatcctcaatcatcaggtctggacatgtgacatccgcacacataaaggatgcattcttgtggtgaccgtttatgctttcattctacaagaaacgacacacaagactaaatgaatcaggcataacattcatgtagagataaaagaagccaatcatagttcagcgaagccaatcatagttcagctaccaaactggttttaaggttttaaatgagatgtgaatgttaaaccttcttaatcacactttcaatgaaatccattgcaagaacatgcccagctgttttcactagttctccagtgaagcgacctattccagcaccaagttccagtactgattttccttcgtaaggaggaagtaaagacaatatctgcagaagtgtcagaagagatacgttagaacataagtccaggaaaacattttccagcatccaaaaaacatgtctaatcaatgtgactatgctaattttaaaaaggttaataattactgtgacaattgagtgagagggaacaatctcattcacctgctaatggtagtattattgacagttacagtaacacattctcgtgcgagtacagtccccaaaaattcttaagtgggtatttttcttgtgaaaagagttttacttcgtacagtcagcaaacaggtctgtgatcattaaagtaaaaggtctagcatcatcttctagtctggaaaaaggaaacagcaaaacagaatttttcctttaagtaaaacagtgacaacaattcagctgtctacctaagaaacaccttatgtaatatggaccctatgtgatgctactatgtcaaggtctgctgtcatgtcaagtgttcactccattttgctaaggccttgtttagttcccaaaacaaaaacttttcacgcatcacatcgaatgtttgaacacatacatgaagtattaaatatggacaaataaaaccaattacataatttgcgtgtaaattgcgagaaaaatcttttaaacctaattgcgccatgatttgaccatgtggagctacagtaaacatttgctaatgacgaattaattaggcttaataaattcgtctcacactttcctgacggaatctgtaattttttttttgttattagactatgtttaatacttcaaatgtgtgtccgtatatccgatatctgatgtgacaaccaaacacaaaaagtttccctaactaaacaaggcctaagaaaaatcacttttgactcaaggattacccaaaaacatacgagtcaacatcagtcactctctcaaaagaaaaacgaacaccaggctctccaacctccgttctcctttgagtacatctgtgttgaacaattctagaaaagcaatgcacgaaatgccgaccagtttgtcccggttcatcatttaccacgcgccacttactaccacgtaggaactgtatttggttgggaaaagtaccaaaaagtgcatgcacgcgccccagatctagtaagcggataagaaaatgaccagtacatttcacagaaattactgctaagcaccagtaaatcactggacagcggagaaggaattaggcaggtggcactgtggtatcacctcggggcgctcctccttgtcgagatcggcggcgcgggagtcgagcatcatggcctcgacggtgaggtccttggagtgctcctcccagtagctcttctgcgccttcctctcctccacctcaagcactcctgcgaacacaaacgcagacgcgtcagaacatcaccccgcaaaaacaacgccctccgcacgaacgagatccgcaaaatccaacacaccaacaccaacacccccacgcccccatccatccccaaaccagatcaagcagaacgagaacaaaacgcagggcaaaacagaacagatcaggcccgatccgatccgtgggggggaggagacgtccttctgcttaccattaacagcggtggcggccgcggcgtccatctcggcgggatcgttcgaccgttcgttcagtgcgattttagaggggagggtttagcgactgagagtctgagagaagggaggaggccggcgagattaagacccctcgatggcgaggcgggcgcgggagaagctccgggagcggcggttgaaggatcgcccacgaggctgcatccaccaccggatcacggcggaggttttgaggggggaggggaggaggtgcgggcgtgcgtgcgacgatgagaggtgagtgcgcagcgaaggggaggagggagggactcttataggcgggagaggggagagggggagaagaaggatccaggggaggagcggctgagcgcgcgatcagatcgaccgcgagatccgagcagatcagattttttttttcttttcgtcgttttgcctgagatgaggtggtgcgcttggcttcattcgggtcccgcgcagattcaaagcggccgaatcacaggagtatttctgcagaaatctttaggcaatgtttagttcccaaaaattttttctcaaaaacatcacatcaaatctttgacacatgtatgaagtattaaatataaattaaaagaaaaactaattacacagttagggagtaaatcatgagacaaatcttttaagtctaattagtccatgattagccataagtgccacagtaatccatatttgctaatggcggattaattaggctcaaaagattcgtctcgcggtttccagacgagttatgaaattagttttctcattcgtgtccgaaaactctttccgacatccaatcaaacgtccgatgtgacactcaaaaatttttatttcgcgaactaaacaggccctatactccctccctctcaattctaagtacggatataagttttcgtgtctaatatttcactctccatcttatttaaaaattttagaaaaaagtttaaaaataaataacacataagtgctattcatattttatcattaatataataaaaatataattataaaaatattttaaataagacggacgatgaaacattgaacacaaaatccacgaccgtggctaaaataggatggagggagtatgtgaaatggtgcagaatcgaagcgctcgaataaagaaattttcctgtgttgtgatgcagcagagagaaaatatgcctttcgttccagacggcgctaatgcgcgctgcctcgtgtactcatgtgctgatatacgacactctatcgtgtctcgccacgtcgaaatcatctcgacaacatggtactactccccaagcaaaaggaaaaggatcggaccacgtgcagctcctcgctgatcgtcgcgtgtaaccaagcgaacgaagcagaaaagttgagagttgcatcccccgaccttgcacgctgctcgttgtggcactagtataaaactgaatcgtagaggaatagccatgttcggttggcaaaagggtgaaaactttgtgaagatcaaagcgagaactcaaagcagtactgccatcgattttggcattttgcccacacgcacgagcgcaatacgagtaagagatttgcttcagttaaaaaaaaaacacctcgaggtaccggtactatcaaagtatcttcgatcgtttaatctaaccatgtccatcctacctagatagattcaacgttcaacgataaaaaacgatttggtactatgagataccgatatgtcacgtcctatgagccaggcttcaggcactgggctttgatccaggcaaacagggtgcatgcctttaaaagagaaggaagagcaacagatgaggcatcgatgaagaaatcaacagaactgaagccaaggcttcttcctcctccaatttcctctcatctctctgttcttccaatcctaggctctgttctcttattcccagtcccctgcttctcttcccaatctacattgctaattcctcttaattgtatccaaattacttgagtgattactgctgtgaattatcggttgcttccggtgttgggcattgatcggtgggtgggttgaggatcgtgacaatatggtatcagagcagtcaattcgtgggattccaagcaaggaggcgtgttgggcgacacacagttgcaatggtgacctttggaggcggaatttgagccgtggaggggttagtgctggtggtgcccgccaggtgttcggtgaaatgccgagctggctaggagatggcgcaggcgctgctcttcgtgtccaagtgagccaagtcctttacccggtgaccagcgaggtgctgcatcaagtttacaacacctatggagctgtggcggtgcaagtcctcaccacgagtcctttgggtgttgaggccttcgtgtggttccggtcaagctgtgatgcagagagggctcgatctgtcaccaatgggcgcaatatctatgatgggtgttgtctacttgatgtccagcacgtgcatcctttcaacgggaacggtgtcaacatgacgcccaccaagtgttcgacgccggtaccaagctgcgccaacatcaagtctgatgccaagagcacttctactactctagaacatgtgttcccggccaccatgagtccatccacgccctcagacgaatcagcagttgtggtgccaccgatttccctcaccgcgaccaaggagaattgggctgacatgggcaaggcggaggataaatcagaaaagaccttccatgatttgtgtgttgagataaaggacatgatcaatcagatactcgtgacatgccgcgacatcaaggttgagtcaactacgagcgttgatatcaccagagttgtggcagctacaagcaccaacaccaaatcagtccccaacacattggaggttagtaatgaggccaattcaatcagcttggttgatactaatgagttgtgcatggtgacagccaccaagtgtttgacggaaggcaatgaacaaatgatcaatgatgatgacgatgacatggccaccgaggatttagttgagctcactgaagtgaactccaagttcacactacagaaaacaggtagctctccaccagtaccaccttggaaagcggcaattccatggtacaaggctgagatgaccttaggttctcggcctttaccatggcctgatccgtggttgagtcaagacagctgaggcgtggtgatgacgaagctcttacatccccggcaaccaccttctcaagcagaagctaaagctgaagttggagcactacaattatttggctgtgtactcaattccattgaggttgattgtcaaggtgaggcttcaaaaacactgatttcagagaggacgtgttctattgagttgaggccttggccaccaccttattttctgttaaatgaggtgatcaaggaagtattggagatatgtcatcaagtaaatatgaattggatttccagctatgtatgggagaatattcaaggactattagtgctggatgatcaagtctttcaaagctcgacacagtggcaatctgctatatacaaggaaatgaactgcttggaattgttgattggattggagctattgcgtggaaaaatacattcttgttggagggagatggctcagctgaaaataccatggacacctcctcttaatgcatgtgctgttacattacttgcgcatgctagagagagtttttcatgcaaatgcaagattaaaggaagtcatactatcgtggggttatggaagcatgagtactggcaggtaatcaggtgtcaacagaagagtgcaattcctctcttagctggcaaagtgcataattggcacaacctcaagtgttcttggtcgggtggaacttttatagaggttcaggtttcagttttcactctctggtctgcagagtataatgagctccaactaacaatgcatgcactcaatccatccttttgccccagttcagtagttgtgccaatggtgtgtttgtgtagcagatcccttgaaaaatggatggcttcccatgacaaccgacatttcttattggtgaagactatggcattgtttggagatgctacaaattggacattacagtgtgagtttctctctagtgcagtactgcaatgtctacagcctactatgaagactagtgactggtatacaaagagttgcacatattcatgggtatcactgaactccaagttaattaatctgaatgaagtgattccagttgacatgttacagctaccaacttcagatgaggagtttgtaatatggcccagacccattggatggtttgcaacaagtgatcagtttgtcgatctcgggttgggctattcttcttatcatctagtcagggtaataactacggttgtttcactgaagaaatcctggttgcgggaaattattgaggagctttccgaaccaggacctcaaggacaaacattgcaaaggcaggataacaagctttgggagtcactattgcttaatgatcatgatacactatgctccttgcaactaatatggaatcctggaggcatcaaaggcatcggcttggggacaagccgaaactaaaggaagggagaatgccacgtcctatgggccgggcttcaggcacggggctttgatccagacaaacagggtgcatgcctttaaaagagaaggaacagcaacatatgaggcatcgatgaagaaatcaacagaactgaagccaaggcttcttcctcctccaatttcctctcatctctatgttcttccaatcctaggctctccaatttcctctcatctctctgttcttccaatcctaggctctgttctcttattcccagtcccccgcttctcttcccaatctacattgctaattcctctcaattgtatccaaattacttgagtgattactgctgtgaattatcggttgcttccggtgctgggcattgatcagtgggtgggttgaggattgtgacacgatacctcaagatatttttttataggaccggagtaaaatctctaggagtaaagttgaatcgatgagaagaattactcgtaccacgtcgatggatgaggtagcgaacccggtgtcccacgtgattacactcacgagcgacagggagtatccctctactgtcgtttcgtcggcgtgcttctgaccatataagacatataacttgggggtaaaacaaaagaatagctgtaacatatgccacgatatggatccgcgagcattccaagctatcatagcagaattgccattgctactcctacagttcgatgcacaaagtctaaactgaaaatatctttagttacaaaagtatatatactctggtagctatcaccagttttacgaccttttttttttgacatgtaactatgaatcagagaaaataaatttctttacaaggagaatcgtcccagaccagccgccgtcacaaatggtgaaaaaaaaaaacaaatactactgcacaggaggtttacaggcttgaactacaaaaaatcaagatcgccaagcggccacacagcccaagagaagccaatacaaagtatgtataccattgcgacatctgcaaatctcacttctgaatatgcaatatgcaactcaatagacttgaatttgcactgcccaagtgcccatctcgtgtgttaactgtgaccctacaaaagttgggcggttccaaacgggttggcttgcgggtgcatcccatttgatgctgggaaagggccgaacccagcatcgaggaaggggttgggtgcctgagcaatgcctgcatgctgcggctgtagtggtggcccgaagggatttggctgcatcatcataggcatctgctggggctgctgagtcatgctagccatttgaactgatggtgggggagctacttgattcgacatagcgaaaggatcactcgccatgaaagggttgggggcagctgaaccatacagctgctgctgctgcatctgctgcctgtaggttccctcgtcgtataggctgtccagaatgagtttgtcaaatccaccaccctgcagacaaaaacaagagaataaattttggcctgatcagctagaccaataatggcaaatatggagtaaaaaatcacatggttactgaacccaacccgaatcactcaacagttcaaaattttaaatattaccattatgagatcataagtataaaagtagaacaaattgtaaagatgccaactatcagctcagtcattaaaatttagaagcaaatccaaagactgtgtctatgaaaagcgtgattttcacctgaaagttgagtttggggacacttttgcccaaataaattgaaaacgcaaaaggaaaagtccaagctcaaagttaatcactattaggatgagatattgcagaatttgctagcataatgaactttttctttgagaagcagagcatgtcagcaggtctttcatggacttaaccttaaccaagtttgttacaaccactttctagattagcccaagactccatgaggtccattaattctaggaaataaatcatttacttgcaattcacaccaattacaaagttatcattttttctcacttaaatgctttctgataaacagatatatatgagtagttgtgctccctgttttcaccaacaatgaaccagcaaagcttttccagccagattgatttgggagctatggctaaaaccccgtccgatccaaaaccaagacaagctggcaggagccactaacagcagaataacagtttccaaatccaaagcgggacattatactaaccataaatatcctcagagaaagagtaagaaaacccaccaaattactgtccatggccattgagtttgtgttggtgctcggggtagtaacaagagcaagttcccatcctgtagggtcaaatcctttatcttgcagtgtagctgtgccacttgttgacgtctcaccacctgttatattgcacacaattttcagaattatctaacacaaggttcatgataggcatcactggattgaaggatgacaaaatacctgtaggaataatagccaaggccaaagcattgctttcctctattgctgatacactaggggttggatcgcttaatccctaggagcatacatatcattaaattgtgataaatgaaccagtgcagcatgcagtaaatggtttcttctacttaccaataaatcaccggtgtctacgacctcaggtttaggaggtggtggtggaactacttcagtagatggcactgcaacagcaggttcttcaatttgtggtttttcctcctcagcagaaacaggctcaggaatctcttctgattcttctggtttgtatgtcaggaggagtctctcaggaaactcctggtgaaataacaattattaagagtttaagaatccgttttatagatcgaatgattattttagtacaaatcaacatgtgattattttactgtggtgacacaacacatgtgattcttcttttgctatggtttcaaatttcaattgaagataaatattgcacaaacatcatcatcagggctgctgcttgattattataatataaaggaggcatatcgaaacgtagaaggcatttttaaaagaaatagcaggtcattttaactaagaactgaccaaaggttccttaattggaaccatgcgtggagcctctctcacatactcctccatggtcgaaaggaatgattgtggtggctggaacaaatatagaaaaagaaagtgatgacaatgatttatctgattctgatttacaatacaagaagttgcacagttagcacaaaaatacttgcctccctcagagtaggaaactggaaatttcttgcaagttctaatccccgacagttttcatagaagtccgataggcttccagcctagagcataacagtgttatttctaccattatcatcatctttgaaataccacaaatttcagataaccatccttcagaatcttagaatcacctgctgtccagctctcctgtaaatttcaagggctttgagtgcttcgtgccttggcatctcaaaaaactgcatcattttcgagcaacaaaagaaaatattagtatgcacaacttgccagaacaaaaataaacagtatagtgctgtcaatataaaaacaaattaccttgtcaacaaggttgataattccatcgtttattgcacaatagattttgaagctttctttaagaacctgtgcaaagcaaggagattcactcaacttaccaagttaaactaatataaaattaaattactaaaactatcaagaaatttaattcataacactaactggaaatttaattcataaaaggacagtgatcgtttttgttttcttatgaccagaatgttattacaaaaaacaccaaagaaacttttatttccttatatgactaaggatatcaacacaaaatagaatgccccaaaagatttaaattctgaaaaaagaactgtccaaatgtcctaagatagtatatagatataaaaccattttaacaaaggaaaatttctaggaatgtactctactaaggcatcaccacctgatcatagtttgctctacaaaatattgcaaaagatctgtacaagcaagcaatgacatgagcaaaaagatagcacagatacaatgttgcacaaaagatgcccttattctaagaatagactctagtccagagaaggaactgctcaattatatcagtaatagcaggatatggctcttcatcctgacaaattatgaagtgccaaggcaaccaagatgtttgcaatggagcgattgggtaataaaaagaaacacatctgcatccacaagaagaaaaacactggtgtaaaagaaaaaacatagcttaccagagctagagcatactgcaccaaataattgctatttgcagctccttctggctgcataagaagaaagaaagctgtcaggttatcttcacaaaaaacagactggaaaattagattttagaatgtttatttcccccattagtccaaactggcaaaagagaaaatcacccgacatccaataagtcgatagagtaactgctgcagtgctggtaattgctccagcaagtccggagaatctaattctctggttctactgtggccctgaaaaagtcacaatatgaagaattcagcaagatagaaaccaataattgacaaaatgttgtaactctaattataatcatggtagctaatttgactacaataaccaaatgagattgataataaccaaaccttttcaggcccttgaccctgcttcgacaaacgctcagcttcaatatcgtactttaagaccctgaagcattccagtctttcctccaaaaacaaaccgtatgtacgaacccatgaagaatagtcccaagctggataaaaagttgtattagaaacaatgggaatttaggaggtgatactaaagaaaattgatgtgctctactaaccaacaggggtggagtcatccttgaagtttgataattgcaaaatccgcactctttgtgtgaaagtaagaaactcttcacggaatgtaggatcaccatcccggagaagcctgtggatcaccacaagtgtcttcagtgcaacctacatagtgcatgaaatgaatgttacattaattggctccagatgtggaccagcgaatacttgcaaatagaacagaacactgaagagtgtctgaagtattgctgatctgctgttgaagtggtggcacgaaaaccataaatcagaaaaacttgtttgggaccaagccgatttactccctccgtttcacaat

SEQ ID NO: 7150 - DNA, 74573 bp, Oryza sativa
  unsure (1)..(74573): unsure at all n locations
tagggcatgcacagtgtgatgacccggcaagtgcccccagcccggtgccacgtcgagagcctctatagtacaagagtgagcagtactatacatatacataaggtactacagatgaccgacctgcatccatctgtgtcgcagcacgatcctaaatgaaaccatgcccccacagagccacttgtgcctgtagaggacactcgcgcctcgtcaaggcgagggtggggggcacgtctcgcgctggtgttaactggctctctgttgtcctgcatgtggtcccccccccctacccccaaccccctcacatggagctcgagcaagaatgtggtagtggcgcggcaagatctcgagcagggaggtgaccatggtgatgatggctaagagggacgtaccaggaagatggtgaggacaaggaagaacatgacagcgatgatgacctcgagcttgccaatcccaagtcttcgcctcactcgcgttgccgggagctcgtcgccggcaatggctgccctgatttgcatcttttcgatttgttcgtcgttgtctcgatcttctcatcgtctaccatttgtgcccgccttgatctactcgtcagcaccccacttgtcagcgtcctgtcaacaccttgatctgctcatcgtcagcttgcttcgccccaaccctactcaaaatcgaagacaatggccgacagagctgaatcggggttcgtcaccgaatcttggttgttagctactctacaatctactccctctatttctagatacatggcataaagacttttatcctattgagcaaagtttaaggacaaagtaaaatattctctttcagttgtctcgtttatcaaattgtaaatttttgaattgcctgaattccctacataaatatctgattagctgacaatgcttggatctattttttattttttttctcgaatgcaatgtttggatttatgtgtattggaatcagtgttccataaatgtttatacagtacataaatttaactctcataaatacttatatttgaggacaaatgaagtaaaagcctaaaaccatttaaccctggtttgtccttccattttgttgttttgcttgtaaaacatgaacagatgatgtgagttggccgtttctcttgcagtgaatactttttgtaacgaatcggcgagtcgtcaatttcatttaatagagaagaagaaaactgtacatatcaaaaaagaaaggaaaaaaatgtacagcctcaagacctttggtccaagctaactaaaatgtaagcattgcaccgagctttttcacacccgtcaggacccacgttttggtctcctccttgattttggccagaagactgggcgccaagagctccttatgtgggaaggtcctacgattcctttcgtttcatatctctcaggcaattagcagtgttagtgtgtgtagtgcctttctttggtgcttcttttatgcttgaagtattctctcaccactctagcactatcgatgcttgctgccactgggtagggtctagctgaccgtatgttgtccaatccgctagagccgcctaagttcttgtgtatatgcaccctgcaaggaggtggagggccatctcctgggtctgtcaacgtagggggcagatagagccatttggctatcctcaagttgccaacctgtctgaggtctagactttattttggatggccagcctggtgtagtttgcacttatgcggtgcccaggctggtcattcctgggcaatctcatcccagcctggtgaagtttcaaatcagagacgtaaagaaacatatggcaaacaccatctatataactgttctgtactctataaaaagtagtgatggtggtaagtggtgatgaattggacaccatccccatcactaacactctatccttttaaaatgaagaaatggcatgtagagtcagagaatccgcatgtcagctatccctactacctactctctaattattatgggaagaaaaaagactgaggagctagatggcttacatatttgtaacaaatataaagatgtaaacgcaaaataatgatgggttgatgatacattttattaattaaaatttcattgcaacggacgagcaatatgctaacgtagaaagcaggagacatttcctgcgacccggctaaaaagagaaagcaggagaactacacactaactgttcacgagttagctggagttgtcatagttccagtcattttcaggcaagaattatctttacgctcgcgcgaactttattcttgaagaagcaaataaacacataatttcatatactgatacacaagaaagcctaaaccctttacattaggtaggctttatgttaatcacacagtgaaaatctgtggactaacatcatatcaggaaaagtaaattctgagaaccaacaagaatcttgtctgcacttatgaaaagcaaggacaaacaatgtaaaaaatactataacttggctagcttttacagttgaagtttagcaaaggcatttacacaagtactgacatagactagacaaaagaaattccagacatataggcttagctaaatagctaataggcatcttccttttgtatttcaggtaaagcagaacaagcaaaatgcgaattctggcctagcaaatgcgttacaacggccacatacattactgcaagtgtctaatgccctttaatttgacaacacattttaaattctagatatggccgatatattccacaatttttgtctctagatacaatatttaaggtatcaatgcataacactttgtccactcaggacactgcgtatgacctctgaaagttgcaaagtgtcagctactcagcttaccaagctgaaaacaagaccggttttactcatcttttcctttttttaaagcacaaagtacaactgctttattcccttgaaatggggaaaatttacagtagttcagaaggcactgctgcatataagagatgcagttgacaacacttaatcagattatcttgaaaacatataagaaaataacatcgcacttgcttgcaatagagaagaaacattgaagattttgttgacataaactttcattggccagttaactcaaaaaatcacagcacctcgttatgttatgtgctctgcgattctgagaacaagattgtcaagactgaaagcaagcccctttttttttgcggggaaaagcaagccctttgatagtccagcctttttctttagaaattttatggttgttgaggaagtacctaaattttatattagaaattttggtatctgaaagtaccaagttttataacatttctgtaccttcttaaaaatgataatattaccctttccgagagcaaatatctacattcaaactgtcggcattatttgttttgtcgaattgtcgttattagtgccgatttttttcttctaaactcgcatgaagatgatagcgtgtgaatgcaaattggtaggcgtcattgtaaacaacccggccgactaataggaatcggttcggtgcaggtaatatattagtaccaagttggcacgaaaaagcagatactgaaatggtaggaactgtacgcgaagcatatgctggtgctggtgatagaagaggtggtggttctttttggattctcattgaggcctttcccctgtagtggcgcatggtagggctcagggtcaattgggccggtgtggttgtttgtagtgttcaccaggtgaaaagcttcttcgttagctaggtagccattgcatgcgcactatatatgcctagtactgtactgatcagtgttataacatgattgccatttgaaaagcgtcattcatgcttactctgttctaaaatataggtatttccaggttgtttctatttagttatctcagtggtcaaattttgaattttagtttgcttaaataacccctttccaaacacctgattagctataattttttgtgcattgaaatcagagaagaacacttgtattgtgataaaaaaataaattctaaacatatttatattttgaaacgaatgaattatagtatggaaatgcagtagcagcaagtagctaagctgctctactccaagcttctttttgacactagcatagcgacccttcaggctagccgctctgatagagttgcgtgaatctggttagtcatcgatgaggcgagggccctggtttttgtagtttccacacattcattctgttggctcacaatcgcagagaatattaagactttatgctcgtgcacagtataatatgtatgtagcttatatagggcattcggtccatcgtcttttacagttctctgatgtaacggacgaatacatgctgttgcaaggaataaggtaaggtaggggaaattctgagaataaagtgtcactctctagagaggcttattttctaaggcacaaaagagatgcatatgacttaggccgcgttctaaactgagtttgagctgagctaatctctcattgaacattagcatgtttctcaaactgctaaactatatattttatgctaaaacggtatataaaaaagtttctctaaaaaatcaaataaatcaatttttaaagtatacaatagataataattaattaattattactacctccgttttttaatagatgacgccgttgactttttttcacatgtttgatcattcgtcttattcaaaaaatttacttaattataatttattttgttatgagttgttttatcacttatagtattttaagtgtgatttatatcttatatatttgtataaaatttttgaataagacgaatggttaaatatgtgagaaaaagttaatggcgtcatctattaaaaaactaaaggattatatgctaatgacttaggagtacatcgcttttcatgcagctaactagctaatcctaacagctatatagaacgcaccctaaacagccttttggaacaactagtttcttgttctctgttagcacttcttaaactttgaaatagtatgtttcgtgtaaaaaatttctataaaaaagtttcttgaaaaacaaataaattattttataagattacaataattacttaatttatcatgtgctgaggcttgtatcgtttcacctgccgtcgaaaattttagcctaaacacttaaacgaacttagccttaccaatacaacacatccactacagcatatacacctccagactcctgtgcacgggaaagggtcgtttcacttaacgtgcacgcatataactctatgtcgcgttcaaactaattgtttcacaagagtatctacgagataaaacccaattacctacccacgccccaacacaaacacaaactcgatcatctgactatatattcggcttttctataaatatatttatgcaaatatataaacataccagggatataatagtattgttttcactttcattagctaagtgaataaatgttatttgttgaagtttgagaaaaaaagacatcatacattaaaaacagaactagtattaaattataaatgatgaggagatttttgtttatgtttagctagcttctcaaataaccatagaaacatagagaaaccaataaattaattagttttttaaagtgaagtggggaaaggaaagtgaagagagtttttttagactgttcggattgttgttgtttttttttaggaagtaggcccggggaagtaagaacaagtttaatagtacagtccactactagctacaaattagctatagccaatataataactaatttatacaatagttgcttactatactattaataactggtcccacctgtcatacacacattacgtttttggagtccgtgctgcagctgactacagatctgtagcccactgctcttctttctcttcatttatctctttaaaatatatttgtagccagcttatagcctgctattgctctaattgacaaaaaaaaatgcaatagtttgtccaagtacattcacccttatgtggataccaattcatcattgaagctacaccgaattttgcatattttgtaaattgggagcaatacattcctaaattcattttttatgttattcctgacgtcatgaaactctacaggtatagctttgcatcctacgggctcttctacagggttataggcgtttgccacttgaaaagaatcggaatataagatttcagttgttttgtgaccctttgttcagttaagttggaccatcaatacaaccaccgaatttacaacgtcactccactaaatcctaaaacaagacatagatcagcttcggtgccattgtccgtcgccagaatctgaatctagggggggcatccctgattcagtcctcagtgttgtgaatatgcagtgtcgcattccagcttgggtcttcgcagtctcttcactgcattgtcgtcgaacagaagtaagtggctacagccaagggcactataaatggatggtttttagtatgtatctctttttccttagtatgtcacgttaattcccaagttggcaagaaatttgcaagatgcaccaataatagccgttgaaactttgttgtttgaccacaaaaggccagcctaagcaaacgaaaacaggaatggttataaaaaaacaatactatgtgagtatgtgtatatgtatatcacgattaaaaacaatatagtcaattaccgaggatgattattaggtcgaaaggcatatctttcaatagaaacacatattccctccgtactcgtaaaggaagtcattttggacagcgacatggtcttcaaaacacaactttgatttttttttctataaaaatatttattgaaaagtgatatatgtatacttttatgaaagtatttttcaagacaaatctattcatataatttttacattttcaaactcaacaacttgagagttattcatgatttatattatcaaggtttgacttaaacattgtcctaaatgacttcctttacgagtacggagggagcaaaagggtaaatatcctctatgttgaatgtgtgtcttgtgctaccgcataaaaattctgagcatcggttgtcgagcgggccccatcaaatcatgccggctaacacaagccgacatggaggaggatccatgtcattcttcatttaatgtttgtagacttgaggtttgtacgcaccgggaactctgtcctgggcgctgcgcctcccgtcatcttgatgggacagggcatacctactgcactccgcctgagacccgagcggaccgcacgtggctttgccaccgtcccgtccgtcggtcaagattcggtcaagcgagcggcaggccacatttaatgtggcgaggcacgctcgttctgcccgcttcgcccgcactaaatgcgattaggtgggcgtggagggggcgtccacgaatcgtctttgcatggtggccatgtggtgaccagcccgagggttcggggccgacccctcaggttaggtacggacggcttccactcgttcacaggcgcgacccctcggggtgagtgccacgtggatgccaagggcgactcctcccttgtaagttcggtactcccggtaaccccgggcacatatcaccgacaaccgtcttatcttttaagacaccaaatttatatatacctatatacttataaaaaaatacgtaaggcttccgtttaggtttttgttagtcgtcgttcgtcactccgactctatccgcatcacgttccatcctcacataattcttttgtgtgtagccaacacccttgtcgacagccaatacgaaacagatactcccaccgtcatattttaagtgtagctgttggtttctctgcttaatgtttgaccgtccatcttatttaaaaaatataaaaaattaaaaaaataagtcactaataaaaaactactaattatgaaaaattttaaataagacgaatgatcaaacgttaaatatagaagctcatagctgcacttaaaaatacgatagagagagtacaaaataggatcagattctggttccaaaccaggactgtgggctatttccatggattctgctttgttgatcgagcccacgaggactagacccaccacggtccccgtttggaaactaaaaggctgatgagaggagaaaaaaatggggaagaaacgcaatcaaagcaaagatttatttactaagtacagtcccaaccctccacctaaaatagtttctatggcattaactatattaccatgtagaacttttagtttatgtggcactatattaattaagagagagagtgaagagaggaagaaactgggtctcatgtaagacccagcttcaacacaagaacctatgcactaaacactatcaagttttgcattggaaaagagtagtgtcttcataatagatgaagaattaatatgattgatagaaaagagagatgatgtatttattaatggcccactttaagaaatcatgggttgtggagtgtggtttctattgtgatgtcttattgatatggcaccatagacactgcttatagacactatgggttgggactgccctaatgagtaacaaatccatacacctgcagtctcctctgccacatcttttgacctcctaatccaccttctatccgtattccaggccagcattctaccacattagattgagtgattaggtagagaagaaaagtgaagaaagacgatgagccacccctaaatcaagaggcaacctccacataaatttcaagaaaagtgtgagagcattagagatattggtatttgtgtactagagatgatatattgtatggattgtctcttactttcttcgtttcacaatgtaagtcattctaacatttctcacattcatattgatgctaatgaatctagatagatatatatatgtctagattcattagcatcaatataaatgtaaaaaatgttaaaatgacttacattgtaaaacggagggagcagttcatgagtaaataaaatagataaatttgaaggtaatggtcatatctaccatagcacttaccattagtctcttccttcactaccatgcagtccatgctcactgagacaggagaaaaaatgataatttttggggattagagcgcggaggagggaagtgaaaggataatgacaccacgctagacatggccaatcgccactgatggaattatcgcggatgacacgaacagtcactctgccaaatcaccaacacctctcttgctcggtccaaaggagtcagaggacggtttagaggttagactgggggataatttgtctaaagtcactagctattatgactgatcaaatggatctgatggctctcagcgcaccgatgccgactcgggctatcacctgccactgggagtgctcgtagcatgtgaatgagagagatgggccacgctcatgtgtgtaaacaagctggctcgttttcacggcacatattttcaattacgagccgttttcttcatttcccagccatgttaaattggttttttatttattaaattagttttagcactctttgagtcattaaaaattactgaaaatcgaaataaaatttaaggctaaatttagttaaatattttttacggtgcagaattatttttctaaacaaagttgagttttcatgacattatgtttaatgacacaaatgtaaataaggtgtataaatttccaacatggtccttagcataatcacaaaaatatattttttcaaattcatgcaacctttaacgtaagcttatatttttcccgttacaatgcacgggcactattttctagtcaacataaagaattgaaaatccttgaaaaaattagacgtgatataacaagtaacttttgtaacatttgcggtatatttttcatacttcgaccgaaagatatggctgcctaatatccttcaattatccacgtgttacttgtatgcatgtaaatttggtcgtacatgtagcattcctcaccggaacccattcggtgccctagtccacttgttgctgacgatcgtgatgttccatgacgaaacaaaaaccatgacgggaaaagggcacagcaagctcgatttggaagcgtcgaatgtggaagcagcagtacgttggtgcaacaatttgggtgaagaatgggagattctagcggtcagatcctacaagctatacgtacgagtcgatcaatcaagtctaatcacccacttcaactagatgggcagatggtcgtgtggctcttgcacgttgcacgtctgcttgattggttggtctgacgccataagcgcatgatgatgtccccaaacatcaaaactgcgtgccaagaaaaaagaccgcgtacatgccgaggtatcacgagaagaatatgcatcagaaattcccattccgtggtggtgtttggattcgagtactaaagttactttagtacatgtcacattaaatttttgaaaactaatttagagtattaaacatagactatttataaaactaattatataaatgagagctaattcatgagataaattttttaagcctaattaatccataattagataatgtttactgtagcatcacatagactaatcatgggttaattaggctcaatagattcgtctcgcgaattagtccagagttatagaataggttttgtcaatagtctacgtttaatacttctaattagtgttcaaatatccgatgtgataaaggactaaaaatcctatcacatcggatgtttgatattaattagaagtattaagcgtagactaataataaaactaattgcataaataagagctaattcacgagacaaattttttaaacctaattaatccataattagcacatgtttactatagcatcatataggctaatcatgtattattaattagtctcaatagatttgtctcgcgaattagtccagggttacaaaatgggtttttgttattagtctatatttaatatttctaattagtgttaaacatccgataaagtactaaaattttagccctgatccaaacagcccctcaggggattagtattgcactggtttccgattgatcatagttgaaagtggattagtattgcactggtcggtaccatgtgctttcacacttatgttaagcgcttgtgtatatgtccctcgctacaaaaatatagttatctttaaattttaaatttatttcaaatataactacataggattataaaaagttgatttttttcacctactttcccatcctaccgctatcaatctacttttcgtagtattatgttatatccaatcctataatgagttataatgagttgttatattttaagataaaggtaatatattacacaaccgcctagccctagattataatgagggttatttttacattgcacagtactccctccgtttcataatgtaagactttctaccattgctcatatttatatagatttaataaatctatacatacatatatctagattcattaacatccatatgaatgtgagcaatgctagaaagacttacattatgaaacggaggtagtagtttttattagtccttccaagtatttccctaccatgtgttggttttcttatagtccctccaagtgcttccataccatatgttttgtttgggaatgaggtgagataggttggactcatatgggatggtatctatccatttgacatgagaaataagatgattctactttttaagagaagacccatatgctagcgagagaaaaagttgggttgattttgtccgttagttttttatggaatatgtcaacccagatcttaggaatatcccctatcagtaaccatcccattccatttgttcttaaaccaaacaccatgaaaaataggttcaacccaatctgatctataccaacccttcaaccaaacatatgcttagtagctactccatccttttcaaattgatcatcatataatagaattcaaaatttttcaaattgataatcatataaccgcatggacacgtatttcatcaaaatacaattaatgtagcatgagaaaatgtgtgcatactaaggtgtagtatttggcatagtgttttaaacgatacatgcattgtgtgaaaatgtgtgcatggtatcttaattgatgtgatttaaattattcttggttttggtgcataaacatatcccctccattccaaattgatctacatatttcataggtacaccaagaccaagaaaagttaataactctctcatactatatttactctagcaacaaactcgatgcatacaccatccccactattttctagccaatagtaaatcaagatattacatgtgggttataaatacttgtgtgcatggatgcatgcatcaatgttcatttactccaatgcacaaataacaaatagacttaatgaatgaatataaatatgtagattatttagaaataacctaaaaaaaactatacgtagatcaatttggaacggagagagtatatgatatgatcaatttaggaaggagtgagtatattttgacactgagaggatagtttttcttttaagtagatgaatagaaattcggcatctatatccacagccaaaagttacatggataaaaaaattcaggccccaaaactaagaagcaacagaatatagcaaagaaaagacgagaagactaagcttcgatctttagctgcctcacgaaccctgtcgcgctaaaaaaccgcccgcttcacgtaccctgctgcgccaaaaaaccgcaccgtcttgatcttgatacacaactctcatccatatttcattcgtcactatgtccctaaaatcggccgaatccccatcgattcagatctgacaatttccagtccctagtgtcttcgctcaccgacgctatccagtggagacagagaagaagcccctccaatatagttttgcactgaaagacctacttgggatacttctccaggctactagtttttacattttgtttatgaacgtttgactaatatatcataacatctcaatcgatcatgaaaacaagatatcaattctacatgttacaccctttatttctctgaactacacgccgcaccttgcaaaatttagaaatacacctaagcctattaagtcaaataggtggcaaagtgaccacccacctttctttctttctttaatattcagagatacacggctgaacaaaatattcacagttttaaaattggacaaagagtccaacttacaagtattcagttgacagaagaacacgaaaccttcgaggagaaaagcaagcaagccactctggtacttagaagcagaacctctttttctgcatataatggatgaacacatatgaattggctagctcagtgttatgagatattctttacattttttttcctaatactatatgatgttgttgacttttagatatatggttgaccattcatcttattaagaaaactatgcaagtattatttattttgttatgatttatttttttattaaagatacttcaagcataacttatattttttatatttacactttttttaataaaacgaatggttaacgtatgttaaacattaatggcgtcatatatttaaaaacagagggagtacgatagaacagggatgtgtgcgaaccaaatcatgaagttccctttgactcaatctagtttaacttaaaaaaacacacacttagcaacaaagaataaattcatttttatataaactagcgggtcaataggtacttctgggtgaactcactcacatccataactaaagagtagttggcatcaagaacaagcatttctcaaaaggaaagagtaattcataggaaaaatccacaacttacccgaaattgaatattcttttgctggtcggcgtatgcaagcagttcgtccagcctcatcaatgcatcataaagcatctgctcatgggagaaacaaaggtcaatatggaaaatcgcaattttttgttcagttcttagttcttactatagcgaacaatcaagaaattcggtgaactgccaattcttgggtgtaatagtataacatatagaaacattacctcagaacagtagttatatccttgataccactaagcaataagctatctaacgagagtacatcttccttgtcacacatgcacacccacagagtgcatatgatatgtcaagactcaacagtaccttctttgtagatattagctcggcttccaatgcatcaacacggtgaatggctccattgagcaattcctctctatccggtggcatttgagattgctttgcttcaagctcctgtaatttctcctccaattcaccaagacgtctcaatacagacgaatgtgtactgttttctgtgaatccgggagaagatggaggtcaaaactcttccaaaaactcaatttcttgagggaactcagcactatagttaccacgggaaatggcctggcttgatagacttgcagtcactctgcttgggacagaacgaagcacggcaacaaagctcacgattaagactatcaaccacgcagtaattcgatttcgaagtcctcccagttccatcgttatgtttctcaacgagaacgaatctgtgtaaaacatgcaacaaactcagtcaaaatcactccaataaactcttggtgggcttaccggtcaccactcactacatactataatgtaatggcatgtttggtttgaggaatgagatgaccacttgatcttatacaggtcgcttggtttgaggaatggaatggatttgtccatcatctctaaaaagtacatactaaatgagaaactgagaaatggagtcattccactagatttgagagatggtcccatgatggatcacccattctagatagtttgattcctcaaaccaaacggccaacaaaattcccagtatctcacatttccctagttgcatatgggggtacgaatgtttgaaatcagcaagtagacaacttctcaataagaggtacaagtatgaaggtgtcatataaagacctgaattaaaagccattgagctggttgatggaccggcgcatgtgtccacagccttgtcaacaacagggatgtcctctactctgggaggggcaccagatgtggaagtatttcccggcaatttggactgcagaaatataaaaagatgcatttatgatcatatttaccaacataaagattgattaaggaggaagaaaattaagaatgccacatcattgtttagagcgagtactaatcagtaatctgagctcagccttgtgcagttgaaaagaccaatagaacgagtactaatcattaatatcagcctcgtgcagttgaaaaaaccaaaaggtacaagatcttgcctcgtcaacgggtgtcaaatgagggtttatgatggggttaactgaagctataggagatgaaacatcttccatttcagaactagactcagcagaggcatcgctgcattttttctgcgaggggatagaatcaagcttctaacggatagttgttattttaagatgatgtatgagtaatctccattcaaagcatgcttacagttaagtgtctagggttaatataacatattttcttcccatcaacgcttgatatagcaagaattttccgtccatagtttgcttcaccattaaggaccctctgaaaatcatagacacattattttagtgtacaggatttcttttcaaaaaaaaaaaggtgtacaggatgaataagaagaagggtagggttcaggaagagtggaagacctttattatgtcaggatccttccaaggacctttatctgattttatgcaacctccatgttcttcacacctgcatttgccacccagaaaatctggaagttcactgaaaacatgaattaaacaaaattattaggataggaaccaaactacagtatttgtgacagtagaaaagacctaacctctcatcaatagtttcaagtagcttattttggtatttgcttccaaggacctaggtgaaaaaagacagataaggctattatcacatactagaagtaaatattattctgaataacaattttcaatacttacatgaatcttcgaagcagtttgtggatcaagaaatgattttattgtaccccataacatcttgaagccttggccagcatttataatgtacaatcggtgcaaggtctgcacgagcactagaaaggtattagataagtcctttgttatgaccccagataaaaacaagttctatagaaatgtatatagtgacaaaaaacgaagtgaaagggcaatagtgaaaaataacattaaaacataatggaatcacctacctctggatagttgtcattgttgatcttctgaagtcgcatgattagctctcttgcatcttttgagaagttcttcaaacccttcacataaaaaacaagttaactactaatctacccagaaattttggcgatagcaagattggctataaaataacataccactccttgcacatccaagatagtactgcacgaatctatgtgcctttttgcagcaatggagcaagctggaaacctcatctgcaagcacttctcggactccttgacatgatactttacatatctgtcaatagttgtgacttgtactaatttgttgggatcaacttttccaattagttctatgtagacaggccttccctctttatccacaccatggtaaaattgtggatagcactccagaacatcatctaattcgctatagtcaaattcctaaatgatccagatgtcaaacttccagaagttacatgaagaaagactatcactacctacgtactggagcatatggtccagtctctgctttacctctatgttgtcagccccgaactccttcctccatctaagcatttccgaccacatatgttttgctttatcaatatcaaattttcgcgctttcaggaacctacatgtgtaacatgtcataggcacatgaagaaattttaaatcaaataagcaacgctgaattttctgcaagagtaaggagaaatccaagtaactgtgactctgagatcagaaaaaaattgcacctcaacatcacgtgataatcatcatgacgttctggcaacaagccctcatcatgtaagcactggtgaaatctttggacagcttccagctccttgacatcccttatgtcctctatagaggctacatggtcgccgaccctccttcttctcttccttctcaaggaacgcctaaatttatttccagcactgatagctcggttcttgaaggagactgccttggcctttttgtcaccttctgagttgtcctcatcggatttccactctttcttatcatcatcatgcacaatgccttcaaaacctgcacctgctatatagtttcaacgaaatgcccctcctcctaatcaggttgaaatggtaacaactacattgaaaataatcaatacgagagcagagtacataggagttgcaattaactgaaagcagcgcaattacacgcacgttaaaaaaattagggaggtgtgattataatctctacaggtgctaaactactactattaaaatttcaatcccactcgaacatgaactatttgtctatttccgagtgatttgccatgttctccacttgccccaatgaaccccctcacagaatcaatctctctgcaaccgcaattttccggtgttcgcgaatgacaagcaggtaagcattgcataaacgagaacgggcaacgcatggcggcatggagaaacaacgaatcatcagggaacacgcagtcgaaggaagaagggaaacagttcgcactcacagggccgatcgatggaccccgccatcttcgccttccccacccgcggtccgacctcgattcctcgcagggtaatcgagtccccgagcctcgccgctcgccgatgaaccagggtttccggcggaggaatgcgcggagacaggaggggcacgagaatggagagagatggctcgtttgaaattgattgtttttcttttgatttaggaggaatattttgatgcttttgttttgggggagaggggaagagaagcttctgttttcttttcatcggtggaggaaggggacagggcaagaggggagggggtgttacacgtatcctctcgtggaccgggtccataggctcgcaacaaccgcgacgctgcatcagcctgcacgtaggcgtgccacgtgggcggctcacatcggctctggtccgtcgacctggcgagcgcgtgccacgcgtcgcgcatgggcgcacggtacgcccgtaatatgaggagatcgagccggtgtagagcggctagagcccactatggtgaaccagctccgtttgatctgcagatgccgatgcttatgagccgttgatttctccttggaggttctgattggcctgatcgggacacgctcgcaggctcgcagcagtggacggcgctggtgatttttttttccctttttttgagattcgctggtggggtttcacgtctatggagtatggacaaggttcaccgaaatttattctggacgtgacggttcgaggcttttgggccgggctggaacttgagagtacagttgttggttcgggccgaaacttagttcggagcaaaacaggtattcaccgcaaactaaataggcatacaaattcaaatcagaagcacgaggattcgtgtaaagcaatttgcttaacgttttgctaaaatcaatcgtgagtgacaaacatgggcaccttttgagtcaattttactaccaacgccaccacgaattgaaagcacccaaaatcatgttctagtatgtatatgtatctatgtataggttcttctgtaagtatttacaaagttcttcttgatgtttggctttatgcacttcaggcgggactagtatgtacacctcccttcaggaactgatcaagaaaagtgaattgtcatcctgtcagtttgatcgagctagtgtacgtgaaagttgacaaagaaattgactatatgaagatttcaagaatggcatgggcgactgttacctgttaaatcatgttctttttctttgcccggaacatgaaaagctgatctctgtattgagctgaaacagatgataccagatattagccgccatgaacattctgctgcatatatttgtgagtcgggaggcggataaaaaaaaacaaagacttcccatttagggcccattttgaacgcaggaattttgtacgaattagttgcaatttccacaaaagaaaaactataaaatttatctgttccagaggaggcaaaataatgcaatgcaacactgtcacaatgtatgactattttactatatgcattttaagccaacaagagcttaccagcatctttgtagcgttcctcaacagcagcgaccagcatattgcggaccaaatcaaactcttgggcctcaaagcaaggttgatcgtcaggccttcaaatggtacgggatgcattagcagtgctttaaaataaacctttctttactgaaacctatgaagctacttttgttacaaacctgtcaagtcttgtgtattggaattggtctgagcttacatagctctcagatggtgttggttgtacaactttcaatccattgttatacgctatacgcctattcacttgtataggaacctatgtaaagttagaataaattggaatgagtatcataaacatccatttagcagcaaaacaccaagaagatcaggatttttccacattctttgactgctgtactcaaatcattggttacgaaaatttcctcaaatgatttaaaaggaaataaaaaggagtacctctagaagtattgcatgcaaatcatatcatccacaaataacaaggttaagcaacagcaccaaaaaatagatcacttttctgacaggacaagggaatcctgtttgctggttttacagttttgtggctagcgctcaaacagatagatgcatgttataatccccaacatgcaactaagtcacagcacttccaatattctgggattagcagccttaaaggaaatatggccagcactcagcaattaatcagaagcacagctgcacaggagatgaatgcacaccttacaccggaaagcaatgttgatggcatctgatggcttgagatctaagctaatagtctcctcttcattgccaatctggatatcatgacaccatacttcagacaaaagtaaaatagatactccctccgtactcgtaaagaaaatcgtttagaacaatgtttaagtcaaaccttaggaatataaatcatgaataactctcaagttgttgagtttgaaaatgtaaaaattatatgaatagatttgtcttgaaaaatactttcataaaagtatacatatatcacttttcaataaatatttttatagaaacaagaagtcaaagttgtgttttggagaccgtgttgctgtccaaaacgacttcctttacgagtatggagggagtagttcatgtgaagtcattttaccttagcaagatacaatcgagaatagtatgcatcatggaccatttctgtaatccgcaccaaacgtacctaaagggaacagatctgaagtaatcaagtaactgataaatgaacatattatatgacatttaagagaacagatctgcagaccgtgaactctggaaaacagctttccactaggacactttagaaaagatgtatgtattgtccgagtgcatgataaccagcatacattaagtaataaaactaaaatagtaacacacataagcacacccatgaaacactaaacagaaaacctaaaccatgaagccacacgaaagttgcaaaagaaagtctgcttataagatctcatcttaaactcaccgcatatcccatcctttcggtcatctcctttaccacattataaatagttggccttggctggaaagacagaatagtcatgcaaatcagatatagtacatgaaaacaatttaaaaccagaatcatgtggatgcttaacatctaacatatatttattaaagctacatccaactcttacaattcgaatgttccgaagggcagccagcaacataatacttggtgtttccactggaaaaaagtaatgtgagtatatcacacaattagaaaagcatctgcataagtggaaagcatgcccaagcaagaattaatacgtactgacgataattggaagcaaaagatcacttccatcttccatcttcagaacaatagcatggtgaggtgcagaatcccgcaatcttaatacccgcgggttgttttggacacatctaaggtttttgccatcacgcattttaatcacaaatccatcagatacacttctgagctcaactgcaaggacagataaaaccacaagtttaatctcagaaatgtacaatggttgtttggcaatcggcataaatgatatactagtgatatgtaactaatactgcaacagtagcttggcataaacggtatgtagctgatcaaacaacagcaactgtttcaaaggctcacagcgaacttcccaactcccaacaaacagtgggccggacccggacattgctcgaacgactatgcatcaaaacccaatgaagttacaagttacagtgtaacagaagtaagcaattaccagcctccatcacgctggagttgacgaactcctcgccgctggcgtcgtaatccgcggcagcggcgccgtccccgtcggaagacgagccgtaactgcaacaaacaggccagacccagccgcttcgcgcatgccgctcggacgggaaaccgaagaacctgcgcgccgcccggtagtggtctccctgcaacccacaggctcgtctcctcaggtgcacgcgcctaagcagctgcccgctgatcttcgcgtcggaggtcagggcgccggtcgccggagcagcatagcgcgggagaaccggcccgttgatgatctccatccttgaatttttaccataaaccaaaccgtcataaacgaactcaaaggcaacagaaacatcagaactcaacttggagaaaggaatcgatgcgattttcaccgaacgagaggtccaattagcgaaatgagaccacagcgaattggcagaaaccaccaaattgaagagttggacgttctagagattgagggatgaactagcttaccaccgatcctggcggggagaagggcctgaatgcctgatccgagctgaaagacgcaggaatttcggaggattttggtaaagtttttggctcgaaaattttttagccaaatgttaaaacccttatcgctaaacccgacggcttttatggcggatgcggttgnnnnnnnnnnnnnnnnnnnnnnnccttagatatttatggcagcagcggacgctttttaagggtgttttggggaatacggatgaccggatggagtggccatttctgtccgtttgactgtaatggagagatcgctccatcaggatattttttctttggatagaaagcgtaagcgtgatgtggaaaggcggaagatatttcatactatacgaagaatatacttcctccgtttcatgatgtaagagtttctagcattacttatattcatatagatgttaataaatttagacatatatatgtatttagattcactaacatctatataaatataggcaatgctaaaaagtcttacaatatgaaatggatggagtagctatttaacccaacaggagttctattttactattgttataaaatgtaacatatgaaggttgtatttgccaagtcccaagttggccaagtaacatcaacaacatgctacaatttttagtgggaaaattggaaccatgccattataattttgcaaaatttgttatatgccatcctgatccacatgtcattgactcatctagcattacttatatttatatagatgttaataaatttagacatatatatgtatttagattcactaacatctatataaatataggcaatgctaaaaagtcttacaatatgaaatggatggagtagctatttaacccaacaggagttctattttactattgttataaaatgtaacatatgaaggttgtatttgccaagtcccaagttggccaagtaacatcaacaacatgctacaatttttagtgggaaaattggaaccatgccattataattttgcaaaatttgttatatgccatcctgatccacatgtcattgactcatgtgggtcttacatgtcattgagataccgataacatatctcaaactttacaaagttataatggcatggtaaagtttatttcggtccttgaatttggctcaaagttcatttttcaccctaggtgctaaaaaataattgattttatatatacgtggtgcaatcgatcgcccaaccaccaaaaaaaaaagatggcatgtagatcatcacatgtaattgtgacaagtttgtggtgtttgagttcaacaaacaaaatttacttatattctagtatcaagatattttcagtgaaaagtactctctccatctcaatttgatcatcccctaaggtttctaagatcttcctaaaatgatcatcatttaactagtgtcttttcgtttatttatgaaatgagtaaatgtacatcattgcatgtgttgcatgtaactaaaattgattaatttctattagtgcaatatcataatatttaaaataagagcagttcacgggatacgaagcgatggaacaccttagcattaatttaagaatgatggatatgttggtgtccttggtcttggtacgctttgcttagaggatggtcaaactgggatggatggatggaaggagcattgaggacattaaaacaaatggatatatactatctatatagttactgaaaggtgaagatgtagcttagagggtgtagacccccgattttggaaatcggaaatcttctgtgtttatccgtaccaatctctggatcagtagttggtacacacatacatagttggatcacaacatatcacgaatgaattcaggctaaaagagttaaatacttacattagggccaggtaggccaacaactatcagagaacatcagcggaagacaaaataatataagggcccggttaacatgccacaggcagtcgactggggaacgagacctagaacaagaccgcactccgatcatcttgttggatacgcaagcgtaccgacaagggcttctcttcaacactctcctaaaagatatataaacagcaagggtgagtaccaaccatactcagcaagccaccacagcaacgatgcatatgatagagggtatttcaaggaatggcttcaggttcctttgcgcaaagcaagttttacaaatcttttcacaagcctaagacctagcatagactgatcaagttttaataccagtgttcacattaaacaacgatggttctgtccaccatccattgtaatcccaaggatagcttcccgccattgagtcgtcatggttttctgaggacgtccaccttccctcctctcaggaagtggctccatcagcataaaattcatcatgcaatatcccatcccacacaagttaagaatttagagtctagcgaagtgtaatacatgtcccggtgctcaataaccgtgagcacggctattcgaatagattggtttactcacactgcagtggatgtacactttacccgcactccgcaactgcccaatacatgagcctcgtcccaacacatgagatgtgtcacggcaaagcttttcgataacctcgcattggcagtacccgctccatgaacttttacatcctcatgcactctaggcgtatacggtttctagcagtaagaggagttctggcgcaccttggaagggaagactcacacatgcattaagttataattatgtttagattctcacatggcagtcctaccgatggcgacaccactgtagacacccgcctcgcggtcctaccaatggctgccccaccgtagagcccctgcctcacacatcaagaaaccactatgcatggatactgcctccgctcagctatctactccgctaggtctatacccatacgagaagtgcggttgtacggggggtcgtttcatacttaacttcatggctcggtccttaattgaccagggacggcactagccttttccggacaccacccaaatcctccagccgccccagtcgaaaacagttgtttcactttattttcctttcacaaatcatgtcatcaatatcatggcaatgtggcgctcatgtctccacatgccgcatttcaattaccttcccaaaggtaattgcccaagcatatagcatttgacaaatatgagtatacatgattctagagtggcatctctaagcatttgtcatagttgactagagactcatacgtaatcatggttacaagggaataaggttaaacaataatcaaggtatggcatattcacaaataggatgttcatcattgcatgcaatcttatttgtaaataaaaataatttcgcaattgggatcaacatgttcaaggaatagtgatgacttgcctgctcaggataatccttattattgatataatcttgatcaaccttcacctcctggaagttgcagacgttgcctcacgactaaccgatacacaaggtctataatacgcgagaaaaaccaatattcaaacaacaatcaaatatgcgcaacaaaatgtactattcgtgtttgctaatggatcccaatcatgctaaggctaaagtttcttaatctttctattgtcatcgtggcctatttaggagttaaccaacatagcatttatgggatacatatatatttggctaatcggtggtttagtctatcaaatagctatggaaggattatggctacgtatgcatatatctaaatagcacggttacatatcagaggttctgttgttagatggatttaggatcaatcaaataattacagtgaatcatttgtattattattttattgatggaagctttactttaattatgaacatattttacttgccattataaattataaaagggctaataattatccatgctctatatgttaaattcgggaggtttataatattatagttacagattatctcttaatgaacaatccggagttacaattgaactatgaacatatgaggtcaagatttataattagtacttatctactatgcatgtttgttatatactccccagtttaatatatgaaaaagataaattaattgtataactataatgggatgtccaatatatgtgtgcaacaacgtataatgttttggtcgcctactgtacatgagcttatttagaaagtgtactacccaatgctccaagtgattcctgaatatattgtagtttaattatacattagctagtttctatgagtgatattgtatatgtgatgcgacaagtttaagcactggttctattgggttactaataagtggtaatcaatttaggcatatatatgctattctatatggtattgcatcgattaatttacttagtgattcctccacatttagctctattattattctcctaaacagattcatctatgtgtgtttatattttagttacataatcataaggctacacttgatttaaataacctataagccatggatttaattatatggccatcgaatattaaataagtactagtattttccaatacatccattcatttgagacatcacataaaattagtttgtgtggttgttacagtggcaagacatgttagagacaaatattattacatctactctaccgtacaatactaattttatttattaacatatttttaagttgactattatgcatcatcttgatattaattatttaatatttataaatatattttatcaaatagtgaattatatatcattggaaagcttatgaatttagatgaatttaggttcaagtttcactcaaatcggagctaaaatgaataagttatgctagtgtaaagattcaaatttgaataaatccgagaaattgtaaaaaggcactgttcctaattcatttatttataatacaaccttatccacaagctatagtgactgacaggtggggtcttcctattttctttttcttttcttttatttttcttcctaaaggaatttataggagcaaatgacaggtggggcccactctaccctctcttctcttttctccctctccctttctctgtcttctcctctctctctcacggccgagcggcgcgtcgcggctaccggcaacgaagggagggggcggaaggcttaccgacggcggcggcggcgacggtggcggcggcggcggcgacgcacggcgcggcacacggcgcggcgcggcggtactgagggcggcggcgcggtggagaggaaagaggggaggaagaggggaatggggaaatggtgtggggtggaaagggggtggccggggggactttatagggcgcagggagggggtggccgggcctaatggcgacgcgacggcacgcacggggctcggggcggcgacgtgacgcgcgcggcggcactgggctcaaggcgcggcggcggctcctggcttggcgacggcacgcggccgggcgggggcgcggggcgcgaggcggcaggcacgcgacacggcgacgggacggcggtgcggcgacggaacgggcgcgcggcgcggcgatgggacggtcatgcggcgtcaggcggcgatggcaacggcgcgcggcagcaggcggcgacagcggcgacgcgacggcgcggcgcggagctcggcgcggcgcggcacggggctcggcgtgacggcgacggcgatgcgatgacgacgcggcgcggggcgcgaggcggcggagcgacggaccagcggcgcgtgggcgcggggcgcgaggcgacgatgagacggacgagcggcgacgggacggccgacggcgacggcgcggcagcggcgacgcgacggcgggcggcgtggcgcggggcgcgaggcagccaggcgcgtgcggctgaggagggggaaaatagagccagggaccacgtcgagcacctagagtgcaatgaacagtgccattttctatttaacccgattttagtttatcccttgtataaatttcattctataaatcctaatttttacataaatgaggtttacccaatatatgttttaattttagatgaaagtttaccaaattttaatattacccatattttattcttatatatatttttctattgtattatttaaatgaggtctaattctaaaattagcctagataattttggaggctttgagggttctaaaatatcctagtgtggcccttattattacaatagcacattgaatgaacttatagcaatatattttacacggataggttgaatctatttattctataaatagtatattaagactcggtacaacattaatctaattttaaacactcacatattcttgtttatatataaggattaatttatttatatgaccattattttatatgagtgattttcatgtcatgagtaactcggcgacatgttgcaagtatcgatctatatattccggtgaattacttatttataaacacgatcactatagtggtgatcatcatttcatgtgttcttatatttcatgtgagattggattcaaatgaattggatttaatcttactatttctttagctaattgtgacatcaagctatcaatcatggttcgaatatttaatacctgatttgtaatttgtaatagaaattaatatttgactttactatcttttgcataattatttgtaggattaaatatattctcgtaaattatatctattgcttaaatatcgatcttttcttttctttctttgtgatcatttacggtttggcaagccatagcaatcataacaaccagcatgatgcaaaagttttaaaaagtttgaaattttagtgatttttattgttagggattttcaggatgttacagaggggggtgaataggctaacctgaaaatcactaaaaaaatcgtaacgatcaaatttaaacaggacccgcgaacttcctagtgatgaacaccggaacttcctggtagctataggcagctcggaacttccggagttcaagaacaggaacttccgggtactggaaatactgagaaaatacttcaaaagagagagaacaacaggtcctattaggtcaatatggttcacagtagactatagcagtatataaaacataggggcaagcacaaagcattcacggaagagataaagaggatttttttcccaaagttcggatgcacggatcctactctcctttgaggagcttcaaaaagctgggtctcaattaaacccttgcctctcttgtgcaaagatcctagaagaggtccacagccttcaatccaacacccctagatccttctctagaagttgagtgaccaccaagatccaactcaaccttctagagacaaccacaagtgaggtttgctctactaggactacctctaaaaactcggcacaatttctttactcacttaccttgtttccttgcggaggtgaggaatacattcacaaacttgcccgggtcaatccacaatcttgacggaaactcgcgggcgacacctaaccgtctatgagatgaatctccaagtgtcggtgacatgggaccgggggtatcttgactagaggtttggggcagctgcagtcacccacgtggcctgaccccctcgggggggggggggtcgggcccgagggtgatgtggccgcccctccctctgtctccccgaggggtcgggccgctcccgtttcggccccgagggctggggcgccccggccccctgtgggtttggcgccacgtgtgtgggttaggtgagcacagcggcgctcacctaaccgcgtttattgcgggttggacgagcgccccatgtcgcatttaatgcagcgcagcacactcgttcggtccgtgacaggtcacagtgtgtgaccggtcacagaccggtcagatcgtgggttaggtggcaacaggcggcctgacacacgcctcgccccgtcccgtcggaatgatgagagcctccaggcactcgtccctagccggagccggcgtgggaactcctggagttggcacgtcagccccggccagatacattccaggcttcatcgcaaccattgcaaggaagtcattgtatgaagaagggcagacgtgtagcatgctgaactgacacgtggtggacaagaatgaccggtctatgactggtctgacgctggtcacgtcattggcagacaactgtgctcccgcgatgcatctgcctccggtggagtggaggtaggtatgacccatctcgtcggatggtcatttggaaagcagccatggcaaatctccgcccattaatgagggagtaacagggagatccccggtgtcaggcgagagacggcgctgagcctcactcaaggacaagttgtgatttagcttccaggcgaaggtgcaagccaagttttggtcaagatagggtaggtccccacccagaagaaaagtaggtagaagtggtgcatgtagtatccccttgagatataaaaggaggaccttgcccaccaaaaagagaggagggagggggagtgagaggggttctggagcctgaactctctggctctccggctctctgtaaatccttcacacacagatccaccagaacacaggactagggtattacgcttctcagcggcccgaacctgtctacatcgcccgtgtctcgtgcacttgctctctcgcgaacattctccagatagatcgagggcgaagaacctcacttagcgcccccggccgaaccggcaaaggggggcctgcgcggtctcccggtgaggagccccacgctccgtcatctggcgcgccaggtagggggcgcgtgtgtttttctaagccctcgtcctctttcgtgtgcgccaagcttctcccgctcagcccaatggccgaacgggcagtggcgcacaatctctctccgagcgctagcggtgaagacggggagcagaacccgcgccgtcgagctcgtactccactgtccccctctcgccgaagtcttgggcgggaggaggcgctcgaggaggtcgaaagatccgcgacttcgccgcacgcgggcgatggagaaggacggcgagacggggagcgtcgtctcctcgtctacggtgatggcagcacgccccagggcgcgctccaggctgcgggcgcgctcctgcgtcacccgcccgtcatccctgatccagagactccaacccgacgttggctagatgacgtggccaatttggtcatgacggcgcagcagcgcctaggcgccggctggtggtcctccgccaccaaggccactggcgttgctactgctggctccgtgtcgtcgaggcggagggcgcggcgagcggcggccgctacccgccgttcgtccgccattccctcgtcaacgcctccaacccaagaagatgtgcgtagggggccagatgcccgcttcaatatcgagcgccggtgcaatgatcgccgtgctgcccacgcatcggagggcgcttcctcgtccggagcgccacttcggtccgggcacgggggccagccccctgtgtccccagttggcggtgccggctgtcgagcctttgtggcgagccttcggaacgtccgttggcccccaaggttccggcccaccatcaccgaaaaatacgacggaagcatcaacccctccgagtttctccagatctacacgactgggatcgaggccaccgggggtgacgacagggtcatggcgaatttcttccccatggccctgaaaggacaggcgcggggttggctaatgaacttgccacccgcgtcggtccactcttgggaggatttgtgccagcagttcactatgaacttccagggcacatatccgcgcccaggtgaagaagcggacttgcacgcggtacagcgaggggacgatgagtctcttcgctcatacattcagcggttttgtcaagtccgcaacaccataccgtgcatccctgcacacgcggtgatctacgcgttcagggggggcgtgcgccacaaccgcatgctcgagaagatcgcctccaaggagccccagaccaccgcggagctttttcagctcgcggaccgtgtggctcgcaaggaggaggcctggacctggaactcctccggttccggtgtggcagcttcggccgcccccggatccgccgctcggtcagggcgacgggacaggaggaggaagaagaggtcggcccattccgacgacgagggtcacgtcctcgccgtcgagggcgctttgcgggccacccgaaaggggaggcctgcgagcgacaaaaagaaggaggccggcgctcccagcagggagcgcccgaccagcaagtggtgcaccgtgcacaacacctccctccacgacctcgcggactgccgcgcggtcaaaagtttggctgagcggacgaggaagtgggaggaggagaggaggcaggagcgccgtgagggcaataccccggcggctcccgccggcaaccggcgaggtgaggccaagcagaaggcccccgccgaggacatcaacgatggcgacgatgacctagggttccaggagcctgaggccactgtcgccaccgttgatgggggagcgtgtgctcacgcttctcgccggagcctcaaggccatgaagcgagagcttctggccgtggcccctacccatgaggcgacgcggcgggcgcggtggtcggaggttgccctcaccttcgaccagaccgaccacccaccgtgcgttgcccggggaggacagatcgcgatggtggtttcccccaccgtttgcaatgtgaagttggggcgtgtcctcgttgacgggggtgcagccctcaacatcctttcccccgctgcctttgacgccatcaaggccccggggatggtgctccggtcgtcccagccaatcatcggtgtgacgccggggcacacttggccgctaggccatatcgacctcccggtcaccttcggtggttccgccaacttccgcacggagcgggtgaacttcgatgtggcggacctcagtctgccctacaacgcggtcctggggaggcccgcgttggtgaagttcatggtggcggtccactacgcatatctccagatgaagatgccgggccccggtggccccatcaccgtccatggcgacctcaaagtcgcgcttgcttgcatggagcagcgcgcggaccacctcgccgtggcatccaagcccgcgggtggcgacgagaggctcagcacctccgtcccagccgccccgaggcagcggatgatcacgtgcgacgaggtcccgatcaagcaggttgccctgggcgacggcccgtccaagaccacacgaatcggtggtcttctggacgacaaataggaagacgcgctcgtctccttcctgcgggcaaacgccgacgtcttcgcctggagaccagcggacatgcccggggtccccagggaggtgattgagcaccgtctcaccgtacggccgggcgcaaggccggtccggcagaaagtgcggcggcaggccccggaacgtcaagccttcatccgcgaggaggtggcgcgacttctggaggccggattcatccgagaggtcatccatccgaagtggctggcgaacccggtcgtcgttcccaaggcgaacggcaagcttcggatgtgcatcgactacaccgaccttaacaaggcatgtcctaaggacccttaccccctgccacgcataaatcagattgtcgactccaccgcggggtgcgaccttttgtgttttctagatgcatactctggttatcatcagattcgcatggctagggaggatgaggaaaaaactgcattcattacccccataggaacttattgttatacgacaatgcattttgggttaaagaatgcaggtcctacttttcaacgtactactcgaatttctttgggtagccaaataggacgtaatgttgaggcctatgttgatgacttggttgtgaaaacacgcaaccaggagaccttactcggatctagcggaaactttcgaaagtctccgcaccgcccgcataaagctgaaccccgacaagtgcgtgttcggcgtgcctgcgggcaagcttctcgggttcttgatctctgcccgaggcattgaggccaaccccgagaagatacgagctatagagcggatgcgcccccccagcaagcttagggatgtgcaatgcgtcactggctgtatggccgccctaagtcggttcatatcgaggctgggagagaaggcgctacccctatttaagctcctcaaacgctccgggccgtttatctggacggaggaggctgaacgggccctcactcagttgaaggcgtacctcagttctcccccagtcctggtcgccccggagccagatgagccgttgctactctacctggcggcaactccgcaggtggtcagcgcggcgttggtcatggagcgcgacgaggacgaccctcgctccgcgcatccccaccctgtgtcgactcgacccgggagagagcagggaggagaggcccccgagccgaacggcggcccgaggcccccgacgaccggagctggccctctgcccgcttgtccgacggtgccaggcgcccccgacccccaggatggccccggggccactgcgggaaggccgcgcctgtcgccttccgaccccgaggtcgtcgacacagaagccgagtgcgccccgcgcggcctctcggacgaaaagcgccctatagatgcggcccctggcgaagaggatcggccccgacaaaaggtgcagcggcccgtctactttgttagtgaggccttccgggacgccaagacccgataccctcaggcccagaagatgctttacgctattctgatggcttcgaggaagttgcgccattatttccaggcgcatcgggtcacggtggttacgtcctaccccctcggccaaatcttgcataaccgagagggtactggacgggtggtgaaatgggcaatcgaactctctgagttcgatttgcactttgaaccacgccacgcgatcaagagccaggccctcgccgactttgtggcagagtggacaccggctcccgagcccgtctccatccccgaggccagctcgggcccttcgcagctgcctcacaccgcctattgggtgatgcagttcgacggctccctgtctcttcagggcgccggtgcgggggtcacgttgacctcgccgagcggagatgtcctcaaatacctggtccgccttgactttcgggcaaccaacaatatggcagagtacgagggactccttgcgggactcagagtggcggctggactggggatccgccgcctcctggtgtgaggtgactctcagttggttgttaaccaggtctccaaggagtaccagtgctctgacccgcagatggatgcttacgtgcgccaggtgcggcgtatggagcgccattttgacgggatagagcttcggcacgtgcccagacgggataacgcggtcgccgacgaactctcaaggctcgcttcctcgcgagcccagaccccaccgggcgcctttgaagaaaggcttgcccagccgtcggcgcgacccgaccccctaggggagacggacgagcctgaacggcccccgaggcccgtcggagtccaggcctcgggacccgaggggggcgctcccagctcccttagattgattgcttggatcgctgagatccaggcgtacctcgcagataagactctacccgaggaccgcgaagggagtgaacgcgtccagcgcatctccaagcgctacgtgctggtggaagggaccctctatcggcacgcggctaacggagtcctcctgaagtgcattcctcgggaacaaggcgtcgagcttcttgccgatatccatgaaggcgagtgcggagcccactctgcctcacgcaccttggttggcaaggcctttcgccagggtttctattggccgacggctctcaacgatgcgatcgacctggtctggcggtgcagggcgtgccagttccatgccaagcaaacccatcagccggcccaggccctgcagaccatacctctttcatggccgtttgctgtctgggggctcgatatcctgggtccgtttagacgggccccgggcgggttcgagtatctgtatgtcgctttcgacaagttcactaagtggcccgaggcttatccggtcatcaagatcgataagcactccgcacttaaattcatcaggggtatcactgctcggtttggggtgcctaaccgtatcattacggataacggcacccagttcactagtgagctcttcggtgactactgcgaagacatgggcattaagctctgcttcgcctctcccgcccaccctagaagcaatggccaagtggagcgcgccaacgcagaaatcctcaagggcctcaaaaccaagaccttcaacatcctcaagaagcatggcgactcgtggatcgaggagctgccagcggtgctctgggcgaaccgaaccacgccaagccgagcaaccggggaaacgcctttcttcctcgtctacggcgcggaggcggttctcccatccgagctcaccctgaggtcccctcgggccaccatgtactgcgaggctgatcaagatcagcatcgcagagatgacctcgacttcttggaagaacgaaggcggcgcgcggcccttcgagccgcgcgctaccagcagagcctgcggcgctaccatcagcgtcacgtccgggcccgatcactctgcgtcgacgacctcgtcctacgccgcgtccaaacgcgtgctggactgagcaagctctcaccaatgtgggagggtccgtatcgagtgatcggcgtcccccggccgggctccgttcggctggccacgggcgacggcacagagctgcctaacccatagaatatcgaacaccttcgtcgcttctacccctagtgggggtcgggtgtcaggtctcgggctcgggccaaccccgcacccccctcgggcgtgcagggttggccgggggctaccacatatgcatatacttatcttttttctcttccgtatttcaataaaagctttttcgattttctaaggattgtgtctgtgccattgtttccttttgaagagttttggcttgaattagcacgctcgtgctcgaccctgccctcggtggcccgggccggcggaaatcgccaaagggggcccagaaccgagccgtgccccggggcgtggtgaactccgggggggaatcggcaaaggcccacaatcgggtccccataaccctcggtcaccgcgctcccggcctagccagtctcgacatgtgcatctccccaggcactagccccgacccgcgccgtttgaggctgggacctgggcacgagcccttgttcaagccaagacacagaaggaccgcggcacagaccatcctcgtctcatacacacaacaaataaaattgacacagaaatttcttctttatttgattgcagattaaattagtttatacaagaaggaggcccgaaggcctcggaagaagaaaggaaaaactatttaagattggcgggggcctgggggctcacttcgaggctcccgggtcaccggcctcgtggtcgctgtcgtccacaccaccgtcgccgccctcctcgtcggagtcgagggcgaacgcgagctgaggggccgtaccctcgaagctgtggacgatgtggtcggcggcgtcccggacctgcgcgcgcgcgcgtcgtcctcggttccgggagggaactcgtccagcgctgcccacggggagaagtccgggtccctggcctggtagcttgccagtacaagctccactactccccgggcgaggtctctcgaggatgacttgatcgtctcctcgagctcctcggggagccgctggagagtcccggccatctctgagaggcgctgggcgaggcccccctggttggcggcgtacttcgcggtccgctcgccccagaggcccgcttgccgcccggcgcggtctagacgggagacggcgtcccgaagcatgccgggccctacctcgcccgccaagcggagggcctcgacctccccggcggacgagtccagcgcgccctgcagatcggcgatggtgtgttcggcagctacgaggcgggcggctagatcgctgtcgcccgcggccgccccaccgctgcgcgccctcgcgtccagctccttcgcccgcgcctcgagctcagcggcccgctgatccagtgcggccctctcggcgcgggcgccttccagattacggcgcgcctgctcctcccgcgctgcctcgcggagggacaggctgtccgccagccgctgcgccgcggcctcggcctcctcgagagctcgctcccgctcggtgagcgcatcctcgtggaggcggagtgcggactcctcttcggcgcaggcggcctcgtgcgccgccagcgttgcctcccggatagcgacggcggtctcgcggtccgccaggtccctctccctcgcgcgggcgcgctcttccagcgccgtggcgcgagcctcaagggccacttcgcgccgccgggacgccgcctcgttctccgtcgcccgccattcccgtgcagtggcggcgtcaaggactccccgggcggcgtcgagtttcttctctagctccgccacccggctcccgtattgaaggcggagatcgtcccgcgcctcgttgagcacggcggtggcgatgagggcagtctcccgctcctcctccacctccctggcgatctccgccagctccctccgacgggcctcgagctctgaggcgtgccggcggtatgccttgcggcccgcctccaccatggcctccaccgagcgccgcccctcttcgacgcgcgcccacgccgcgtcgagctccgcccgctctgcttgcaggacctccatctgggcacctaacccgtccagcaccgtcgtgttcgcggcggccagggcctgcaggaggggctctgtgttcaatggggcggcggaaggcagaggggagagccgcctcggtgtgggcgctgtgcggctcggcccgccaatcgacgtgccggactcaggggcgtcccccgaggctggctcgtcccgaacatcgcccgaagggtcgggtccgagcggtgcgcccgcggcctcgtcgtgggtggcctcggaagtcgtcgtcgcctcgggcggagtcgggtcgggggcttggcaggccgcctggcgtgcgcacgtcgcctctgcctcccgggctgacttcccggcccggtggagtctggcctcctcccgagcggcctcctcagcctggcaaacccggacggcttcctgggcagcctcctcagcttcccggaggcggtccgcggcttctcgccggatagcttcccgcctccgggcctccgcggtcgctgtctccttggcctcagaccggccggacttggaatggcgaggggggcgcgacggaatctcgctgaaagcggaagaaaaaccagaagacaaaaggaaacgggtaagtgaaaactcgccttgggagaatgaatacggccgcagtgggcgcggggacgaacctgcgaggaggtcggctaaacgaccaccttgggggggagatgaggtttccccggcatggttcggtcccccccatcttgcggagccgcttcttttttcgctccctctcgggctgcgacgtcggcacagcaccctccgggcgcctgctgctggcacgcaccgccccgccccctcggggaggagatggagagggggtatcctcctgtttcctcttcccccgggcgtcggcagggcggctgccccccgggcccccgtcacggggcccagaagcatgaccccctcccggggtagattgttcccccctgcggctcccgcccgtgccatcgtggcctcgaggagcccactcccctgacgccccgaccgcctgcatgatggtcaggatgttggcgcgctctggatcgctgcagagggggaggacaccttgggggatgagggatgcctccacggagctgagattcagcacccgttggaccaccatcttgaagtcctcaggggcccagtcccatctgcccccctggtgggtcctcatgtagtccttagacccggtgtactcccaggcgccccgggcgcgccgctggagtggcgcgatccggcgatgaaggtagtcaccgaacaccatggcccccgtgagcccctgggatcgcagacccgccaggcagtcaagaacggcgtcgtagccatctcccagatctaccggcgcccgccagctggaggcctgcgctgggggctggctcggaagtcggaggcgcgcttcgtcggcgagaggggtgtagaaccagtcgctcttccagtcgtcccacttcttgcgaaggacgcagggaatgtagcagttcagcaccggcccccgcggctggaagtagcagccaccgactaccgacggtggcgacaccggctgtacggtgaagaaccaccggaacagccggagagatgggcgcaccccgatgaacatctcgcataggtgcgcgaagatggccaacgtcattaccgcgttgggggtgaggtgcgccatctggagatcataaagctccagaacatccatgaagaaagaagagaatggcgggaccagccctgccattgcgaaagagaggaagaagacggaccgccccgggtaatgcggcgccgggcgtccctcgcccagcgcgaccacctcccggccggtggcagattccggcatgaatcggcgcggcagcccggcctgcctctcgctcacgatgcgggaaggcggcagcacgctaccctcgagcggtgcggagccccgtgccatgacgccggcggaggaggagcttgagagcgagcgagtatggcaagggtagggcgccggaaacggagagtcagagcacaagtggcaaaggcaaagggaagagtgacgagaggaaggaaacaaatcccttccttgatgtcttagtacccttgccaacgctatgcccggctcctcgatccccgcgcccactacctcgccccctcgtctctcgcgcccacgcctccactaatcccgctcgcccgtttgcggcgcacgaggcggatgtgcggccatggcagtcgagatgggacatatcgtgcgcgcgttaactacgctcgccgaccgatgcaccgtcatcacatctccaggcgaaacgaaccagctcgtcccggttcgcgcgctacttaagtaatgtagcggtcttgaaggaagccgctcattattgtcggtcggttttttccttgacgatgtgcgcgatttgcgaccgctgggtttctgccgcctgtggagaccggccccacctgtcaccaggtctaaggagtggcgtcacgcccgagcgcttccctcgggggggcgatcgccctagcgtaacgccgggggctactgtcggtgacatgggaccgggggtatcttgactagaggtttggggcagctgcagtcacccacgtggcctgaccccctcgggggggggtcgggcccgagggtgatgtggccgcccctccctctgtctccccgaggggtcgggccgctcccgtttcggccccgagggctggggcgccccggccccctgtgggtttggcgccacgtgtgtgggttaggtgagcacagcggcgctcacctaaccgcgtttattgcgggttggacgagcgccccatgtcgcatttaatgcagcgcagcacactcgttcggtccgtgacaggtcacagtgtgtgaccggtcacagaccggtcagatcgtgggttaggtggcaacaggcggcctgacacacgcctcgccccgtcccgtcggaatgatgagagcctccaggcactcgtccctagccggagccggcgtgggaactcctggagttggcacgtcagccccggccagatacattccaggcttcatcgcaaccattgcaaggaagtcattgtatgaagaagggcagacgtgtagcatgctgaactgacacgtggtggacaagaatgaccggtctatgactggtctgacgctggtcacgtcattggcagacaactgtgctcccgcgatgcatctgcctccggtggagtggaggtaggtatgacccatctcgtcggatggtcatttggaaagcagccatggcaaatctccgcccattaatgagggagtaacagggagatccccggtgtcaggcgagagacggcgctgagcctcactcaaggacaagttgtgatttagcttccaggcgaaggtgcaagccaagttttggtcaagatagggtaggtccccacccagaagaaaagtaggtagaagtggtgcatgtagtatccccttgagatataaaaggaggaccttgcccaccaaaaagagaggagggaggggaagcgagaggggttctggagcctgaactctctggctctccggctctctgtaaatccttcacacacagatccaccagaacacaggagtagggtattacgcttctcagcggcccgaacctgtctacatcgcccgtgtctcgtgcacttgctctctcgcgaacattctccagatcgatcgagggcgaagaacctcacttagcgcccccggccgaaccggcaaaggggggcctgcgcggtctcccggtgaggagccccacgctccgtcaccaagagtaagtgctcaaaccatcctagccttcaaaaccttctccaatccttaccttcaccctcaaaatcactctcacacacaagaagggctcaagattggggtggagagagcaaaatcacattgcgaaaagctagaaaccactaaggaacagaagagcaaaagtgaaatggcaaaagagtgagttagggtcgagtttgatatatataacggctagatgatgtcatctagctgttactcacatttttgaaccggaatgttgcccggaagttccggtccttggtgccaggaactttcggtcatcatttaggaaattttcttcatttctcctcggcccggaagttccggacatgggggcctaaagcttccagacatgctttgctatcttgaggaggctatttccaaaaatagctcctaaaaatatttcaactgttggatatagctaagggcacttagagtatctcagaaccacacttgaaacccctcttaatagtaaggtttttcctaaactcaaagtgaaaaattaaactagcctaactcggctccaattcttttcaccactttgaatttgatgatttgggggctccaagcatcctagccacctcgtaagcaacctgggactaatacacctgcatttactcagtaaaatcataagtcccttaatcattttgtcattaatcaccaaaacccacataggaggggggttaggtgcacttttagttacaacccaccacattctaaaacttaacatgtaaagatgtcacatcatcattcactggcaattattgtatcttcaagttgtgtttgtttcctaaggttcccaacctccagtatctcgtttccgcacgcacagttatgttttttttaaaaaaaaatacagaaattgcttaaaaaatatattaatctattttttttaagtttgctatgttttccatgcatgggattagtctccactccgcactaaagaatacaggcatactacgttatttataatttgttgtattttagagatttaaaatattagcatgttaaatcatcattacacatcatctacatagcatttcaatatatatatcaattcattatatttctacgatatccagtatattgcatccccacttaattaattgtttatctcttctctcattaagccacgacactttaattgtttctatcccttggatgactactctatgctttaagttatctctcattttcttctctcatgaagtcacaccaccttacttttgcttttggtcaattattaatatatactagaaaatcggcacgccttgctagtataatccatgctaagatccttttcaaaaaaaatattgaagatattttgctagccttaatccaatttctgtaaaatcctttaatttgtttcaatcagtgtcaaacgaacgatgattgtataaagaaaatactccctccatctcattttgatcatctcctaagcaaatggtaccaaaaccaataacatcaacgcattcatcattctaaaattaatccgcatcgatgaatgtgctatatcccctcgtgtccaacataaattaattcacgctttaaatgttgcatgggttgaaccaatagaaattaatattggttgaccgaatgtgtatagttgcatgcatgcatgcagggcattccacgatgtgcatttactctttgtacaaataaataaagagacactttgttagatgatcatcattttgagaaaacctcaaaaacttaggcgatgatcaaactgggagagagggagtatgtttgactagctctgttacttgttcttacaaaaaaaaaactcgagttatgatttactaactcaattcaacctaatttttcaataaattcaattgaacccaagttgtgtgtcctcttaaactccacaactccttagatttgccattgcgcaacaatagctcgctgtccagcacaaggttagcgttgctgtgctctcagctatcaaccattggcattttgtctcattggtatatggaagtagcgagggcgtcaacgtgagcttgacaggggtttaccatcaccatcaaggcgacgatggtgtcgtagccgaaaggcaagtgagactttttttccacaatgtttgatttcttatagagtttttcttaacaatggatttatatttgatcgagaggttcaaggaatgcaaatttatttgattgctaatgagaagataattgttttgtttttcagcacaccaatgatccctagatttatcttaatgtctatgtgtgttgtgagcagggaagatactaaaagttgaaaccctgtttatctcgatttttaacttcacacacatcaggatctatctagatccttcacttcaagggtatctgtatccttttgtcgacggggatacccataaaccggataaatagagtattagggtatgttggtacgaggatctacacgatacaacatcaagcaaacgaaaagacaaggattatactggttcgggccctcgtaaggtaatagccctaatccagtttatatatatgagatagatatgaaaaaaccacatattacaatagaagaccaataatcctgggattatcggcgagacccttgtcgttggcgagacccttgtcgttggcgagacccttgtcgagatggtttcaacgagatctcatggcgagtaggcttcacgtcctccggattgtaggctatggtggtggtgctggcgctatgattcggtcatctaaacccctcagggggtatgccttttacaccgtgaatcaccttagtcttcaagtagaactcggagactacggaccccgcatgatatagtataaacccgattctctccaagtaggactctgctattcacttgctgtcacaccccaatctggcaccgccggacaacggcacctgataggagcgtgtcataggaaaaacggcgcgaactgcttcctacgaaactgcgatcacagtaccagtcccaggacttagcactggtacccacggtgacaaatatgaatcattgcaatccttaaatttaatagagaacttatttaccttaacttaggttgcagctcaggacagcctgagaatacaaccgacgacgcggacgaggaaacatcaacagcagcagcagcagcggaaccaatgaactaacacctaacaccacaggcgacggctgggaaccaggacgaaaccttaatcttcacttcacttcatcttgacttcaaggcagaggaactatatttatatagagcaagggtgagtactttcgcactcagcaagtcacgggaatttaggtgtctgatgcaagcttggaagagaggcaaggttgttttgcaaatcttttgttttggaaatcattttgaaatcactaagtgatttatttctttctaagtttgggccaaaaagagatttgtgtctcgattcgactttaagagatgtttttcaacagctcatttggtaatgtaccgacctcccggttcagatcattacttctcggctcccagagccatttcacttgattaatcggctcccaaagccttttcattttctcggactcccagagtccagctgcccagcagcacaacaatccgcttccactcaggaagcctagtctatgatgcccgtagacatcccgaatcacacagattcgtttcttgaccactcaggtcatccatctgccacataggctgattctggtaacgattcccaaaccacaacaacttttcacaaagcacaggcaaacaaatctacgctacaggaaacacctcacatccgcccatgaccgtgggcacggctgttcgaacagttagttaacctctgcagaggaggtacactttacccacacgacattactaacctggatcacccagccggagaccctaaggccgagataacgggccggccagcctaaggagacacggcccattagggcgcgcgggaggcgaggagagagggaaccgatggaccgggctcacctcgcgtggtcccgagtgggacccgcttgttagcggctcggctcaccgtgagcggggcgcacgcggagcgcgctagggtttgggagggggagtcgcagcgcacgtgcggtttgcggtggacgcggatgcggcgggcccacgagcagcctcatggctcgcggtggaccgcgcgcgcgcgagcgggggtgcaggggagcgttggaccagggtcagccttgaaccggtcgcagccgagatggcgccgacgtggcgccttcgtggcagccacgcgggccagcgggaggaggaagaaggggaaggccgagatggacggcggacggcggccgagttcaccggagctcgacaagacgactatggtcaagggggagcacaccggattggcgagcggcacaagagaggacgagccaatggctcggatcgcgccgggagaggtcaagggcggtggattgcgacggcggcggctggcggcgtgcaaaaggggaaaaactggcggggcggcgagggttcgattcaaggcgtcgggagcatctccgttgttcggggaactcattctcggggtcggatgggacggaggggcctcgagggaggccgacgagcggcggctccccggaacgggtggcaatggtggcgaggccatgccgggcggcggcggggcttcgtctacgcgcgttcaggagggctaccgagctaccacgcgagctaaaagagggagagggcaagcgagaagggagaacggagggaggcactaccgagccgagacgggcgctgtgacgagcggccgacggcgcggggcatgatcgctacggcctcgggccggggaagaggaagatgagggtgcccggagtccgcgttagctcctcgcgcgcacgccggcttcaccagcacacacggcggcggagggaggcaaggacagcggcagcaaggcggcgagggtggcaagaacagagagagagagcaggcgagcggcttggctgtggttttataggcgtggggtgtggagcttcgaggggaaggaaccgagcacgggcagtcaaggggagctcggttgggtcaaggtgggggcgacagtggaggtgacaatggcgctggtcagggaaaaagaagaaaaggggagagaaagggagctctgcccatgccattttgggagaaaggaggagggagagagcgcgagctctggctccgcgttttggaagcatgcggcatgggggcgtcgggactgggcgatgacagcggcgatgactgcaaaaaagcgagcggggttcggcggctgcacggcgtaggcgtggcagggctgacgcggcggcgactgggcggcagcgcgggcacgggcggcgaccgggcgacggttgccaccagggcgcgcgcgcgcgggggaaacggcggccgaccgaaaattgaatggcggagagcgggggatttgacgccggtggaggagctcgacgagagagagagagagaaacagagagggagagagagaaagaacgagagggcgagagctctctctctctcggctcggctcagctcggcgcgtgcaatgcacgtgcgaggctgagggaggagatgggccaagggaggaagaatcggcccaacgaccaagagggagtcaaaatagacttctgcttagaatttgaattggagagaattgcagcttggatttgaatctaaatttgatacttgtgcacaagggttcaaggagatgaggaaggaaacaaagcgggagtttgatacttttgggaacaattatttggagaggattcaaaggaggggattgactttaggaatttgatttcggagactcgaatcggaattggaaacttgaggtgggggattttgatgaggcgatttttgaattcgacgagagggatcaaggagatttatatcgagatccacggcacgacttagactcagcactcaaagaatgaaattttcgcatataggattttgccgaaatagtttttaacgcctcacgaaatgcggagcgttacacttgcccgcgagggtaatttccataatctcttgataattaccttatcgtatacggaaacatatcatacatacgaaaacatgccgtatccacatattccataagtcataggatatgagatatgccttatccgtaaccatgacagtagccccccgacttcaactcaaatgagtactcgttgtcatccgagacttcacagtcaacgttgtcatgctcactaggtcgttctcgatgaaaatcgagaaggacatggagtatgcggcatcattgaaagaaaatttattctaacccacagcacactgcatatctctagatacttctcttgatttattttgttttacagagcctagcaattttttacacttattaatttccaattatttctcaaacattgttgtgccacgtggaccaatcaacaataggcaaaactgccggcttgagaaggattgattgatattgtttaagttatcataaacaacatcaatttaatggtttatagctttttttcaatgatcgatcaaatatgatgattatataaacttatattatttagttatcttatacgctatttctactattatcataccaagctcccgtaatattgtgcgggatttcatgtagtttcgttaagaatgtgcccttgtcaagtaacatggcattgctagtattttgtgcatatcttgtgccgttcttgtaagggacacaaatgcaatatgttggaggaaataatcaagacttgaatcctgacaagttcttttagggggagaatcttgacaagttggaccatttgaattcatgcttctatgattttctaaacaactattgcccactccaatcaggagggcaaataatatattggtagggtagatctccatattcgatctgctgatttaaataaacttgagtcaatttccggcaaatataaagcccgtaagccagctatgttcttagggttctgtttttttacaaaagttcaggtatgatagctggccacgtccaactataaacagggattatctatagagctcaaaataaaatcccatccaatcacttttattctctctcaattttattattggttgctacacagagctggtttcttcgtaagaaatgatttcttcatcttttttttcatctcttctcattaactattttatcgcctctttttacttatgtgactgttttttttttaaatacgcgagagacgcatctttatattaagaaggaataaaagtatttacagagcgggccgaaaaatcaaaaacacgaaggggacaagatacaggagggggaggaggaagaaaataaaagtctaatctcccaacgaatgtgacgaacttccatccgacataggtgactgtatatttaacggtatgtaagctaggtgtgagaaagagggtttggactgctctaatgcctttgctctaatcctgagcactagctgttttgcatgctgcgcgcgcatgtggacggatccattatctgctgtctggtaattaagcagtactggtgacttaggagtagatgccaggttatccaacacgtgagctcgtgctcctcactacggacatactgatcagaaggttgaccttggcgtctataaattgcgggattatgtgaacagagtagacacgaagcagatcaaccaatcatcagaatgaggggacggtcccgagtttttctcctcgccttggtgctcttcctcgcgctgcaggcgccggcgtccgcaggcacaaaggcaatgctctttcttcacttctctctcttaccctctcgatctattcatcatacatgccctcaatattttttaaaaatatatccgccaaagtcattttgttctttaattgcatgtcctctcgtttctcttgtatgtcattcgaatatttatgaaaaatatttttttaaaaaaatgtatttaatggattttttaatcatacatggagattatatttttaaggggatgctcttttacttcttgccactcaaatagttttacaaaaaaaaatggcaacatatataacatattcatatgtgatttaaatttgatcaattataaatcaacaactaaattcaatgagaaaatcaaactaaactgtaacgtgtactacttaccgtcgtatttatttatttatttctaatttagagttacaaagagtgatatatcacatattaatttgtgttgttaaatttatttaatttttataactatttcgatgatatatgacagaaaacagggtatatattccttaaaactgcaaaaatgtttttccatcgtatattcgtcacgtacaatacaagcaagtcaacaaatataggactgcgattaaatgttctattgacgatctctaatccatgaagcggggtactttcgtgcatgcagacttatgtgatcgtctttgatggcttaccagcttctccttctggtttgcttgctacagtcgtcaccaggtcagaaaatactagtgtggccgttatggatgtcggtgctaccgtactaggctactagctatgtactcctacatcactaatgtgttcattttgtgccgtaaaaataaacagctttcagttactgtacgtcttgagccccatccaagtgatcgtggtgcagatcgatgagagtttcgtaggagtcatcaagcgtacgccacatatatcatcatgttatagtgtgttccccccttggagtttgcagttcatacctgtcactgacgagcgcgttctttttttcgcgtactttggactcagagctgcccggcgtgctggccgtgatccccgacgtcctgcacaaggtccacacgacgcgttcctgggatttcctcgagctagagcgaaatggcgcggcgaccggtgcgtggaaggacgccgcgaagtacggggtggacgctatcatcggcaacgtcgacacaggtaccactacttgaaaaatgatattcgagacgatcaaaatggatttcacgagcgactggtacaaccgctagcaaccaaaaactaatgaaaatcgaattttttaaattaatttttcaatggatttttttttaaaaaaaacgcactaagagcacccacaatagtaaagtaaggtgctctctataaaaatgtacatctcagcaatagactagattgatagtaaaccacctcaatagtatgtctacatgggtatctgtagctctctcatccattgcctcgtttttctctataaactatctccagtttagtagatagatttactctctctctcttcatttaatctgttccaagtagaaaaatatgctgacatggatctcttgtagagagtctatagataaccattgcgggtgccctagaatatgaggaagtgaaattgagaaacacagccccaaataatgaacacagaacgatcggagcgaatcagttattccgtgcatcggtacatgcttcccgatgagatacatgcgcgagataacttaaaataatcaccccaagatgacatgaggttaacagaatcaaatcccaagaatacgggaactaaaaagtcaattcaaacctcgcaaaatggtagcgtcgccatgggcgcagtgcgcctgtgcctctgttggattacgggatccctggtggcctggttcagatgtgctgtcgtcctatctgctgtactgaagtgctgtgcagttagccatagccggaacctgttctgattcctgaactcctgattcttattttctgtgcgtgcacgtactccctacaaatgaaggtgtatggccggaatccgcgagcttcaaagacgacggctattcagtcccgtcgaggtggcgcggcaagtgcatcactggcaacgacacgaccttcaaatgcaacaagtaactccactgtccacagctgctcatcaagctgcatgcaactaatgcagtaaattttctggcgagaaactaacatgtcgtacatgcagcaagctgatcggcgcggggttcttcaacctcggcttcctagcgtcgggcttgctgcaggggaagccgccaagccaggctgcagagctgtacacgccacgggactacatcgggcacggcacgcacacgctgtccaccgccggcggcgggttcgtgccggacgccagcgtgttcggccatgggaagggcacggccaagggcggctcgccgctggcgcgggtcgccgcctacaaggcgtgctacgccgagggctgctccagctcggacatcctcgcggccatggtcacggcggtggaagacggcgtgaacgtgctctcgctctccgtcggcgggccggcggacgactacctgtcggacccgatcgccatcggcgcgttctacgccgtccagaagggcgtcatcgtcgtctgctccgccagcaactccggcccgcagccgggctcggtcaccaacgtggcaccatggatacttacggtcggcgcgagcaccatggacagggacttcccggcttatgtcaccttcggcggcgtcacgagcagcatgaccatcaaggtttgacaatacgaccgaccaaatcacactgtagtttgcgcacatgagaatacggcgtacttttgctcatgccattgggatttgggcaatttgcaggggcaaagtctgtcaaacagcactctgcctcaagggcaacggtacgcgatgatcaacgcgaagaacgccaacgccgcaaacgtaccgagcgagaactcgtaagaaatcaaaaactcagatatcatctcgacttgcaccgatcgaatcgaaccgacgtcgatttgcttgcactgctgcgtgcgtgcaggacgttgtgcttccctggctccctggacagcgacaaggtgcgcggcaagatagttgtctgcaccagaggggtgaacgccagagttgagaaggggctggtggtgaagcaggccggcggcgttggcatggtgctctgcaactacgccggcaacggggaggatgtcatcgcggacccgcacctcatcgcggcggctcacgtctcctactcccagtgcatcaacctctttaactacctcgggtcaacagagtaagcatcgctcatcagcacatagtactacttttcaggtgcaacacatcacagcatggttatatactatactaattaacgttactgctctggttcatgtagcaacccggtcggttacatcactgcatcggatgccaggcttggcgtaaagccagcgcctgtgatggcagccttctcttcccgtgggccaaacccgataactccccagattctcaaggttggcacattgctcatcgtattcctacagatactcgagagagaaagcttgccccttccaaataggaccagcagctgtgtgtgtatgctaacctggtggtgattttgcagcctgacatcaccgcgccaggagtcagcgtcatcgcggcttacagcgaggcggtttcgccgacggaactctctttcgacgaccgccgtgtcccctacaacataatgtccggcacctccatgtcgtgccctcacgtgtcgggcatcgtcggcctgatcaagaccaagtaccccgactggacccccgcgatgatcaagtcggcgatcatgaccacaggtgagcgagaaatgcagatcgcgatcaatcgagccagcgcaaacatcacataaactctgatcgatctcacgtccttaatatgcctgtgcattgcagcgatcaccggggacaacgacagcggcaagatccgggacgagaccggcgcggccgcgacgccgttcgcctacgggtcggggcacgtgaggtccgtgcaggcgctggacccgggcctcgtgtacgacaccacgtcggccgactacgccgacttcctctgcgccctgaggcccacccagaaccctctcccgctcccggtgttcggcgacgacggcaagccgcgcgcgtgcagccagggcgcgcagtacggccgccccgaggacctcaactacccgtccatcgccgtgccgtgcctgtccggctccgcgacggtgcggcgccgggtgaagaacgtcggcgcggcgccgtgccggtacgcggtcagcgtcaccgaggcgctggcgggggtgaaggtcacggtgtatccgcccgagctcagcttcgagtcctacggggaggagagggagttcacggtgaggctggaggtgcaagacgccgcggcggccgccaactacgtgttcggaagcatcgagtggtcggaggagtcggagtcggacccggaccggaagcatcgcgtgcggagccccatcgttgccaagacgacctgcgggtagcacggacggggtcgattcttttcgagtcagaactggaaactgaataactgttggtgttgtcacgccaaggtccacaagtcgttagggctaactgcctaaatcctaatggcaggagacttggttagagaggagaggatcgatttcgttttatctggcagatagatgtgagctatcgaatccagatatttgttctgattccgacggtcaagttgtttttgtgctactcgaatagtgtaatgcatcaatcttcatcttgttacgataattatatacttctcgtcgggccggcgaagcgccggccgaaatatataattacgataattatatacttgttcgttcttttctgccagagatgtgtcgctacatttctccatggaaatcagtcaaactttgaactgtataatttatactgtgttttatgctgtagtgttgcttggtttctcttttttgcctcttcacggaggagtgtaatttattttcctaccataaactgtgacgaacacatgcaacccctgaagctagtgatacatgctgacgtcttatttgatatgccataaatattaaagtgtaaatgagaaatttaaaggtgtaagatttgaataatttaaaatcgactgctttttagtacaaatgggctgtttggttaggtgccacatattgccacacaacatgttaggcatgccacagattgttagcttagcgtttggttacttgcttcagttgtggcaagccacactttcttgttccatggatatacatgtcatatacttattttctagccaaacattgtcacacttgtggctaacaaattgttggccacactatatttgccgtgccatacctatgataaattaagttgtggcaatgttaggcaacaaccaaacagacccaaaaattgtagcgctatgatatagtactcccatactttcttctagtttcggctgggactatttggtgggattcgtggcccaatctcgcgcgatggaaggattgtttttttttttttttgaacttgatggaaggattgttaggagttaagaagaaatggaaactatggaacgattggaaaaggaaacgatggaacgattggcccagactcccattcgaaagctggcaactgggccggcctaaatcacggaaaaccaattgggcctccgaacatacaacaatgggcggaaggcggcttgagggctgaggcgacatagggcggaggaggacagcacgcgctccgctcgcccgccgccccacgccccccgcacgccgcggcccttcgctcggctgccggttgctgccgcgcccctccgctcgtccgctccactccgcgtcgcagcaccggggtgggagccggcgcggcgagtccggccggcctcggggaagcgctgccgcgctcttcccgactccggcgactgcaacggctgctccacctccgcctaacgtttcccatcgtcagcctcctccctcttatactcctgcagttttagctctccgccactattcattcctttcctttcctagggcttagctgaaatttctccgtagcgaagaggaattgggtggtgggggattaaacccgatccatctgcagtgaggattttcccccatgtgtcaaacaagcatgctgtggacttacatataggatgatagaacttagacgaggtgcaggtgcagtcagtggctcaactgaacccccttgtcccgcgttaatttccgcctggttttgttgtgagtgccatggcttcgcattaccaggctgccaccttgatcgcgtcgccgtcgtacccaaatgcaatcgcttggtcgactgagaacctggtggctgttgcctctggtcaccttatcactatcctggtatgtgtggtttcattgcattagtgtattcgaaccatgttgtcctcctcaggagttatgactgttcatcttgtgtttttgattctagaacccatctgcactggaggggcctcgggaactggttgttcttcgtcctagcgacccatttcccataggagtggttaacagagaaggtacggtttccagtgaaacacatgaatttgtgctgcattccttttgcttttcacgtgttatcagtttagacggataatatgattgccgaagtggagtggaagagatgctcggtgttaagtttctttatgttagcactgcatagtaagaaaaaatgattgggacagcttgagtttagcagttactttagagttctgtcaacaacttaaatgttatgggtggctgttgtgcttgagatcacggtggacaactccaaatgatgataaatatcatcaatatgtacactttgctttctttaaaaattattaagcaatgccttaggctaattgcatgtgaagatgcaattcaacaatatgcatccagaagttacgctttcttaaacatcaattcagcagtgtggatttgagttcctacaaaaataaaattgtaattttaatatgtaattatcttgattacatgaaatttttggcagtcaacttctcttgtgacaaactgaaaagtaacactggacatcgatagaaggtgcgcaccaggaatcagtttttattgcttattttgcagatctctttgaaccatgtataatgcccacttccttagcacgtgaaactgaattatgcgctcgatctatttcatggtctcaacaagggttttctcctaactccgggtatgtctttttttaagtcgtttcatcacatcatttttgtctctctctagatttattcttcagcactactaggttcatttgcttatctggcctctgtacttttttttccctatatggattcagttgtctgttggctgtttgtactgttgatggtcatgtaaagctttatcggtcaccattttgtgaattctgtgatgaatgggttgaggtaagcatgttcacctaatgtattattaatttagtttattgactaacttaatttgtataaacattgatagctgggcagcttgattggcctgccaaattcctgttatgcaacagtaatttgttccatgtaggtccaatttgccatgtcccatgcaaccatgcagccccctacattattttttcactatctaagaatttgaaaacatattggacaggcaatgcagttaaaataagcttaacaatcactgcaccacctagtagacattcaaccgtttgttcagtactacttctgacttcgattacagacaaaagaagatattctttttggcagttttgtttgtatttctctgtgtttttcttgctgtttgtcatgtcccttccttttccttttgccattagataaaatatttattttcattcaccacttgtaatcatttgaacctatcagttacatatgcttaggatatctcagggtgtatgtgttctttagttttctcatattctgcctgtcaacttaaatctattggtctaggttgcagatatatctcgattgctgtttaagttttacaaaggtatagaatttggggaaaatgatggtcctagttcacttcctcaggtattctcccatccatccactctatcaccagtgtctccctttcattggttgcctcagaaaattttttttttgtgaggcagaaatatatgttattgagttaacttacagaaagtttgtcttctgtgtcaggaaaaagaaaatactgaacaaaaccagcaagtcatgtgtattggtaaactgcaagagcctcttctgagcatgggtacagaacggagaaaaaggaaaccagcaaggtgagtcacactcttctgtttgctggccatcaaagtttaagataacaagatggtccaaaggggttagttcaagaaataagatgatgggttctatgcttacaatttgatgtatgataatgagtgcctagagtcgttcaaaaaaagataatgagtgcctagaagtataaaatgtatttaccagagaaagatctatgcttaacactggcagactggcctagtgcacttacttggtttctctggtggtacattgtcaatgggtaaatattctgcatgtgctatttgaatcaggtttaattttagccagggaaaattgaagataatctccaacaaactgaaaatggcaatgatagcaactcagtttcccctttcctgacagtctttgacttagacgagcagacaaatgtgtcaaggattgcaaaaaggccattttattttctatcattaggtggcgagaggctgcttataatgtggttgtataaagtaattcttttttcgtttggcacgacacacttgccatgtgtggttttggaataagattgataatttagaggctcttgtttgctaatttttacagttgaagtactgaattactgacgattactggtagaaaaactgtagtaagtatttgctatgggttgttgctaagcttattataggatgccaattgttcatatgtcaacctatccgccactgattaatgccttccttttcgcactaactttattttgcaagaagctatttttggcctataatcgtatgttaggtctgaattattttgtttcattttttagatttgaaggttttgtttatcatgaggataatggtggcgtagatgctccaatggatgcggactttttattggatccaatctctaatttaaagaaaaaaacattgaagaagcgcagtgtagatgctccaaaggatgtggactttatatcggatccatctaatttaaagaaaaaaacatcggagaaggacgatgtagatgatccaaaggatgcagacttttcattggatccaatctctaatttaaagaaaaatacactgaagaaggtaggatttacatgttcacatttaggttaaagtccccagtgtatgcccattagttgttaacattaaaagctaaaccttgtttcataactaaggagagaactatttgtgctgttaaatcacactcgcacatagcctattttatatgatttttttttctttggcatcctgtatcttttacctggttgtgattgtaggtcacgagacctggacttgacgatgctgtcagaaatggtcagggcaacactcaaaatattcagacaccatcatactgcaatggagaagacaaatctctcccacttattacggcaaaacagtattcatgtcgtgaagcacttttgtcttctctcgtagttgcatggtctccagttctaccatcacctgacagaagttcttatttcacgggacattggtgcattcttgctgttggttgcaagtctgggagtgtttccttttggaaaatacacaaacctgaatactacacaatagacatcggcatggttactagagatccaatgctgatcggggttgttcaagctcatttatcatgggtcactgccataagttgggaacttttttcctcaggctcttcaaaacctttgttgcttttggcaactggatgctcagatggaaggtcagtacaacttccgtcaccactgtaaaggattttacatttttgtcatactatgtgacagctaactcttgaatttgctcttccatggttccatctctctctctttctctctctctctcgacaatttaagcataaaccactaaaattgtgatgcttccttaatcctcccaaatacctgttttactcaaaacctttcaaattcgttttctggggttttttcagctcaaagatatggctgggtgatattgaagggttaaatcaatgtacatgcgcaaaagaagtgcccttgacattagtggctgaggtacataattaccattaccctgtgttgtctattgatatacatatttgattcgatatatgactaatatccaatattctattaataaaactagctgggtaacccgcgcaattgcgcaggtatctagttgtcttaagattttgaaaaccaaaccttattgtccccttgtttctatattatttttatagttttttaaaatcacaccagttgccacccttacttgtgtcatccccttctttatttgcttgctcgatctaccactatttctattcattctctcagaacctttaaaaattaagccttataatttctagagtttattgtctcattggttccatttttataattttagaagtcccgttaaatgctgccattatactattctgcggcccgtccgttgcctccgcttttattgtcattgggatttttaaaaatcaaacataattattgtttgggtttattttttttactttatagaagtccagccaaaccgccagcggctatgtcacagtactcctctacggctcgcccgctgcctctcctctttattgtgattgagattttaaatcgaacattatcatcattgttttttttttactttttagaagttccgaacctactttttagagtttattatctcgttgggttttatttttataatttttaaagtcccgtcaaatactgacactatactcctccgcagcctgtccgctgctttctctctttattgtcacattgggatattaaaaatagaacataattatcatttggattcttttacattctagaaattctgtcaaaccataagtgactttgccactataatactttcctttacggctcgcctacagcctcccctctttattgtcgttaagattttaaaatcaaacatggttatcattgggtttattttttaccttttagaagtcccgccaacagtcgtgatcatgttgtttaacggtatgtccgtcatctctccttttaatattcagtaggattctatttggggttttattaatagtttttagatgtcccattaaccgtcaccactctacttctttacaaacatgttacttctcccatatttattgacatttgtcatctgtgttctagattttatttttttaaaaaaattccatatttttcattccgatattttttatttacaacattatactcctatttgaactcttataattatttttctattttcagaatttattttatttgttatttggaattttaattaatcttgtcatgtgttctagatgtctcttcttccaatagtatttattttttattacgaattttagttatttataaattgtatttctagttgaattcttatttttcgttttgtcatttcagaaattattttttattttgaattttaatttaatcttgcattgtgatatatatggactattctccgattgatatggaaatttctaatccccacaacgtttgtctgtgttaattaaaccgacggaccatgataaaaaacgaaatccttgcgtatttttttattaggtatagatataggttttagaacggaacaacatgtgtccaaagtgaggactaatagtagtactcggattgtttgctttgctgtatgcatatactatcgtttatgtttttctctgcagcatgcaaactctctctgttggtatgtgtttctgacacccagtgtggaaagtgctacttctaaatagagttatgccagagtttagttggcttaagaataaacactaataagagtctgattattagaggtgactgcttatttttctttgatatttagctgggaattaggcagtcatccatgggaatcggacacaaattcgtacttatgtagctaaagctagttttctatttttgtgtttgtttccaacacttacatatggtaatatgcaaattatatcagattccaaataacaaaacaaatcaagtcaaacttacatatggactgtcattaaatctctaccattaaaatctagtcatatcacaatacaacggttaatatttttctctttttctccgattaatgtgggaatttctagcccccacagcgaacgtgatgcctcctttcaaagctatcttaataatataatagattgaaatgcccatcttgcactttctagttccagctaatgcctttctgttattaaatatactgctccaaacgttgtactgtcaggtcactactgattcattagcaccagtctcgtcaatctcattatctgcaccagctcagcatcaagactcagttaatctggcaattggaagagcatctgggtcactagaagcatggtcgtggaacatatctggtaacaaaattcagaagattcatgcatgtgacgctcatgatcaagtggtaaaatttcattttaccttagtatgtttacatcttgataaaagaaaaaaaatatctaacatcaccataggtgacaggtctgtcatggggttttcatgggcattgtttatacagctgcagtcaggtgtgtttatgtcctcgttgcactttgtaattaattctgattttgtttttaaataaaaccaaagttccgttgacagtatgttaacttttctattaaagtgtaaactattttctatgttctcagtgtattcacgatctctgtctttgcaatattactagctgctgattacaaaacgtgcataaataactgatggcagattgacgggagacattgatttctgtagtattttggagttgtgttagttaagacttggaaagctgaagttttctgaaagttatattttatgttctgctgctggatcataaaatcctatgcactgtgttgacttattttcttgaaccttcaaaaaatcctgcgcactgtgttaacttattttcttgaaccttttgttacttgcttatgcataaagccttgctactttgtcaggataattctgcacattgttggatgttcaacgaaaaacatctagaagaaattcctctgcacacagatggtccggagctgaaagagtccgtagatgtaaaacatatactcaataaccctttatcctgaacatgcaagttttttcttctggttgacatctgaaatgtgcatgcagctcacagaagtatccgatcgatgttatggccttgcactagcacctggagaactaatgattgctgtggtatgctttaggctatctcttatatctgacgcatattgcttaactgtgcaacatttgtacttgagctttcatatataataagctaaaacaatttatgaatgttatctccttcaggtgcgcagcttggactcaaacttgttaaatcagatgtatcaggccaggtaattttgtttgggagttcggtatgggaagtagtgaggtctgcttggatctaattaatgatttcttttatctaacatttagaaaatccactgtcatcacaataattttgtgaataaaaacaacaggacacaaaaggcagtggttgagttcatttggattggtggtcagttccttggtattccattggacaatagcgttatcctcagtcttcagtctgccgccttatctgagactaatttcttgtggtggggatccaacattttttggtcactgaagaaatatgagaattgtgaaacagtgcttgtcttatgggatctcattgctgcactacaagggtttaagaaatctgcacctacctttcttgagacattgatgcataaatgggtgtcaggtttgttttcagatgatccacattgtgcttctatcgacatcccatcacattcaattcacaacatgtccaaagtcagctcgcggaagttgcacttgctgaatatcgtatgtaggaaagtaatgcttagtgatcaaccgcagtattctcctggtgcagaaaaaggtaatgatgtaatggctgatttgtggaacaatcttctggtaagaagtgaaagggagctgcaagagaggcttgtggctttcacttttgctgctgtcctcaaccgaacagcatatttgctcaagggtgcccctgctgaaaacagctggtttcctgttggagttgcccagatggactcttgggcatccatgaacgatggagaagtgagggatgagctcaaatttcttagaacgaggatcaatgatctaggagacaggtaaaccatttttctaacatcatttcacttgtgaaacggcatagagcatatgccacatgatagttcagtagaattgccttgaaatggcttcactgaaagtaaaattggatgttgaacctgttcagtaactgttttgcgccatgcaggatcaactcagtgtgcgagtactcagttgaagaatactgcacctactgcaatgcaccagtccccttcgagtccgcagatgttgccatgtgcagtggtagcaatcctgctactcccccagctgaagctcacaaattgtcaagatgcacagcgtcgatgcggctgtgccctgttcttcaaccaacatggcactgcgcgtgttgcgggaggacggtcgacaagctgctgccggaaatattcttcaccatgcccacatcattttgggatgtcactcatggtaacgaatcgcttgatttatcagcgccggccgtcccattttgccccttctgcggcatactgctgcagaggataaagccggagttccttctctctgtctcaccggtatagaagctagtgacactaggcagcttccagctgtaagttgtaatactgaatacgtcactaatgcactttgaatttgttgttggtggggggctgcttctaaaaacatgtgcttaaaataagcatggctggtttgcgctaggtgtggtggtgccatcataatgtaacaacccgtgtaacatgtgacatctgtaactcttggcaataaagcgggcaatatatactacttgatgtgagaatatgagatacagggtgtagagcataatgtggcaggccagatgttgtttgctgcatgtacacatgacccacaccagggaggctggaaagagcaaacagacagacaccgatgcttcccttgcaggttgcagccaacgggagcagcctcgaaagcgaagcacttgcgagagattgtggaggacgaggcagtgggtggggtccgacccaggaacctttcccggatttgaccacatgatcgatcgcatcaactgactcccatcatctccgggctcaactcctccctcctggccaggtcagatgatgaccactctcctcggcatttccgattcttgactggcttgttctctctctctcccagtaaccgatcttctcgtcgggctccgacgatcagttgcagcacgatccaggaagaggcggcgtaagccatggtggtggacagcgcgtactacgacgtcttgggggtcagcacagacgcctccgcggcagagatcaagaaggcgtattacctcaaggtgcgtggttcttggcccgagatcgagaacgctggcatatttgtttttcttgtgtttttttttctttcgtgcaatgtttgttgttgggttcatggtttcagctgttcttgcaatgtttgggtttctgtaggccaagttggtgcaccctgacaagaatcccaataaccctgatgcggagcggaggttcaaggtagattttcgcttctgttttgcgctgtgtgcgtcacagttcgatgttctaggaaaggaaacagtataggtaatggctttagacgataagacgactgaaccaaagagatggtggtagctctggtcacttctgttctcttgtgaacttttctgttctaccttttttttttcgagggaaacctccgaaaagggcaggcatgagctcatgcgattcactattagaagagagttatccagtttataaacaaaaattggacacaaaaatcttacaacggttaattagggaaaccggtgaaaactcttaatgccttatgttggtgcattcttaatgtcagtaggtagggatgcaaaccggccaacccgtgaacctactaatatgttaaataaaaggtaatccgtgggtattcatgtcatggctcggcttgccgcgtcgtaaagatataagtggatcaatccataaagctatttataggtcaaattagtaggtaacccgcgggttactcactaacagtggcggaggcagtgtgggggctggggttctttagaccccccctaaaatttaaatccatatatctattgcaagggggctaaaataaactttgtctgagattgttataaggctcaaaagactaaggagcccccactatattttatcctggctccgccactgctcactaattttgcctataagcgggttcatgggtcggcccgcttgcatccctatcagtaggccttattaattcacccactacctttataggaggattactaactaaaattggttacttctgcaaggaactgggtgaggcctatcaaatactcagtgatcctgtaagaaaggattcttatgacaagcatggaaaagaaggccttccacagtaagtcttgaatatttctgtcactattctatcaacctagatagaaattaagctccaaattctttgtttctatagaattggatcggccaaattgtaaaacaaaattcaattgcacaagcgatttgaagttttagctgcatgctgcatgtacattgtattagttattatcaacataaagctattgaacttttaaaatggcttttttagggataacatgattgatccaactgctgtctttggaatgctttttgggagcgactattttgaagattatgttggtcagtttgcactggcatctgtagcttcagtagagattgaggaagaatcagataatacagaggcaagggcaaggattcaagataagataaaagtatgatgctccagtaatgctctgtaaattgcacaacagatgttatctagtagtgctcccagccttctagtatccatctcctcaaggttggcagttcataattcatgcttaggccttaataatatctctggattacaggagttgcaaaccgaaagagagcaaaagcttgttcaaagccttaaggatcgacttcaaccatatgttgatggaatgcaggatgaatttggtgattgggcaggtgctgaagctcagcgtctttctcaagcgggtattgccctccatcttcatactcatttgcactgttgtattttttgataagcatggacatttcattcaacttttgctgctgtatgtacagtatatacactcataccactgaattttctattatgccttatactgaattgctgattgcatttgttttaattccttggtgtctgttatgaattgatttttcagctttcggtgaggctatgctccacactattggctacatttatgctcgtcaagcagcaagagagcttggaaaaagcaaaatgtatatgggtgtgccgttcatagctgaatgggtaagagataagggccaccacgtaaagtcacaggttaatgcggccgcaggtacatcataggatgctgtactaccttttcctacatcacctataatacttcttaatgagtctgaccctcggtgttctacatccctcttttgttaaagatgagtctgatcttttactgtaggtgcaatttctctgatacagctacaagaaggtataaaaaagattgagggcgacgacaaggaaggccagcttatgaagagtattgaggagaaaaaagacgcaatgttgaattctctgtggaaaatcaatgtagtcgatattgaatcaacgctttctcgtgtttgccaagcagtaagcattgtccacctcagtttttacctcatgttttgcagtactgtaccgatatgcttgaattttgagatatcttagaaataacatacaaatatggatgatcgtggcaaccattttgacttcaggttttgagggagaatactgtttccaaagatgttctgaaggtgcgagctagaggactgaaaaagctggggacaatattccaagtaagttttgcttcatctttctatcttctccagctactatggtaggtcaaaggaggattgctctaatcaccaggacttgataccgatcattctggcaaatcttgtttgcaaaccgtaaaacattgaagtttgtgttgaaactaatttggaacaaatatgtttccgtggcctgtttctgtggagaaattttgtaaagccgttgtaaatcgtcacagaggtggcaatttatataggaaactagttcagagaactactcggagtttttgtttggagggtgagagatgatgattggcatatgtaacatgtcggaggttacgaactatatgaatggtttcatacgcgtcttctctcttttcttgatgtccttttctattttgcttacctttcagactcagtgcgcgttctgctttcatgtagtcttttgtatcttcatgtcaagcactcaagctaattgctaatgctatattgccatgttgatttgaaaaacatcctcgtatttttccattggttaaccaggttgcaaaatcataatgagatttggatcccgttttccatgtgaaaccagggtgcaaaatcgcattgccggcgcgagaacagcctgcgtgttgaggctcgcgatgcagaagcaacaccgtcggattgatcaggactcaggagcagcacggcagcatcgctacaagggacaccactccgccgaggcttcattttgtgattctttttgcttttctgtaggagcatttgatattcgttgcgtccagcattccagcaaagatgttacgatgtggatagtgtgttgcaagaccgatgtttggtccatgtagccacgcaatattcttcgatattttcgagcctttgatgctttagaggtaatttggatagttataatcaggtcttgagatcttcgatggctatctgcccgggcaaagtgtacccttttactgttcacccggaaccttccagagatcaggccgcaacgtggcgcgcccggcgcttacgtgcccttctccggtcacgcgcgccgtccttacgagggcacacgtggcttgcctgcagggctgcagataccgcctgtcgcctcctgtttcctcgtacaaatacgagtccgcttccgcttcatcatcatccaatttcccatcagctcgatcgctcgtatcactcatggctcaaagagggtaaccgagttagaaactgaggaggaagcaactcgacgacaccaaccaatggcggagcacgccacgggagtgtacgggcacccgtacccgcgcgtcgaccagtacgggaaccctgtgccgccggtcgaccagtacggcaaccccgtcccggacgagccggcgccgcgcgacacggccgcggggtacgtggcgccgccggaccccgcggtgtcgactggcgactacggcctcgccggcgcggaggcgccgcacccgcacgagagcgcggtgatgagcggcgcagccgccgctgccgtcgcaccaggaggcgaggcgtacacgcgcgacggcggcggcgtagttcccccggccggcgagaagacgttcgcctacgagggcacggtcagcgccgccggcgtcacgggcgcctccgggcagctccagcccaccaccagggaggaggggcacacgacgctcggcgagacgttgcgccgctccggcaaatccagctccagctccagctcggtaacttctctttctagtcgttgtgttcttgattaattttgtcgatgggctgactgacttgatgagcgcgtgcccagtcgtcggaggatgacgggcaaggtgggcggaggaagaagaagagcatcaaggagaagataaaggagaagcttcccggcagccacaagcaggaggagcagaagcaagctggccacacggctccggcggccgggacggggacggggacggggacgcatgcagcggggaagcacgagaagaagggcatcgtggagaagatcaaggagaagctccccggccacggccaccactgagcgagagctcgcgcgcacgcactttcatcggttgacgttcgtgcaactgtccatgcatgtatgtataataccagtcgtgtttcagttcgttaattttacggtcgatgtgtggtctcggtaaaactaggtggtgtacagtgcgtctatgcatgtacggtgtatccaataatccagagtcagatctcttttaattatcctttataacgagtcacgagtgctttacgtttcgcaccaaaaaattgtcacctggcgaatcgaattcctctgagacaaccgtgcgcataactgatgatggtgtgagacaaaacgaatgtactatatgatacgtttaggcaggaccgccgattgatcggttttggtcgatcccgacgcttcacaccatggacggtcactgcgtcaagtggtcaagccgaaacaggagccgcggcggtggcgcggtgcgacggacgggaggcgaatcaaaacaactactggccgcagccgcagcccgcaagtcggagtcaagacgaactggtgggccgtaaactgaacaaccaaacaaaccgccaggaacgaaacacagagtgcgccaaccacattgcgcgcgcaacaagagactgagcggccccggcccaggagaatttgacacggcattcactcacaacttcacgccttccgctgtttcccagcgttggctttcggtagacaagtagtggctttccgtgatccgcgtcgtccatggcgacctctgtccggtggacggcaacatcgttctcggtcacagggtaagctcatgcagaccactcatggacaggttaatacccggcgtcaggcgtgcaaggaccaaggagtaatggagtatacagcgatgcactgaccgcagtatgcaatgccacaagtgtgtacggtcaaatgtttgtcacggaacgttgtcatgtttttgtgttggtactcactcccgtaaggagtacatgagccggccatgagtgtaggtgggaacacctaatttgcctcgtcttataccgtatttgttttgactgacgtgcgttaggtcgcgagaatctatccctggaaatccgttgtgtggaatttattttagagaagtatctcattctcaatatttgcttggtttacgtagagcatggaggacgcgagtggagcacacggaattaatgtgctgtaaagtatgtgaatcagaagcagcatacagttgagttacacttgatagtaatccctccgtgctcgtactcgtaaaggaagttgttttgaacagcgatacggtctccaaaacatactttgacttcttatttctataaaaatatttatttaaaagtgatatatgtatatttttatgaaaggattttcacgacaaatctattcatataatatttatattttcaaacttaacaactcaagagttattcataatttatattcccaaggtttaacttaaacattgtcctataaatataaatataagaccccctataaagggattgatcgaatcacaattcataaccagagccacattgagagataatccaaagaaaaccaaagcctagttgtcgtattctactcatctagacgtactcgatggattctatttggcatgttagagtagcctacagatcaccggttgtaacatgtgcgatatctttcccagtaatacatataaactagagtagggttattactcatctcaatgacccgaaccagtataaatcattgtcccttgttctcttaatatgatatcgtgtatattctagtaccaacgacccctatactctagtacggataccattgttgtatagcccctcgagataacaaaaaatagtacaaaaatttccacctttcaaccaggagaacatgccactagtttgtcttcgatccgtagcggctatggtgcagacggctaccggaactatggccgatgcaacggcgtgccccggcagccagctacgatcaagccgatagccagggcgcgcggtgcggttgcgcgcgacgtgacgatcaggattgcgaccgacgttgtggccaacgcggtgacacaacagtcaactttacggtccacttggtacccacaacgcgtggtccgattacacttagcatgttggctaggacggcagccggcgctacggccagcgcgtgcagtgcaactactcaacaacgacgggacggttcagcggcagtgcggcaacacagcgactgtcttggcttttggtgtcccggtagcttgtggcctatagcctcatcggccaccacctccataggccgcacccccccccctcccccaccgtcactgtcacctcagccagccgttgcacccaccccactcgtgcctccgccctttgggattgagctgagccaaatagccaagaaacccactttcatgtttggttagaataaaggacaaatttctaccatctaacaatatagattatacgtttctttaggggaaaatacttttttttcataggaatttaacgatcaagtaatgaaaagggtatggaagagattcgaattaaatttaaatttaaggatatatatggaaataagaaaaaacagggatatatggaaaaggaattaggtaaatatacacgcgtatggattttgtagtcgaataccaatccaacgcaaagattcgcgagcgcgcacgtgtttgcctcgtggcggcggaggcaaggatccaatccaagggccaccagcccagagcccagcgccccagatacgtcgccctgctacatagccgccgctgttccggttcaatccccaacagcatcacaccaatcagatcgacaatcgccgccccaccccccggccaccccacagcacggagcccttgccagtgccacctccagtgcagcttctgttcaaggaccatccccgaccacgtcgcggcaacgacaacgccgtacgcgcggcggcctctatcgtccctcccgctgctgcgcgccagggctgcgcttcaatgcgccacaggggcagcatgcatatccgtcggccgccgcgacgccatctttattcccccgttctctcgtcgcgcgcgcgcacttgttcactgtgatacgtcgcaccgtgctgttcactgttcagtcgtcgtgatcaatcaatcgatcggtcgaccccagcaagtggacgctacggtgcacgtagcgcatgcaggcgcgtatacgttatgcgagatctcgccgaactgtgcccccatttatgagtcaggtccactcgctgtctggtccttttttttctgactgctgatcagccggtgcaagacgccaagacggatcagacgtgatcagatcgatcggatgtttgcagggttcgaagctgggccaccagaaaggggggaaaaaatcgaggccgccaacgtgctgcgcacaagaaacggcggataagttttgtaagttttgcctgagccgcatgcaggtaggtgtgcaaaagcttgatcgaaggttcaaatcggatcgaactcattcatagtcataacgagctaaaccatgttagaattatagttcgtgaaattaacgagtcagatcgtgtctagctcacttgtaataaaaaaaacgtaaaatacgtaggtgatactacatacaacttataagatacacgaaatttagtcagtcatctcgtaaaattctcaaacaagttttagtcaaaaaaaaattctcaaacaaatcactcatcttgttttttttttcaaatcacataagcacagtggtggagtcaggataaaattatagcggggctaaactaaagtggaaaataaaaattgaaatatgtctcatataaattggctatatttctaatacaaaatataaatatatggattagaattttataaggtattatgggggctctaatggtacattagggtagagagtctaaagaccccagcccccaagttgtcactgccgctgcataagtacatgtgtcaagttcgctattaaattggatacatgttgatttatttttgtaagcatgaccacactcaatgaaaaaacaagccaacttcaatatgattgatactaaaatccaatttaagatgattttgttattgcttgctaagtttattgaaagcatacaagtagcaactaacataaatgaaaatacgggtgctaatatttaattttattgcttgcctataaacatgtcaacttgtcctgcccatatcactactagaaaaagtatttttactaacgtgagggccttatttttgcaggctgatatgacccttagagccaaatgaccgtctacaaaaatataaatcggggtaaaatttgatgcccgcttgcgaaaatagattttcgcagacggaccacttaagtggcgccgcttaagtggtccgcctacgaaaatagacttgaatataaatagacttgcgggccctattttttttttaagtcctcacacctctcagtcctcccctcgctccacacctctcctcccttcctcaccggcctctcccctcccctcccctctc

SEQ ID NO: 7151 - DNA, 19364 bp, Oryza sativa
aatagattagaaaacaacataatacaacaattagattttccacataccttggaacttggaagagtgagaaacagagaatcatccttctgtacagtgtgcatattgaactgaagaatagcaaggagttcggaggaggaagaaacaaatggagagggtgactgtgacgaagtgctaaaaaatgtaactgaggtaactttcggtgctataaacctaaaatcgtaaactttcagtgctaaaactgaacataatactgcctaggatcctgattgatccgcttttagctaacgtggcagagtgggacccacatgttagtgaataacacttctcttcctcctctcctctctcttcccctctcccttccatatggtcgacgtcgaccaccgcctgccagtgccgcatggcctcctgcactcaccctcccatgccaccggcctccatcgcctcaccacccatggctctgctatcaccaccctgcgcgtgtcacccgccacagcgtctccctcctcctaccccacagtcgctcccttaccgtccactgtcctcgctcacctcgccaccgctagggtctctgtcctcccaggcctctctgaccccgagctcttccgcgtggcctctagcttcctcctgacctccgtgacctcttcacgatcgacatgccatctggatgggttcccgaactaccgctcctctgctgggctccgccttttccgcttcaccaaggaggaggtccccaccaccatcgccacagcgctgctggtgctccccggtagcctggtggggcgttgctccccgccttcccctcctctcatcccgctctatggttgacggtgctctgcctcactgggaacccggtgttccatgtctccgaatcccttcttactatatagttgtaatccactacaagcattaacttctctaaagcagcctccacgtgaagccacgtcatcaacatcttgcaaccatcggatcaagtgccatcttcgttggttcagcacccatgcagaaaactcttgttgattgacccaacccaacgttttcctccgccgagggtatcaggaccgtcgtgggactgctcgcctcctcaacgtgctgcactggcacaacatcaggaaactgccggcggcgtctcccttttcaccgcaatagcatttattttcattccaatgatgcaaacactgaaacacatcaacttatttgatcaagctcgaaaagggcaattgatcgccattcgcaacagtgcacatgtattgtctatttgactattagcttatttataacatttgttgaagaaacatctgtcttccgaatgttctcaaaattggcctgacaaaattgaccttaccaatccattcatatgtctcaaagttgaccttctatcttcatatcacttataatttgttataaagatttaaatatattctttttgttcaacataacatttagaaagcaacttttacaggtcgatattatgtatatggcaaacaacttcagctggagaaaaaacatgccaatgacaaggtttgcaattattcctctatcattttggccattaaattactattgtccatattaattgttctatcactaacccatctggcctaacatactgacagttgttttttcatatattttttttgacttgaagttgttttttcatatattgtattatgacacctttgtattatcattaaacttgaaacgtcaaccttttagtaaccctattttatcagaattggtcacttttcattcatacaaactatcgtaagcaatctttagttcatcacttagaatccccgccgcaacgcgcggggtatcacctagtatataaggtgatgaggccggatatctcttgaagtttttttttggttgtggtggtagttggggggggggggggtaatacgtaagggaaattcgacaaactattgttcaatatcttccttgtggttttcgaattatggaccaaggttgtgctcgatcgacgagcgaaatctcagatgattcaacattttccgtgtggtttccgaattagctagcttgcactatacgtgctatttttatcacgtttgtaataaaatgcaccggtccagctcacaacaaagtcatttattttcaatagacagggagacccaactctacagctcaattataatttcaaaataaatgatttaaagtccaaatagcatgtcaaaagcattaatcaaatagaactttcgaaaataaagaaatccaacgaaaagcatatggtttaaatgaaaggatggaaaatgaagcaacaaaatgtgcagctcacgaaaagttaaatttttaaaaagaaaatcagagagattgatgggtaaccttttgagctaccctaaaggaactaagattttatccatctagattgggctacacaaattcgacaaccaggttacctactgtttttaggttgggactatgcagtgttttatgaatttttagaccatgatgcaaagactcaaaaaatttagccaaaattcgtggagtctgctgggtatgtctacaagctactgttaaaagatagcatgattatcttttacggtttggactacataaaaagaagaacgccgctgtctaaagatttcagaacacggttatgcacactaattgagtttttaccctatgatacaaaggtccaaaaatcacaccaaaattcatgatgcctattctacatgttccttgtaaaaattctcaggtctatcgtctacggtttagcctaggcaaaattaacagactgactcgaaattccaaaacacgatcaaccgacacagaaagaaacttcattcatgttttaagttacctaaattcctcatcttttgtttacattaggttagggtggtacagaggctatgtgaattttgggtggtccatctaagcaacaatctacaggtttaagcacaacaattttatccttcacaaactacccattctagaccatgtcagtaaaatttgaaatgtcggaagagaggagttcaaaatctaccaaattcattttttttggtgcagagataacataaggagatggaaaccatatcatgtctttcaagatttaaattttatccatccattttcaaatcctataactagaggctatttttaacccgatattttgcaaatccgtactagtacataggtgattgcaaatggatttcaaaacttttcaaaacactttggaactgattttttatgattaataagtgttttcaaactcattttcactttagtacaagctttcaaaaggtctcggtcctatagagcaagataagagttttcaaaatcaaaatagagacctagaggaaagtaatctctagagagggatgatatataaggttgaatatgattttcgcaaaataatttgtagctgagagcaaaaccctcaaaataattttaagaaaccattctaaacgaccaacttaaggggttcctatagttggtattagctctggtaccatgcctgtggaggacacctgaactttacattatatctgccaattgaagtgaacaattcaaatcaagtagcaggcataatgtaaaatccgaagcctcaagtaaaggatataggagacattgctgggactttagcttgccagttaacttcagcctgagatgtgtccgtcaaaccacacgaaggcagtgactagatgtgttacacattcaggaaacttgacgaaaatagctaaagctctacgacatcccaaatatcctaaacccttactcatgtggaactagttcctaggatatccactagcttcacactttcatcttaagcaatgatacacagaagaaaatacaagacaaacaaaattcaattacaactactttagttatacataggccaactagccaaataatcagagattcgcgcaagcttgcctacccaaacaacaagcaaaccgactagggggttgaccccaattagaatctaattcctagaagaaacggttgaaacccgcatcactcaataaacactaagcatacaacctacaaaaatggatactctagtataacaagagtcagtacatcattagaaataatgtactgccaagcctaaagcaattctaacatattacatgcagggcatatattcaaggaaggctatatgtagttaaattttagcgtaaagcaagttttggttcacaattcctttcaaaggagttgatgattcaattaacaaaacaaattctgtaattatatcataaagaacatcatagtaccatcataagcatagctgccttccttggcaaggcataatatcatcatcacacgcgcacacacactcaacacaacacatttcaagagagaaaactagaaatgtttgatacacgcaaaccatgattttcataaaggcttggatgtgcaacaaaatgcatggatgagaaatgaagcgtaacgaagaaaccaataaatcgttagggacaagcaaactatgatttgcataaaatcagtaagctgcaatcaaatgtagacgtctagctcgcaaccaagatattcttcgataaacagggtaacataactataaaaattaaattagttataagtctactattaaaacgtcggagcacaaaaaagccgcaaggattaaatacaagcaaatattttcttttcacaaactagtaagcataagtttatacaaaatttcacaaactaaaataaagctttaaagtccaaagagaagttccaaaaagagaaaaattgtaactgaagaaatcaaacttaaagtaccaagttgaaatttaatgttgaaaaaaaaaccgttacgcgagaaacaaaagtaagattcaacgaaaggacggaaaatgaaacatcaaggaagaaacctagaatcatttgatacaaaaaagccgcaaggtttaaatgcaagcatatattttcctttcacaaacaagtaagcatatgttcgaacaaaattttcgaaagcgtcaacggagaaaccaataaattgttcggacaagcatactacgattttcataaaaccaaatagcatgtcaaaaacattaatacaatagaactttcgaaaataaagaaatccaacaaaaataatatggtttaaacgaaaggatggaaaatgaagcatcaagggagaaaactagaaatgtttgataaaatgaaaccatgattttcataaaggcatagatatgcaacaaaatgcaagggtgcagctcacgaaaagttatggattaaaaatgaagcgtcaacggagaaaccaataaatcgttccgaacaagcaaattacggttctcataaaatcaataggatgcaaccaaatgtagatgtctagcatgtaaccaatatattattttccgataaataggaacacgaaactcttgaacttagtctaaagtctacgattaaaacgccagagcacaaaaaagccgcaaggtttaaatgcatgcaactatttccttttcgaatatgggtcagcctacttaggaattcatattatttatgtggctcttacgatgattttgtctttggtgggggtggtatgagaacctatccttgtttggttggtggaatacgatctaaggtgtcatggctatgttgttttctaataacattacgatattattgattttaaatgtttataaaacttttcaagaatactagatttagaatctctaaccattaggatgtaacaaggttcaagtcttcatggtctacagtcatgatctaaccttgttgatctcacattcgataaatttaagttttaggacagcaagtaaggcggttgggaaaataaggataaattgaacaaaactttgggttacatcttaggggttggcaatatttgttctccgggtgctaattagtcatatgcaatctaatccaaggtgttctaggaatatttgtcgagtcatattggatgcatcaggacggtctcattatgtgcatccataaacttgggtcgtggtagaaaacgggatgctatatggcatgtatagcaataacttttctttttctcaaaaaggcaaggatgtatgtatgatgtcatgatgaatgaaatgatgcgatgcatgtatgatatgatacaatgcttatggagatattttgtattgcatacatgccatagaacaatcctttcgggaaaattgttcttgagactattgatcctactcatggtttttcatgggcattggaatggttgtaactctttatacgctataggctaggataaggtgacaaaattaaacatttttttacctagactcgtaacaaagttctccttatctaggaaagagatggtaattttaaaacaaatggattatcttagagaagttttcaaaacctaaaagtgaagttcctaaaccatgttgtgagttgctacgatgtacaaatcttgcatccgaccgtaaagggtcacaaaatttgcacactgagccatctcatcttaaattacatagtttgcttacgacttgttcctagtatgatatttccatttaggcttgtgggggcttgcaaaggttacatgttgtctctgggtttgtaagttcatggcactctatcccccttaaaataaaataaaattttgcaatggggtttatcaagaaatttaaatggaagagctaaataggtctatgtgccatatgctgtactatccagtcccgaggcgcaaactgaagcaaaagactatgctagatgggtgataaattagaaaaaaattatatccatgatcctaacaaagttttctcctatctgggaaggaatgttgattttttggacaaatagattattttagagaaattgggcaagacaagtgatgcagtgctggaatttatcggtctactatctttacctaatttttaggtaagttctaaaggttcataagaaatttttaaaaagaaaatcagagagattgatgggtaaccttttgagctaccctgaaagaaccaagattttatcccttctagattgggctacacaaattcgataaacaaagtatttttttttcgataaacaaggtaacgtaacaacaaaaattaaattagttataagtctactattaaaatgccggaacacaaaaaagccgcaaggtttaaatgcaagcaaatattttcttttcacaaactagtaagcataagtttatactacaaaatttaggaaattgagatttcaaaacgaaaataaagctttatagtccaaagagaagttccaaaaagagaaaatttgtaattgaagaaatcaaacttaaagtaccgagttgaaacctaatgttgaaagaaaaacccgttacgcaagtaagattcaacgaaaggacggaaaatgagttataagtcgaaaatgaaaatggtagagaacaaaaaagcccaagatttaaatgcaaggaaatattttcttttcactaactagtaagcataagttcaatcaaaatttaggaaatctgatatttcaaaactgaattaaagctttaacgtccaaagagaatatcaaaagcattagtaggagagaaagttcgaaaacaaagaaatccaactaaaagcgttcagtttgaatgaaaggacggaacattgaagcgtgaagggacaaacctaaaaacgatccatacaaggaaatcaagatttttatagaagcttcaaggtgcaacagaatgtatgggtccagtttacaacgatgttatttgttttcaataaacaagaagacgaatccaaataactcaattaataagttcaaaattaacgtcagagcaaaataaaacggtcaggcttcaatgcaaaagaatattttgcttttataaaacagaaaaaaaaagttcaaacaaacttaaggaagattaaccgtgacaacgaaaaaaattgcaaactccaaaaaggatatttgaagaatcaatgcaagaagaacattacaaaatcaaggaatccaactaaaagtacaaaattttaaacttatggataaaaaataaagcgtcaacgaagaacccataaatcgtttggaacaagtaaactacggttttcataaaatcaaaatgatgctaccaaatgtagaagtctagcccgcaaccaagatattttttcgataaacagggaaacgtaactctagaacttagttataagtctacgattaaaacaccagagcacaaaaaagccgcaaggattaaatgcaagcaatattttcacgaaccggtaagcataagtagatacaaaatttaggaaattgagatttcagaactaaaataaagttttaaagtccaaagagaagttccgaaaagagagtacctagttgaaattcaagtgtgaaaaacaaccgtcacttgagaaaccaaaataaagttttaaagtgcagttagcgtgtcaaaagcattaatacaagagaactttcgaaaataaataaatccaacgaaaagcataatgtttaaaggataggttggaaaatgaagcatcaagggagaaaactagaaatgtttgatacaaagaaactgtgacttttataaaggattagatgtgcaacaaaatgcatcggtccagctcacaaaaggttatttgttttcaataaacagggagacccgactctacaactcaattataagttcaaaattaacgtcggagcaaaataaaacggttaggcctcaatgtaaaatgaatattttgttttgttaaaccagaaaacaaagttcaatcaaactttacgaagacgaaccgtgacaaccaaaaaaaaaaggaaactccaaaaaagatatttgaagaatggatgcaagaagaacgttacaaaatctagaagcgtcaacgaagaaaacaataaattgttagggacaagcaaactacgattttcataaaatcagtaagatgcaaccaaatataacgtaaacccgcaacaaagatattttttctcgataaacagggtaacgtaactatagaaattaaattagttataagtctactattagatcatcagagcaaaaaaaaagccgcaaggtttaaatgcaagcaaatattttcttttcaaaaaactagtaagcataagtttatacaaaatttaggaaattgggatttcagaactaaaataaagctttagagtgcaaatagaagttcaaaaaaagagaaaatttgtaattgaagaaatcaaatttaaagtaccaagttgaaacttaatgatgaaaaaaatcgttacacgagaaagaacaggaaatatttaaagtccaaatagcagaacgttaaaaaaaaagcaatccaactaaaagcataaagtttaaatgagaagacggaaatgaagcgtcaagggagaaacccataaacgtttggtacaaggaaaccatgatttttcatgaacttaaggaagatgaactgggacaacgaaaaaaaaaatggaaacaccaaaaaggacatttgaagaatagatgcaagaaaaacgttacaaaatcaaggaatccaactaaaagtaaaaaacttaaacttatggatgaaaaataaagcgtcaacgaagaaccgataaatcgttcgaaacaagcaaactaccgtcatcataaaatcattaggatgcaaccaaatgtagacaaaaaataccaagttgaaacccatggagtaatataaaaaaaaggtcacacgagaaaccaaaataaagtattaaattccaaatagcagatcaaaagtattaatagaggagattgttcgaagataaagaaatccaactaaaaacataaagtttaaacgagaggacggaaaatgaagcgtcaagggcgaaacctagaagcgtttgatacaaggaaaacgtgattttcaaaaaccttcaaggtgcaaaaaaaaaaaaatgcatgggtccagctctcaataaagttatttgttttcgataaacatggagacccaactatacagctcaagtattcaagttatttgttttcaataaacggggagacaaaactctacaaatcaactaaaagatcaaaattaacgacaaatcaaaataaatcggtcagagcttaatgcaaaagaatattttgtttttataaaccagaaaacaaagttcaaacaaacttaaggaagacgaaccgtgacaacaaaaataattggaaactccaaaaggatatttggagaattgatgcaagaagaatgtttcaaaatcaaggaatccaactaaaagtacaaaatataaatttctcgatgataaatgaagcatcaacggagaaaccaagaaatcgtttggtacaaccaaactacgattttcataaaatcaattagatgtgaccgaataaagacatccagctcgcaactaaatatttttttgataaaaaaaggagacgtaactctagagtttaaatataaggcgaaaattaaaacgtcagagcacaaaaaagccgcaaggtttaaatgcgagcaactattttttttcacaaactagtaagcaaaagttcatacagaatttaggaaataaagctttaaagtctgaagagaagttccaaaaagagaatctttataattgaagaaatcgaactaaaagtaccaagttagaacttaatgatgaaaaaaatagatcgtcacgcgagaaaccaaagtaaagttttcataaaccaggtatcaaagttcaaaccaacttaaggaagacgaacggtgataaccgaaaaatttggaaactccaaaaaggatatctgaagaatgaatgcaagaagaacgtttgaaaataaaggaatccacttaaaagtacaaaatttaaaacttacggatgaaaaatgaagtgccaatggagaaaccaataaatcgatcggacaagcatactacgattttcataaaaccaaatagcatgtcaaaagcattaatacaatagaactttcgaaaacaaagaaatacaacgaaaataatatggtttaaacgaaaggatggaaaatgaagcatcaagggagaaaactagaaatgtttgataaaatgaaaccatgattttcataaaggcatagatgtgcaacaaaatgcaagggtgcagctcacgaaaagttatggattaaaaatgaagcgtcaacggagaaaccaataaatcgttccgaacaagcaaactacggttctcataaaatcaataggatgcaaccaaatgtagatgtctagcctgtaaccaagatattgtttttcgataaatagggacacgaaactcttgaacttagttctaagtctacgattaaaacgccagagcacagaaaagccgcaaggtttaaatgcatgcaagtatttccttttcgaatctgggtcagcctacttaggaattcatattatttatgtggctcttacgatgattttgtctttggtgagggtgttatgagaacctatccttgtttggttggtggaatacgatctaaggtgtcatggctatgctgttttctgataacattacgatattattgattttaaatgtttataaaacttttcaagaatactagatttagaatctctaaccatcaggatgtaacaaggttcaagtcttcatggtctaaggtcatgatctaaccttgttgatctcacattcgataaatttaagttttaggacaacaaggcgattgagaaaataaggataaattgaacaaaactttgggttacatcttaggggttggcaatatttgttctcctggtgctaattagtcatatgtaattctaggaatatttgtcgagtcatactggatgcaacaggacggtctcattatgtgcatccataaacttgggtcgtggtagaaaacgggatgctagatggcatgtatagcaataacttttctttttctcaaaaaggcaacgatgtatgctatgatatcaagatgaatgaaatgatgcgatgcatgtatgaaatgacacaatgcttatgaagatattttgtattgcacacatttttttttgatggaaggcaaaagctcatgccatacatgccatagaacaatcctttcggaaaaattgttcttgagactatttgtcctactcatggtttatcatgggcatgggaatggttgctactctttataggctttaggctaggataaggtgacaaaattactttttttttactcagactcgtaacaaagttctccttatcaaggaaagagatggtaattttaaaacaaatggatcatcttagagaagtttgcaaaacctaaaagtcaagttcccaaaccatgtttgtgagttgctacgatgtacaaatcttgcatccaaccgtaaaggggcacaaaatttgcacactgagccatctcaacttaaattacatagtttgcttatgacttgttcctagtatgatatttccatttaggcttgtgggggcttgcaaaggttacatgttttgtctctggtttgtaaggtcatggcactctattccccttaaaataaaataaaataaaattttgcaatggggtttatcaagaattttaatggaagagctaaataggtctatgtgcccatatgctatactatccagtcccgaggcgcaaactgaagcaaaagactatgctagatgggtgataaattagaaaaaaaactatattcatgatcctaacaaagttttctccaatctgggtaggaaaggtaattttttggacaaatagattattttagagaaattggtcaagacaagtgatgcagtgctagaatttaccggtccactatctttacgtaatttttaggtcaagttctaaaggttcaaaagaaatttttaaaaagaaaattagagagattgatgggtaacctttttgagctaccctaaacgaaccaagattttatcccttctagattgggctacacagattcgataaacaaggtatgtttttcgataagcagggtaacgtaactatagaaattaaattagttattaccctactattaaaacgtcggagcacaaaaaaagccacaaggtttaaatgcaagcaaatattttcttttcacaaacaagtaagcatgcgttcaaacaaaattacagaaattaccattttagaagtaaaataaagctttcaattctaaagagaagtttcaaaaagagaaactttgtaattgaagaagtcaaacttaaagtatcaagttgaaacttatttttaaaaaaaacccgttacgcgagaaacaaaagtaaagattcaacgaaaggacgaaaaacgaaacataagggagaaacccaaaaacgtttgatacaaaaaagccacaaggttaacatgcaagcaaatattttcttttcacaaataagtaagcatagattcaaacaaaattttggtaatttacattttagaattaaaataaagatttaaagtgcaaagagaagttccaaaaagagaaactttgtaatcgaagaaatcaaactaaaagtaccaagttgaatctgaacaatgaaaaaagaaccgtcccgcaggaaaccatagtaaagttttaaagtccaaatacacatcaaaagcatgaatacaaaaggctaataaatcgttcagaacaagcaaaaactgcggttttcataaaatcgaaaggatgcaaccaaatatatacgtctagcccgcagcaaagatattttttcgataagcagggaaacgtaactctagaacttagttataagtctacgattaaaacgtcatagcacacaaaagagccgcaaggtttaaatgctagaaatattttcacaaaccagtaagcacagtacatacaaaatttaggaaattgagatttcagaactaaaataaagttttaaagttcaaagagaagttccaaaaagagagtaccaagttaaaattcaagtgtgaaaaaacaaccgtccctcgagaaaccaaaataaagttttaaagtgcagttggcgtgtcaaaagtattaatacaagagaactttcgaaaataaataaatccaacgaaaagcataatgtttaaacgatagaacagaaaatgaatcgtcaagggagaaacctagaaatatttgatacaaggaaaacatgattttcataaaagctttaaggtgcaacaaaatgcatgggcccagctcataacaaagttatttgttttcaatacacagggagacccaactatacacacaactataagctcaaaattaacgtcagaataaaataaaatggttggtcatagcacaaaaaagccacaaggtttaaatgcaagcaaatattttcttttcacaattaagtaagcataagttcaaacaaaattacaaaaattgccatttcagaagtaaaataaagctttcaactctaaagagaagttccaaaaagagaaactttgtaattgaagaaatgattcaacgaaaggacgggaaatgaaacgtcaagggagaaacctagtaacgtttgataaaaaaagccgcaaggtttagatgcaagcaaatattttcttttcacaaacaagcatagattcaaacaaaattttggtaatttacatttcagaactaaaatagcatgtcaaaagttttaaagtccaaatagcatgtcaaaagcatgaatacaagagaacattcgaaaataaagaaatccagcagaaagcatacagtaaaatgaaaggatgtaaaataaagcgtcaagagagaagcctagaaatgttttatacaaggaaactgtaattttcagaaaagattgaacgtgcaacaaactataagggtccagctcacaaaaaagttagttgttttcaataaactgggagactcaactctagaactaacggcagagcaaaacaaatcggtacggcttaaagcaaaagaatattttgtttttataaaccagaaaacaaagtccaaacaaacttcagaagatgaaccgtgacaacaaaaataattggaaactcaaaaaaagatatttgaagaatgtttcaaaatcaaggaatccaattaaaagtacaaaatataaatttctcgatgaaaaatgatgcctcaacggagaaaccaagaaattgtttggtacaaccaaactacgattttcataaaatcaataagatgcaaccgaatgtagacatccagctcgcaaccaaaatattttttttttgataaaaaggaggcgtaactctagaatttaattataaggccaaaattaaagcgacatagcacaaaaaaaccccacaaggtttaaatgcacacaaatatgttcttgtgaaaaattattaatcataagttcaaacaaaatttcagaaactgagatttcagaactaaaataaagatttaatgtccaaagagaagataaagaaagagaaactttgtaattgaagaaatcaaactagcagaactaaaccgaaactcaaggatgaaaaaacaaccatcactcgagaaaccaaaataaagttttaaagaccaaatagcatgtcaaaagcattaatacaagagaacgctcgaaaataaagaaatccaactaaatgcagtaggtttaaacgaaaggacaaaaaatgaatcgtcaagggagaatcctagaaatgttcgacacaaggaaaccttgattttcataaaagcttcaaggtgcaacaaaatgcatgggcccagctcacaacaaagttatttgttttcgataaacagggagactcaactctacaactcaattataagagcaaaataaatcaattaggcttcaatgcaaaagaatattttgtttttataaaccagaaaacaatgttcaaacaaccttaagatgaaccatgacaacagaaaaaaattggaaactccaaaaaggttatttgaagaatcgatgcaagaagaacattacagaatcaaggaatccaactaaatgtaaaaaaattaaacttatggatgaaaaatgaagcgtcaacgaagaaacctataaatcgttcggaacaagcaaactacggttatcataaaatcaacaggatgcaaccaaatgtagacgtctagaccgcaaccaagatattttttcgataaacagggaaacataactctagaacttagttataagtctacgattaaaacatcagagcacaaaaaagccgcaaggactaaatgcaagcaatattttcacgaaccagtaagcataagtacataaaaaatttaggaaattgagattacagaactaaaatatagttttaaagtccaaagagaagttccaaaaagggagtacctagttgaaattcaagtgtgaaaaacaacgtcactcaagaaaccaaaataaagttttaaagtgcagttagcgtgtcaaaagcattaatacaagagaactttctaaaataaataatcgaacgaaaagcataatgtttaaacgataggttggaaaaggaatcgtcaaagggagaaaactagaaatgtttgatacaaggaaaacgtgacttttataaaggattagatgtgcagcaaaatgcatcattccagctcacaaaaggttatttgttttcaataaatagggagacccgactctacaactcaattataagttcaaaattaacgtcagagcaaaataaatttgttaggcctcaatgcaaaatgaatattttgttttattaaaccagaaaacaaagttcaaacaaactttatgaagaagaaccgtgacaaccaaaaaaaaaattggaaaccccaaaaaagatatttgaagaatggatgccagatgaacgttaaaaaatctagaagcgtcaacgaagaaaacaaaaaatcttgagggataagcaaactgtgattttcataaaatcagtaagatgcaaccaaatatagcataaacccgcaaaaaagatatttttttcgataaacaggataacgtaactatagaaattaaattagttataagtctactattagatcatcagagaaaaaaaagccgcaaggtttaaatgcaagcaaatattttcttttcaaaaaccagtaagcataagtttatacaaaatttaggaaattgggatttcagaactaaaataaagctttaagtgcaaagagaagttcaaaaaggagaaaatttgcaattgtagaaatcaaacttaaagtaccgagttgaaacttaatgatgaaaaaaaatcgttacgtgagaaagaataggaatgatttaaagtccaaatagcaaaacgttcacaaaaagaagtaatccaactaaaagtataaagtttaaatgagaagacggaaatgaagcgtcaagggagaaacccataaacgtttggtacaaggagcgatttttcatgaacttaaggaagacgaaccgtgacaacgaaaaaaaattggaaactccaaaaatgacatttgaagaatagatgcaagaagaacgttacaaatcaaggaatccaactaaaagtacaaaatttaaacttatggatgaaaaataaagcatcaacaaagaaccgataggataaatcattcggaacaagcaaactacagtcatcataaaatcaataggatgcaaccaaatgtagacagaaaataccaagttgaaacccatggataaaaaaaaaggtcacacgagaaaccaaagtaaagtattaaagtccaaatagcaaaccaaaagtattaatagaggagatcgttcgaagataaagaaatccaactaaaaacataaagtttaaacgagaggggcaaaacctagaagagtttgatacatggaaaccatgatttttcaaaaaccttcaaggtgcaacaaaatgcattggtccagctctcaataaagttatttgttttcgataaacatggagacccaactatacagctcaagtattcaagttatttgttttcaataaacggggagacaaaactctacaaatcaactaaaagatcaatattaacgacaaatcaaaataaatcggtcagagcttaatgcaaaagaatattttgtctttataaaccagaaaacaaagttcaaacaaacataaggaagatgaactgcgacaacaaaaataattggaaactccaaaaaggatatttggagaattgatgcaagaagaatgtttcaaaatcaaggaatccaattaaaagtacaaaatataaatttctcgatgataaatgaagcatcaacggataaaccaagaaatcgtttagtacaaccaaacatcataaaatcaattagatgtgaccgaataaagacaaccagctcgcatccaaaatattttttcgataaaaaagaaggcgtaactctagaatttaaatataaggccaaaattaaaacgtcatagcacaaaagccgcaaggtttaaatgcgagcaactatttatttttcacaaactagtaagcaaaagtccatacaaaatttaggaaatggagacttcagaactaaaataaagctttaaagtccaaagagaagttccaaaaagagaaacaatataattgaagaaatcgaactaaaagtaccaagttgaaacttaatgatgaaaaaaaagaccgtcacgcgagaatccaaagtaaagttttcataaaccagttatcaaagttcagaccaacttaaggaagacgaacagtgataaccgaaaaatttggaaactccaaaaaggatatttgaagaatcaatgcaagaagaacgtttgaaaataaaggaatccaactaaaagtacaaaatttaaacttatggatgaaaaatgaagcgccaataaagaaaccaataaatcgttcggacaagcatactacgattttcataaaaccaaatagcatgtaaaaagcattaatacaatagaactaaaaataatatggtttaaaaaaggatggaaaatgaagcatcaagggagaaaactagaaatgtttgataaaatgaaaccatgattttcatcaaggcatagatgtgcaacaaaatggaagggtgcagctcacgaaaagttatggattaaaaatgaagcgtcaatggagaaaccaataaatcgttcggagcaagcaaactacggttctcataaaatcaataggatgcaaccaaatgtatatgtctagcccgtaaccaagatatttttttcgataaacagtgacacgaaactattgaacttagttctaagtctacgattaaaatgccagagcacagaaaagccgcaaggtttaaatgcatgcaactatgtccttttcgaagatgggtcagcctacttaggaattcatattatctatgtggctcttacgatgattttgtctttggtgggggtggtatgagaacctatccttgtttggttggtgcaatacgatctaaggtgtaatggctatgttgttttccaataacaatacgatattattgattttaaatgtctataaaacttttcaagaatacttgatttagaatctctcaccattaggatgtaacaaggttcaagtcttcatggtctacagtcatgatctaaccgtgttgatctcacattcgataaatttaagttttagtacagcaagtaaggcggttgggtaattaagaataaattgagcaaaactctgggttacatcttaggggttgacaatatttgttctccagttgctaattagtcatatgctatctaatccaaggtgttctaggaatatttgtcgagtcatactggatgcatcaggacggtctcatta

SEQ ID NO: 7152 - DNA, 1310 bp, Oryza sativa
gcggccaccgcaccggccggccggccgccggcatgcatgccgcgtccgggtgctcttatcatcgtatgccccaggtactcctcgggctcgatccgtgatcctgcaaaattttttgggcggttgccgtacgcggccggatctacaacgacggtgagtcggtgacgcacgcacgcgcgtgtgtacttgctgtacggattccctcttgctttgtacgaagagtcctttgatttgtcctgctaattttgttcgtcttttccaagggatcccaactcccaactgccttttcctttcttgggattacaaaatactaactgtatttactgtgacattgactgattttgattggttccaagagatggatcttggaaataaccgacataaaatttgcatggatctactgatttcccctcagatctgcgcgcatctctcgttcaattccttttcttactgtagctctcaagattggaatgttcgttgcatcagcttaattagaggaggtgacgggaagaggaaagaaatttccctcagatctgctaattactccttccatctcactaaccaccagatcgatcaggtcagtagctagctattgctgccacagatttcttgtgtgtcctctacttgttcagttctacacgtgtcgctgctgcttgaagtaattgcgtgatagaacccctgtctcctgaatcctgatagctccagaaatagtagggactaggtcactgtccacttactgttctattggtgacgtctcgtacttatctctacaatgcaagccgccgtacttatctgcagtgccactgtccccccccccccctccctctctctctctctctctctcaaaggaaaacttcccaaatcaaaacaaattttgcgcaaacctgcaactatgtacatacattagcttcaaccattttggtttaggggagatctagctggatgtggaatcttgttagtcttaatcttttaagaaaaaaagaactctcttcggtttttgtttcattttcagcttactagaaacaaatggtccggttgtttctcttattctgtttaaccagataaagtaaattcagaggttttattatggtgctaaacatatctatcaattgatggttcctgcgcccgaagtaaagttcgctttttatttcattcgtcactttgactgtgaatgccatgttctctcttgatcagtttattttcaggagtactagactactggttgatatatgtaaatatccatatctagtagagaggagatctagctagctaatgcaacatcttcatgtcttttaattcttttaacacagtta

SEQ ID NO: 7153 - DNA, 5888 bp, Oryza sativa
ccgttgcattgggttacacaagaagatattacgttgtagatgtttattgcatgaaagagtaatatgatctagttatttcgttgacagatatgtcgaccaaacaaatattccaagtttaccatggaccaggaaacgtccgttacgggccactggggtagatctgtcagattttattgtatcagaaaggggaattgatagaccggctgagaggagtgtaccttctataaaaggatggttaatgaggggcttgagagttgatccacagacaagtgacataacaatcaatgttatagtaagtcgggcaactgagggtttttattgggaactaatgccagttcaaaactctcgaatgtggagatggtatttggaaaatgcattgcaacgcgggtggcctctagctttggttccgtttgttcacccgaaggatccaggtgtgcagatgaaaatggatgatggcgagggaccaagtgctgaagtaaatgagacttctgtggaagaggtcaacgcacgagaggacgggggcgtagtagctccagtgggcattcaaccaggtggagtggccgacgagggggagactgtcggtgccattgtggatgaaatggagagggaggattctgacaacgagcgtgtagaggaaggtgattcgtcagatgatgagacggatattaatccagcagaatgggctagtgaggatttttctgggcttatcgtctctgaagaggatagtgtgagatgggagtacaaagaaaatgaggttattcagggagcgatttatagtagagcagaagatatgaaggaggcggtaaaacattttgcagtgtcacttcatagagagttttgggttgccaagtcgaaccggtctcaatataaagttcggtgtgttaaggaaaaagatggttgtccctggagagtgcacgtgtataaggggaaatggaagaattattggacagtgtcagtcgttaccaagcatacatgttttctacctggtgttcagaaataccacaggaacattacatgtgcatttgttgcatctgagatatatgcgcatgtcgtcgataatctcacatatgaaccaaggtcaataatccgacacatcgaagagacatacaagtatactattagctatgccaaggcctggagggccaaacagaaaataatagagatgagatttggaacttacgaagcctcgtatgacaatttgccacgcctgcttggtgttatcgaggaaagaaaccctgggagctcttacgaagtgaagaaattcccctcaattgaacatcctggcaagagtgtgctgcaaagggcgttcttagctctacatgcatgcaagatggcatttgtgaactgttgtcctgttctctgcattgatgggacattcatgacaggaaagtatcggggccagatactaacagcaataggggtagatgggaacaatcaggtattgcccttggcatttgcttttgttgagagtgagaataccgacagctggtactggttcctgaaattggttgaaacaaaagttgttggtatgaggccaaatgtgtgcctgatacatgataggtacgctggcattctgcgagcgatagaaaagttgcagtttgggagtatggaacgaggataccccggtgtttgggaagatgtacagagtaggtggtgcatgcgtcatatgggagctaatttcttcaagcaattcaagaacaaggagctcatgaacatgttcaagaggctgtgcaaccagaaccaggagaaaaaattcaatgagctttggaagagattagatgagttgacagccaaatgcagtgatcagcgtgcagcggctccatcgaccgccgttgctgaccctcctcaagctcttggacctctcccaacggatagtccaacattggttagaagaactggattggagattcggaaattttctcaatggattctgcatgaaccaaaagagaaatgggccaaggcgtatgacacaggtggtgctagatatggaataatgacaacaaatttggtagaagtttacaattgggtgatgcgcggtgtccgtggactgccactagttggcatagtggagttcattttacatgggacatgcaggtattttagggatcggttccaggcagttcttccctctatgccgaacaacagcattttgtttggaactttcatgcagaaaaagctagaggagttgcgtaaaaaggccatgaaacatcgtgcactagtgccaggtacccaacagcacaggtttgagatactatgtcaagataaggcaggcaggggtatctaccgcaagagagtgaagcagaagtgtgttctcaaagccgacggcacatgtcattgctcttgtgcaaagccaaagctgctccacaggccatgcacccatgtcattgctgccgcagcggagtgtggcataccagatgcagtatatgtgtcacagtacttcagtaagcaagcaatatatcatacatggagcggcgagatttatgggttcggcatagctggggaggtcacagagactaacgatgaagtactcaatattcctgacccatcgaagctccgaagcaaggctggaaggaggaggactcgtcgcatccacaacgatatggacgagttggaggctggcaaggtgaagcgttgcagcaaatgcgatgaacatgggcacacctacaagcattgtcctaaagacaaggagaaaccaagtgcggcggaggcaggactatcaggatcagcagcagatggagctcgccctacgggtgaaggcactacctccactcgaccacgtcctaggcgtcatcgtgccacgtctggctacgtggtgtagttcttatgttctatgttggcatgtggctttgtttgtaattcgtttcgaacttatcgatgtgtttatgtttcgtcgtgtaatgtcagacttcggcatgtcatgtcttttggtctcgtgatgtaacgtcagactaaggcgcctaacgtctttaggtatgctgatgtatgtcggacttcgacacgtaatgttatgatatattatcgagctctacatatatgttaaattgcatgtcatcgttatgtaccattagtaacgtttgctatatttaaatagcctgtactcttgttgtacataattattctcatgactttattactatttcataattttgcaagttatcttttgttttacattactactttctgaattgttctaacacgaaacactatattttccagagatggcacgtcaggatacacctcagttgttggacccggcgatagatcaccgacaccggtctcaccttcctgcggtgcagggggctcagcttgggacgttccgggcacggacgtgcggtgagctactcacggttcacgactcctttatcgagaggtacgaacagtgtatcactataagttagttgcgctgtaatattttttataatgacgcattaatttgttattgtaggctgtgtgaggccggcctcctaccgatgtgtcggctggtggaggctgctgccggcgacgcggacccggccagacgatggattgacaggtccccgtccagctgcgcacgttcctaggccgactccccctccgcacggaggtaagtatttttattactatttctgtacatgcctcgcacatataagtgagccgtttcacttgccgattgcttcagggtttcgtgcaccgttcagcaccccgccttcctcggctaggccttctgttgtgccccccacaggtacttaaaaaaacaacattacttcgacaatcaatttacatgcattttatgtcttagcttacaagggtcccgttgtcgatgtgtaggtttcgcctagttcgctatgacgcaggccgcgcacttctcccaggctgcagggtcagcgtctcaggcagctgcgtcgacctcgcactcagcgcagttctagcagtacaccgggacttcgtcacaggtagccggcacgtcgagtcagggtccaccactggaccatgctgggacctcttcggaccgcttgctgccttccaccttgctcttcgacatcactgacttcgacttcgcttcaggctcgacagaggacgtcatcggcccctcacagttgggaggcgcaccgccggtgcagacgcaggaccaggcgcaggccactcctccgcgggacactcgtgctacccatgctgtgccaccggatcgtttcacctactcccaggaccatgtgcgagcacaggcccggaggaccaagcgtggtcgcggcgcggggcagggccagtagagcagtcttctctttgtttatttgcttcactttccagtactgtatgcttgtgtaatgactacgttgttgttatatgtgcacgatacctttcggcgcatgcacgatacctttcggcgcatgcacgactactttctgccgcaccgatgcagcctcctttattcgcgtgcgatacgagtattttcccgccatttggcgcatacaaccaatgtaactttcggcgctgatcaggcatgtaactttcggccccaatcaggcgtacccaccataccccaccacgttcacatgtcaggggtatcactcgattttttgcgcctatataagtcgccttaacgagtgaggcctcacaatctttcagaactcagtcacattcagtactctcttccccacttgcttcattacaaatccgaccggctttcgtcaatggctagacgccggagtgttgaggatccaaactggcgtagcgatccttgtgtatacctactaccaccttggtgccagcgtcctctctgcctatgcggtgatcgatgccaactaatggcttcgaggaatcctgatattcgaggaaggcgcttttttaggtgccctaactatgaccgtgaggtattttattatctgcatatgcttattcattccgtatgggcaatcgctttattctttgtaacactactctattcagcagacccgcactacggcttgcgtatacatcgagtgggtcgatacagaaaatcccgttctcgacctaaccacttgtttacaagaaggtcgctggtatttcgcatccgaaagtactgagcaatacttacagagaaaagcggcttatgaacgataatatcgtgaacaacagagtgactggcgggtgctaactacggcactccctccatgggaagcccgtccaagatacaggtttagtgatcgttgtcaggttcttcgttccataaagcctacaacattgggtcgaaggttctttgtttgtccaaatattcttgacgacgatttcatggtaagaatattttgattacatgaatccttattttctcacaacatttcctaactttgctcgttttacatctattctttcctcttaggaaccactaaggagatgtcaatacagagaatggatagacaccagaagggttctaactctacctagtcgtgatgtgcagcttgaactaccagagcaatacagggttactaaagtgcggtttgagagaggagagggatcctcacgtaggggttagctattatcggacaacttggcatattgaaatttctactgtcatgcttccttgtcccattactacattgtcgttgtgttcaactattgcactacctccctcctagttcgaatctaatatcatgttcaaattgtactactatttcttcatgttacataattctccttgtttaagtccatataatgtttctacgacccagactgcgataggcctatataaattatccgagtactaatacgtcgaataaggtacaaaataatacctcacttaacatatgaaattgcgcaacaaccaacttcaatacatttttataacaatattaacaagttttaccaataaatacttctttatttattattaacataacatagaaaaatcttttggccgtacttttacatctgggtcc

SEQ ID NO: 7154 - DNA, 12788 bp, Oryza sativa
tggttgaaattagaaagatgtgacggaaaagttggaaatttgtatgtgtaggaaagttttgggccatgtttggttgcaaaaattttcttcaaacttctaacttttccatcacatccaaactttcctacacatataaatttttcaacttttccgtcacatcgatccaattttaaccaaattttcaattttaacgtgaactaaacacacccttgatgtgatagaaaagttaaaagtttgaagaaaaagtttggaactaaactcggctttattgggaaaaaaaacggagatagtaatgtattttgttttgaaaacaagaacactggatgcatggttgttgcagacatgctagctgcagtcaatgagaagttgaaaacaatgcagggaacggaagagaggaggagcatgcagcagctgctacagcagggggcctcaaaattgaaaacgtttgccggccggcgcgcgccatggcattctgtctctcccataaaactcgaacagtgccagtacacagtcgatcagtcgtcgcggcgcgcgcttagcttagctgtattcctctccgcggccggccggccgatcggtcgatcgacgcatgcagcgccgcggcgcgagcggcgagagagagagagagagcgcgcagctagcggcgcggttttgaaagagcgggtttgttgccggagctcataaatgggcactgcttcatcgcatcaggcctttctgttccacctttatgctaccacatcaagtcccatgtggaaaaggaccacagctgctagctatagctgcatcgccagccaatgcaacatggcatgcattcatgcatgcgtatcagcatatgcaattgatgtttcgttccttctagctagcttaggtgaaaggacgaccaaatgctcgtaaagccattctgttccatccttcctctctctctctctctctctctctctctctaaaaaagtctgctactagctcttagtactacagtaaacatccctagttacaaaatttgctagctaataattaacatttgagaccaaggaattaatgagtactataccaatttgctgtttgccatattatatgaaagctaggccgctcgatcgccaatgataaagggagagaacaaatgcttttcaagttttttttccctgacatgaaatttggttgctggatgttgctagcattatttaatttgtgcgcctgcttcctccgttttgcctcccgacccgtttattgtgaccctcgggcactgcccattgtcgcgctatataaagacagcaccacccttcttcaccacacttctcagctctcaccactcgctaccccccttttcttcttcttcctctagccaccaccatgcgtgacgactcaagcggcagcatcgtccaccattgctgctgcttcctccatggccgcgcaagcttccggccatcagctggttcttcctcgcttgcctccttggggcgccattggatcaggaagaggaggctgaagacttgcagcaagcggtgcgcccttatgtgatggccctatccccaccgagcttttcttccaccgcccctcctctcgttctattctcggatgcttcttgcattagaggcattcttttcgtttcgatgaatgatagttaagcggtgtcttcttgaccttgcaagacttttcatcgaaaaacactcttcttcacttttctcgtaatatccttgccaacatttctcgtcctctcgcgtctatcactcctcccatcttctttgtccccgtctatccctcttgagcttgtgacttgtgtgctaaggtactttagatgtactacttttgttattatagatggctatgtagtgagttggtctatgtttctgatatatcttttgagttatgaatcaattagttgtatggtcgtcactcgtcagtagttccttgcgtggtgattgatctctctctatatatatatgctccttgttttattgatcctaactaacagggaaagaagatatgccatgctagtaagcaaagggcaacgcttgtggtgtttaataccttgtgcttgtgatatgtcctctctctctctctctctctctctctctctctctctctctctctctctctctctctttaacccttgttcctgtgtattcacagtgtgtacatcagtacatgttggtgtttctgattctctctttattttttgttgatgccgtcacgcgcttggacagttggacgtgcaaaatctcttgctatatatattatgctgtgtgttgtttcgtccgtgagactgtgagagtgatgttaatttgttctccggatcctctctgatctgttcgcatttgctgcgtcgaaaatgcgagacggaccatgcatgaaccgcgaacacagccgtcgtttcaacacacaaaaaaaatgaacgaattttcactggtcgcgctggctctgcagtctgcacggacactatttacgtgcactgaaacatccaggaccctccatcgagtatatatgcacgtacacgtacgtgggtgtggtcctacgatcgaactgcatacatctaccggtcgtatatatatacggtagatgcggggtagtagcgttatattaccgcgtctgcccacacaaattaacatataccggcccgacaccgatcgcgaattaaccccgcattcaaatccccgcgcgtcgtaccacgctacgtacgtgcgatttcatcgcggatgcgcaggcgcgcgggcgccgcgcgacacccacaactgaacgcagaacgcacgtacgtacgcgcgcgacacggcgccagcagcagccatcccttcccgggcgcgccgccggctgatcgatcggtggcgcgcggcaggccgggggcgatcggatccatccgaaacgctctcgcgcggctcgccgcgcgcccggccctcctgctccctgcccggccgacacaccgtacgtgcgcgcgacacagatcgatcgatcgatcgatcctgcgtatagctaagctgaccaatatcgattatcgtcgcgccgcggcgcgcgcgcgcggcgacgagccgacgacgtcatcaccagtccggccgtacgcctcgcggccacttgcatatcgatagctcgatcgatgatcaacaggggccgatctgtcgtggggatgcccggggtgctcgagcccccactacccgtgatggcgggatcatgggactgggctcttttaaaattttcgagggcttgtagctttatatagtttattcagatcaccgttactattttgcttaggttcgatatattctggtggtcaagcgtctttatatagtttgttcagttctcttgctcttttttttcttggattcgattctggcgatcgagcgcatttatatagtttgttcagttctcttactactttttcttgggttggattcgattctcgcaatcgagcgtcttcattatacagtttgttcagtcctcttctactatttcttcttggatccgctcccatatgatagatcgtccgatacgctgccatggccccccgggcggcatgcatgcgcgcgcggcgacggcacgcacatggtgacaagcttagtcgtcgacgcgcggcgcgccacttgccactcgagagggcccgttgtctgtgtgtggccggtgcgtttaggttagcaacgcactataacagtaggattgacgattgttgacaagctagctagccggcctgcatgcatgcaccatcgctgcggcatatgcatgagatgaaaaagagagaaaccgggggatgtcaccctgctacagcctacagcgtttgcaccggacggacggcccgacggctagctagcaacgaaagattcggtatcctacagttccctccagcgatagatcatagatgaacagggtatctcatctcatcgcattggatttcgaacaattggggtactccctccgtcctataataggtgacgtttttgactttttatttgtaacgtttgaccattcgttttatttgaaaaattagtgtaaatataaaaaaagataagtcatatataaagtacttttgataataaagcaaatgataaacaaaataaataataattctaaaattttttgaataagacgaatgatcaaacattgacaaacaaaaattcaaaaagacaagttatatgggacggaggtagtacgtagcatatgccgacaaataaatgcacctgcttgagaatgccttggtcaacatatagggtttctgtaaagtgccttctactgctccagtgctccttgctcttccgcacgaggataatcattctcaaaataaattgaggtccttctcattctaaactttacatcatgtcacatcaatcgtttgaacacctatatataatattaaattaaagctaaaaaattaactaattgtaaagattgcgactaatttgcgaaccgaatcttttaaatctaattgctttatgatttgacaatgttgcgctagtaaacatttgctaatgatgtattaattaggcttaatatatttatcttgtggtttactgacggattatgtaattagttttcttattagtgcccaaacaccccatgcgatatgctatataatattcgatgtgacacgccaaaactttacacccctagatctagataacccctaagttatggcaaattttgctacaagacatcgcgactttgcggttttagccacggacaccgcacgaagtcacttttgggggaagacactcttaaaatgtggttatttgccgatggacaccgcatacattaaaatattaatttttgggtcaataggagagatgaacactgtaaaaggtctaaaatacccctgggcccacttgtcatattctttctccctcaacaaactccctctcacactctagccaaagcgccaccttcgctgcgaaggcgacgaggagtaacgcgtgcggggatggccgccgcgttgcccgagcggaggccgcggcgaggaggaacgcgtgcagggacgccgcagcgacacctgctgtgtcgcccgagcggacggaaaccccccactgctccgccttggagagagccacgggtgcggtcctgccagtctgggtgcacggcgagcagcacaatggcccgggtgttgaagccgttgtcctgcttgtctttgagctcagtggtggtctcgtcttcctcgccgctgtcgccgccactgcgtcggccgatgagccggaccaggccgcgcttgatctccctgtccatgccccatgacatcctgttcttggttggcaggaacctgttcgattgaattccggcgccaaccacgagctcaatttcggcgagaatggctaatcgtttggaagtttttgggttgttcgtggagtttacctatatcccgggatgagcaccttgcggaaggcctcggaggcgaacgccatgaggcgggcctgcatgcggaacacgacgcggctggagtagtagcagcggccgtacgtggcgtgcgtgatggcctcctccgccgtcggcgccacggccgttccctgttgctactgtctgagaaagaggaatagcagatctgacatgtgggcccaagggcacttttgacatttcacgcgatttctctctcctcctcacctgaaaattattattttaatgggtgcggtgtccaccagcaaatatccaacttttgagaatgtctttcccaaaagtcacttcgtgcggtgtccgtgggctaaaaccgcaaagtcgtgatgtcctgtagcaaaatttgccgtaagttatctatccatacatgaattgatcgagaagataaattaaagctaacacatgaccaccgcccaaaaacatactttctccattctaaaatagttatctttctaacattcaagatttattttaaaatacttcttatccaatcatcttccattcaaatttctcactattatacctctaactaccacaccacttctaataaccatatactgtattatcatttaatgagggagactatgttattttttcttaaactttaatacatgctaaactgcctaaaatgacaagtatttcaagatagagaaagtagcatattggtttgtacatcaaatatgaatcaacacatgagttgtaacatttgagattattcagattatggtgctctacaccatcttgaaatgtgaaatcaaaatccaaagtatgtttaaagaaactaatgataaattttctgtgagttgtaacatttgtccttaaaacttctactccttcatttttacgtgcatgcttctcaaactgctaaatagtaagttttatacaaaattttctaaaatgggtaaaaggaaaaaaaatagtggagattttaatatatgtgtccaatatataatgtctatgccatgtgatcaaactcatccaatttatccaatttatatgcaaattagataaaaaccactatgcaaaaccatcttaattaggaggttatataaatggtacaatattgtaaaatttagggggttgaatgtccggtttcaaagtccaaagtgctaaataaactttcatctaaaatgtagggtgtatttggactttttcaaaatcatattaatccatttttaagtttttagctaacacttaattaattatgtgctaatctatcgtttcgttttaagtgctgagaaggaagagttcccaacgtccccctcaaaggaaaacaaccttaatattccctattgatttgccaggtgtttctcaatcagcaacgtcttaatttgaagttgtaatttaaatgtaagcagataattaagtttcagatatactccatactagttgacaaggctctttagtttaacaggatataacactttggtagctgacattgctcatatgttatcgtggaagggaaaatattttccatactgttgactacacaaactaaaagattgtgcatatatgcaccaaaagatagatagatatcttcacctataactacgagacatttgtataaattcataactctcagctcattgaattggagaacagcatgaagtgattattaattacaaacaccatatataggcctggtttagttcccactttttcttcaaactttcaacttttccatcacatcaaaactttcttactcacacaaacttccaacttttctgtcacatcgttttaatttcaaccaaacttctaattttgacgtgaactaaacacacccatagaaatctgctatatctaaacactatatatagatggttctggccatctcgtgttcaaaatcatagaacacccaagaagtgcgcacggtaaatcaatgaagccgctgtatgtttgttaccgtgtgtgttttttgcatgttaccaggtgtttctggcacacgggagccttctcatccctagtcgtgaatccgtaaactttctatatatattggagacgtacgactctttctttcaagaaaatctatacttacagcaagcaagaagctcgttttcaaaactcaccatgatgaatacaatggtgcactactacattcatactcactccgtcccaaaaaaaaacaaaccctggtttccgtgtctaacgtttgaacgttcgtcttatttgaaaaaattataaaaaaaattaaaaagataagtcacgcataaagtattaatcatgttttatcatctaacaacaatgaaaatactaattataaaatttttttatataaaacggacagtcaaactttggcacggaaactcagagtttgccttttttgggacggagagagtagacaatacgtaatcattgtcctacaattcccaacaattacagtacagtgcttcttgatgacataaagggttatagtacaggatgaaacagttgcacgcttgaaataatgcaaatgcaattcagcaatatgcgaataaagtgaggtccaaagaaaaccacatgtgaagtaactgtagccaattattaggccaacataaaggaaagcatcactaacagttttgcagcgactctatgaagaacacaggacaaaagcatcgacgcactaaatccagaatggaacagtgtagcttgatcaacgagttgattatgcagggagggtaaggtttacagcggtccgggaaagggacacgtccttttctacctttattcatcccattcctcgacctcctccagtaaacagtcaaattctttacaaaccaaattgaaagttcagagatattgcttccagttttaataacacagtcagaagcacaccagatcaacaaaacatgattttctcaggctagactgttatatgtttttttaagtgaaaacaggtcatgtcaaaaatttcagtgttcatgctggaaagtgaaacacttggtcaaagttaatacaatttcctgagcatgttcgaatcttttccaatatttatcatgtcaacattgtttaaatgagtttctataaatggacacaaacaaacgtttcaccattacctcgtattagcttctggaataaaagcaaaaagattcattactagccttcaaacattttctttttctcccatcatcaaaccgctgtttgattaccaattaattgcagactgctcagcagcaaagttgttaacttgattttcctctatgtgttaactgttatcggcatggatgatgcccagcaattttttcttttggggtgaactcaataatgcattggaggataaaaaaggtcgcgagtactagtgaatcaactgcaatcaagaaatctggaggacggatgtgtggcatcttggtttattcaaatgatcaaatcgtaatattctaggagaatgacattacattacatagttttaatgtgcatggggaagaaaataaaaggacaggaatgcgtaggtcaataataaaggaagagagggtaaatgtgtacactgtaagtgcctatattagatgtgcatgctcaagccactattcgcatgtgcaagtacatacccgcacattgactattaaaggtgcaaagacacagtcaccgaggagaatattttcaaggagataaaaatagctgacgatgataaactaattgcagaaaactgtccgggccaggtcaatgaatgctgattgcagaaaactaatggctggtttggtttgaggacctgctaaaatttttagtagtgcaaagcccaatgcttgggcaagtttgggactaccaaatttttggtagaggaaagttgagaagagtagaattgatttgatgccaaaatgtgactatgagagacaactatgtgaacaaaaccccaacgttttggtagtgcagtacttgatttatttttttttaaaactaaacagtacttgatttgttaccctaccaaattttggtagggcaaaatttggtatggtagcaaaccaaagtagccctaagccaccggacaccagcaaactattcatccagtgaggtttaatcaacaaagagttttgagaagacactaatacatccgctcttaagcatcacactaactgaataacatgaagatcaacagaaggaaacaccattattttttaacaaatttctgatatcaagtcatgtgttaattggtaagtggaaacaactatgcttgttagttttacatggccttatcattggtattgtgtacccaagtcgatatctgacatgttttgcattcagaaataatgcatgtgaaaaaaaagagattatcctgatactagctgaataagttgtcgtttgccacaacagtttaaaatggcaagtggtagcagtgtactcacccattctccatggtaaagtgatctgtagtacttcacaaatttctcagaggcaccagtgtatcgtcccctttggcactcaaaacacttgaagccaacaaacttcattatagaaaagaaagtaaggacatatattattttcaaataaaaaaagttgaagtacgaaacacagagaaactgctaaggcctcactgtggcaaactatacatgtggtactcaatatagccagtaaaacagtgcctggttttagtttgttgtcagaaagcagaggtcagcaggtgctgttttcagttaaatctgaagattttaaaaaagaaggaacttattagcaatattgagaatagataatacaacagaataagatgttgtatgaatgagaacatggtcatgaagggtgatgtaaaaagtgggggaaatgaaatgaagtgtttatatgtgccagtaaagtttcagaaagagtaaatgggtcatcaatggaatgtattaggattggtttgtttaattaagcacacttggataccagattcctgttcattaaaaagacataggcccaatgtattaggataggcctatcaaattaaccacactaaaaaatagacaccagatttcaattcactaatcaatttatcataggtaaatttatttttccactggtgtgaattaggaaagacatgcagtggtaaatattgaagtgcactgtaggcagtaatcatgatgacactaaactgccataaccagaaattacctgcaaccggaaacattgagaagaacaaactgaactgataagcaagacataggccctgtttgggggagcttctcccagctgcagcttttcccaaaagctacttctgttagaagctgccccaaacagtccacagcttctgagaatctgtagttacagggcctatgtcttgcttatcagttacagcttctgagaatctgtagttacagattctgaaaaatgaactaagatgccagaagctggagaagctgggtttcagagcttttccagattctcagaagctggctaccaaacagctgcttctcagaatctaaagctcccccaaacaggccctaagaaacgcaattcagtctgaaatgttaaaacagatagagaacaaagcatagagcatttgcaatttcatttcgaaatacttcaaaagcttcagactactcttaaataataaactgccatgacatataatgcgaatcagaataatcaacttagtgaaggaattatcattgttctattatgtcaataccaaaagagaactattaccaactagtgaaaatttctaaagaactgaaagaatacctataaggctatataacatgtgaaactttcagctagtaagctgagcttgcaaaacaaactttaacactttaaactgagcattcaaactattaaatatccctatttcaacttaggaagcagaatattcactaatttagccaaccgatggatttccgtatctaaaaatagcttctagcacaaacttcaaaactttcaacttgaatattccaattttcaactgaaaccttccaacttagacccattcatagagagattacactatagttaataaactagatcagaagcttcactgccatatcaatctaaatagattattgcttcttccttgcacccaacgacatggaattttactatagcttttccctgacaagatttgtgcgcaggcacttgagtgtaaaatgagagaggcgcaaaattcccagcctcccagggggcaatgatgcaaccacaggatgaggcaatccaatttcctagtactaaatttaacctacttaccgccgcagatcgataaaccgcacacgaccacaccctcctgcaataatcatccccctcttcgcagcctccgcgtcgctgatgacccctgacaacgcaggaccaagacttccagaatgatccccccggttctcggatttagttaggggcaacaatggcggcgagccggcgggtaccaaatgggatggagcgggcggtgtgggactccacagatggaacggaagcttctggaaaggatcgcgtacgcacctcggccatcatctccggggaggcggggcgcccggttacccgccggcgtcgcgcggcgcaacggcgggacgccgaggaggcggccgcggccgcggcggtgcttggtgggcgaaactggcgtgggccgcggccagcctccatggctttaggcctatgggggttggattcttgtagctgatgggcttacagaccagaagagcccattgggtatagcccaataagcccagaaggagcgatggtccatcccgctatgttggtgggcttttttcttggatacgtgtgttggtgggcttgatatgccattggacttgttaggcggaataagttcactttatgctcctcatctgaatgtcgagtttaaatcacattctttaaccgcaatatcataaatcttgaccacccaacttacaaaaccgggttgaattagttccttcagaggtatagatggatggttttgatgatgtggtagtgaaagggtcaattaggcctagaggggggggggggtgaataggataatttaaaactttatgcggaagctaaaactgagttagggtcggaaagtctgatccacagtcagactatccgaaaatatcagatagtctgatgttggatcagactgtctgatccactaaaagaacactacaagaagatctagtgcacaaacaagagtatggcgcaaacagtgactagatctatagcagcacaaaagcaaagctaaataatgggagaagagatatcaccaacaatgaaattcaccgagttgttcccggagttcaaatccttgaggggattctactctccgttgaggagctcactaagagccgggtctttgctaaccctttcctcaagaggttgcactaagcactcctccttccactaaagggtatctctttccttgtggaggcgagatccggccttcacaaacttctcccggccaaccacacgtagatcggtggctcgggagtgacacctagccgtctaggagtcctcaacatccaagagtaacaaacaccacacaactcttggtcaaccctagtgctcaagatcgagtgaaacacacacta

SEQ ID NO: 7155 - DNA, 27406 bp, Oryza sativa
gcggcgcgggaggaggatgcggatgatgaccggagcaacgaggccgaggcggcgtcgtggcttctccccgagcccgacgacaatagccacgaggatagcgccgcagccgccgacgcgttcttcgccgacaccggcgcgtacctcggcgtcgacctggacttcgcccggtccatggacggaatcaaggccatcggggtaccggtcgcgccgcccgagctggacctcaccgccggcagccttttctaccccgaacactccatggcccacagcgtaagcctcactaccacacagctagctctcgtcgatgctcatggcgcggcgttatgacatggtttcctacgcgttccgcagttgtcgtcgtcggaggtcgcgatcgtaccggacgcgctgtcggcgggctcggcggcgccgcccatggtggtggtggtggcgagcaaggggaaggagagggaggcgcggctgatgcggtacagggagaagcgcaagaaccggcggttcgacaagaccatccggtacgcgtcccgcaaggcgtacgccgagacgcggccgcgcatcaagggccggttcgccaagcgcaccgccgacgccgacgacgacgacgaggcgccatgctcgccggcgttctccgccctcgccgcgtcggacggcgtcgtgccgtcgttctgaggaaggacgtacgcacggtacggcgagtcggcgacgtgcgccgtcgtaattttggcgcgccccgtgcgcgcgtgcatgcgtgcgtgtgtgcgacgcatggccccgtgtgacatgaataatatgtacagtagtttttcatccatggacgtagtattctattgtactccttgtactcctactactcctcttctgcctaaccaaggcttgtacattaccatgggagtagctgtttttgcaaccgtgaccatggttcagtgcttcaagttcaagggcgttaatgttactgtccattctacttttggaaaggctagtactcctcctacttgctactagaagcttgccgaaaaatggtaaagaaaaatgtgcaagaacgaactgcagtactcatatctccatcaaccaggaggttcgagcatcatactactctattatacgagtgtaatcatcaaccaataactcccctaacctcacagtttttctcctgattttggtttttttttggatatctgactgttttacacgtctccttttactgttctgtgcacctcggcctaatttgcatgcttatgcgttgccggtgcgccggttgattacgtaattattcatgtatttggggtttggatgccggtcattgtgacggttgtttccggttggctggtgcgttgagtgccgcgtgccatgctgccattttttgttttgatctaattgtttcttctgttatttcagatcggtctatccgttctgtattctgtgtctttgtgactttttgtttaggtccttggtatttttgaaaattgaatgtgaagaagacaaaattctgtttttgggtgtgtttgtggtttgttcttctgctgggtatggaggtgcgattttccccacctgccgtcctccctgctggtcacaccaaatgcctcatgctccgccgccatcgcgcatcttcgtgctctccggtgagagcgacatgggcggccgcggtggcgtccaccaccggcgctgggatggcgtcgtgccgacctagtggtacatattcaaagcaccctttacacagctttccgttcgtgctagtttctgttacgtcttttatttacctgtgaggtgaaaccgtgcaacaacttccgtattgggggacacggacatgtactgaaccacgtaaaaagggttggaatcattgaagccttttctgttgcagatgccatggaagtttgatggctgcagccgcgtagtgcaaccatgtgacctcggtactagcgtacaccgctttggcacaaagccatgtgaagcgccgtatcggtgtgcccgtgccgggtgtgggggtggtacacatgtagcgcatgtgatcatggcaatggtgacgcgatgcatgatacagtgaatgttgtaggagtatatgtgagctgctccagaagagctgtgaacctggaaagtggcgcagcacggtgaccacagcgcatccagatgcagtggagacatccagaagcatgtgtaatcctctgatattacggcatccgcaacaagcaaaaagagcagcacctacaaaagacattaattaataatactagtatttagcacaaatattccagcaatgtgaaaaatctaatggtacaaaacttagtcttacggactacatggggtctcaaagtcatacagtcgaccaaaacgctaggctcctgcttcaacaattgtatcagcagcggcggggtttttcccgaagggtacacaaatgcttccgaagaacatactcaatccctatagcttttcaagactccataacacaagcgcttacaaaaacacaccgagcccccctaacatttccagcaaattggaactaggcgggttacgcgttatttgcgtagggggactcctcgcggttggctggctgtgctggtgatctgctgtagcttcgctcacgaggaggtggaggtgatcggctgtagcttcgtgcacgagctggtggtggcgacctgctgtagctgcgcctctttggagaacgatcccgtgggctgtaactcctaaaacaaagaaaggttttaaaaacaaacaaacttgcggttatcacagaaaatagttgcttaagggcatgtatgtggcaacacaacaacagtagcatgatattccgcttcaagtaaaatgagacaatctcaactacaaaatccttcaaccgagttgttaccatgtttgccttaatctactgtcatcttatctgtatgatcaatccacaatatgctataatgcagtaacaaataacaaactaaaaaaaataaacactagttatcttaatagttattagtgatcatggtaacagtatatgcatcttagtaacatagccctgaatttgaaattgaacccaaatgtaagtgcggacaaagctgatcagtgccattgagcaaatattttagtgagggagaaagttacaagtttattggaatacttatatatcttgtacttcaagcttcttatgtaagcacaccttttagtttctccattttcacaatcttgaatatggggtagcgcagctatataagttggtatataaaactgcaaatgtaacaacgatttggctggccaacaagaaagaatctagggatgccaagatatcattttgtcattactcatatctacagagcctgtttgaagacaataactttacattaccttctaccatagcttgggctcctccggtatcttgggctgcggctgcgactacgaccgcggtaccttggactccggctacggctgcggctgcggcgtcttccactgccaaggcctccagaaccaatccgtaagcggcattcacgtgcaaaatgaccaggttcgccacattcatagcacttcatgtcagaaccaccggaacgatctcggccacgaccactaccagctttggttgacagctcaaccctccatccattcttgcctataagcacatcacatatcagcaggatgattgtaagcggaattcatggactgtttaaatttgtgagtaaccctataataatatgttaagtaatagctaaagcatagaagtaggttggaaaaatacaacacatcaattgaaagggtaaaagaatatcttggtcaagtaacaaatcatatgatgatatcacaattttaatgtacaaagctacatgcacaactgaagtcacagagaaaaaagaaagtaggcatgtaccaatatctatcaagtttcttaacttggaacaacatgggcctaatgtgcttgcaacaatatatgtatatcacaatatatcagatcaatataaatgtagagtgtcaaattttgacctcgatttactaatatcaccactctagaaataaataacaaggcccggttaggttaaaagacggacctcttagttgatatcatgtaaaggttcaatttagaattctactagtgaacaggaattgagattcagaatttatgaaactatggatttgcccctgtctattattttcaaaacgtccttctaagaccgaacagtttacaggagatagcaagatgcattcatgatggtaagctaaaactatatgtttggacacaacatattttatctataaattcagtgtctattgtttatccaaattaaatttataagttgcttgaatcatgattcagacagagttatttatactataaccaagataaaaattgatggggactcacttgactaaagaaataatgtaatagccattttaatggcaaaactatgtaatgccagaagttgaaatagataactcattagagaagtgcataacatgaaactatcttgcatgaactacaaagacaaatatctacgcttattaccatctaaatcacgaattgcatcttctgcatccctgcggtcatcaaagtcaataaaggcaaaacctggtggttttctagcaacccatacactgcatagaagaaacaactcagttgaaagtggaagaatcagataatctcatttgcagacataattaagaaatcattactgctccatatagactatgaattcattaccattcttagtattgagtaacaacctaaatatctcttccatggttgtcgatacaaaaatcatctttaatgttgtgacagaaatcagcaataaagaaactaatacacacacacacacaaagaaaaacctatggcatacaaaccatgactactccatgtgaacatcaacagccttcaacataaccctttggcatgcagatacaaacatgccactgagtggttcaactaatgagtaagtgataaactctttagaccagcagacaagaaattcagaatattgagatatcgccagtctattaagaaaggaattcaggcgtacactgacagaccaagagataacatgactttatttcatatacttcacagttaacgctgcgtcacattgttaaacatcataactttacttgatctgcctcttcatatcttattgttcactgcaaactcaattactcttcaagttcacctgatactttctagcatatacgttgcatcccacagtatgaggcatgacatacaaaccagaccgatcctaatactcaaattagatatattttcccaatcccaccagtagaacagagcacttaggtgcccaacaataagtgaccaagtaaggcagattacttgtttatataaaaaggaattaattatatccagcaaaattgcattgcaccgagctctccacctcacatatgtcaatgaactaattttaccccaataaaagcacagtacaagacaatcatcccctgctatcattactaatttgagagctaatacccaccatttaaaacttaaattgtaaagctgcagcattccaatttcaaaatcacacgcttgactaacatccatacaagtggctaagcaagtcaaacgaacaagcaggcacattaaacaagtatacgcaacacagggagtaaaatatatatatatagtgattcttagctcagagtcagcagaatctcacacctcctcagaaccccaaacacgcggaactcgtcctcgatctcccgcgccgtcacgcgcggatccaggttccccacgtacacgcgagccatgagcgcgctcgaccctgcaggtattcaacacaaatcactcccaccacgctgaggaaagcaacaagcaccaccaccaatctctaccaaaccaaaagtagaagaacacaatcacacacacacaaaaaaaaaaagaggaagtaaatccggaaattcctcgcgtttccgaccggaaaaggggggcgcaaaagcagaagcagcgggggatctggagagtacttgcctttgcgggcgcgtccgccttgggggggatttgggtttcggggtaggcgaggaggaggaggaggagcggctctagggttttaagctcgagccgtcgagcgagcggaagaggaggggcggaggggcaggggggagtgtaatatcaggcggagggggttgacggattggggacaggggcatttacgggattcgagttaaaatttttgtctctgtttggattacaacgggttcccctgcccggtgggtcccggaccagccgtaaaccattctccctcagcatttgaattttgtctaaattttatctaagaatataagaatttttatgttcgtttcttattttaaaaatattaacacatgattaattaagttttaattactataacttaaagaaagatttatctcaacttctatataaaaattttcgtacaaaatacaccgtttagcagtttgaaaaacgtgctaatgaataaagtctttatcttgatataaatataaaaaaggcggggcctaataattatcacatcaattatttcttatttaaatttctttatatcttatctctaatcccctccactccaaccttatttaattttctttctatcttatccccaatctcgttcacctcaaccgatcgggatttatactataggctatagcaaaccatattattttatacatcttttagcagcaaaatatggaccaccaaatcaaaaatatgtatgacttccaaatcgtacatgatctcaatctacccacgataatctcttattaaatgaggagcattaaagtcttttcttctccaacttttaactaaacaactaaatgttggatgtttggagtacatacttaatgcagttctccggtgctcgagaagggatgaagtggtggtgtagcatggcgacgaggccagggcaaaacgaggacgtcaagcgctgtgttcgctcgggcgtcgcgccatcgccttgtgcggtcggggttaagtagagttcgcgcttgtaggatgtcataaagaacctgaaccatcatagaagatagatattgggaagccaaaataagatgatgaggaagaaatgggtaaggagagagagatgttgcggctattcagtgggaaaacaacatagactatgacacatgtgtgaaaaatataataggagtatagcggttttcatcgctcgctggttagctatcatcttcagccaaatttaaatttcaaaactggactttagagttagttttatttttcttattgtactccactttccaacattagctttcaaatagctaataataaatatataaaagttttactcatatatttatttttgttgtttcttcttttttttttacagcttaccaaccgatcaaagccaactagaggataaacaaaactttacatccacaataccaaaatccatgccgaatcagtgacaagagaagccaaatttatgcttgagctgccaaaattatagtgtcgacttcgagcaacattattacaactttcactacttctcccagacttcatagcaaataaacataaccttccagctccgattcaaagccacttattcttttttagggcattcaaagccatttctccattccaagctcgaaggtttagatacaaaagaacagaaaataaagaaaataaagaaaaagcttgtgatttatatcttgtcatatacttcctccgtttcacaatgtaagactttctagcattgcccatattcatatagatactaatgaatctatatatatattaatgtctagattctttagcatctatatgaatgtggacaatcctagaaagtcttacattgtgaaacggagggagtatgaatgatcaattgaactactcttcagttgctttacactgtcataataagctgttgagtacatggaaaagaatatgaatacaaagcattgatttttttttttgcgggagaatacaatgttttaacttgatacaccgtgtatgaattttcaggacaggcgccagatcaatacaattaattggatcactagcctgcaaatctgcatgtcattgcaaatatggacaggattaaccataaacaaattggttggatccagcaaatgagattcagacaaaagctttcctggttgaggaagttaaaagcaaaaaaaggaactcatgaatcatgatctgctattgcccgaataaactagacaaagccgtgagatatccagccagctgcaggaatgaaagtgcagatgattataaatgtgctgtactttatggtagataggtaacaatggtatattttttacagtatcatagctattcgttgtgggctctgattactaagatggtatgccttctttatattcagatgaaatacctgtgccaagataccctttcctgtctgaccttccagtaccaatcctacagtcagtcctatcattgccaatgcaccattaatagcttctgctcgacgacgtctctgcgtagcaggcaactatgatatggcataatgttgaaaggatgttcataaagcattagcaccaacatagagcattttgattttaatcagagaggaatacaaacaggcgagttctccagcaggaaacatggagtaatctacggtaatgactgaggaaactatttctggtttacatagatgtgtttttaggtgcagtacttattttctccctgataaggattttacagactagccatgatagcttttatgcatggtcatggaatgccatgacaagcaactgaataatcgaaaataaatttgagcaaagaaaccttgcagatttcaaaagcaactttcgtccacatgaacatcatcacagttaaagcttcctcaataattagtttaggataactgaattatgcaacacagaacacactgccacattttgatcaataaacagtagaagataaagatctggtccagcaaaaagtagatagggcagcacaagtcagtaaaaaggctaagagccttatatgactagggaaaagtcaatcactgcttccagctctaagaaagaaatttgctgataagtgtttataaaactgggggtgttgttattaattttggtttagaaaacaacaagaatattttgaactttagaggagacaggtctggtgggaactgtggaagtacatgacaaatatcaaatactgcaccttcagcttttctctggcctgaatttgttgcatttgttgagctgctaagcgcttagcttccagtggatcaaccattaccacattatcacctgaacttcttttgccttctgatgcctgattcatttgaactcagtgtcttagataccaaacgataatgacaaagttttgactaaagcaaaagaacattgtatattagtttcaaaagaagtattgaatccatttttagaggcaaaataatatctactctatagctaaaaataatgaatctctttctgcagaaattcttgagggatacagcacctgctcaagatccactactaaatatcatgctcctacaaaaacacttgaagttaccaataccatattcaataaattttgtaattttacattctgtagacctaccaaaccaaaagtacttttgaacccccaaaaatgaaatgatctacacagaaagcctgaatcatacatctgtgctagcaaaagccaagaagctttgcacatgggtccttcgatagaatgtatgtcctggctgcttgtattggacagtccatctaagcaaggaaaaaacatataattgggcatcagttaactcggtggaaatactacagatgataaactgaagcaaagaaatagccgttggcacataatagtaattccaatagtagtttgatcactcccaacccaaaaggtgaaggtgaattgtttaacactctagaaaaacgagtagtattcttctgctaccaaaagtaattgtgggtagtgccagacattatctctctttttttttcttctttttttttgggaaaatgagggctagtgctgtgccagactgatccagtgaagtgagccagcgacgatggccaccaaattcatcacaatgaaaagttctaaactagtcgtaccaaatatcatcaatatatggaacagctgatgctaaattcactcgaattgcagagcagttggaacaaaccaacaactgacagcgaatgattttcttgtgtactaaccaccacaacaatctccccaacttactggacaaacgaacgtagcatcacggagcacctttaccttcgaaccatgaattatgcatcggaaaaaaaaaagagatagaaatgggtggccaagaacacgagcaagaaggcaagcgcggatcaatggggacaccatatgaaagaaacgcttgcctggacgtggacggagccgaggacacatgccccgtggagaggaacggagacgaagaggaagcagcagcagatggaggaggaggagtagccgacgccgagaggaacacacgcggagagcacgccattcttgcttcccaccaccgcctctctctcctcccctctttctatggactcgagaagccgtcgtcttccacctctagtttttctctcctctttcttcattttttttttctcctcggtgtcgtggttatccaagtcgccgtggtcgtttgggcctacgtgggcttaggccggcccacgaaaaaaatacttggaagaaaagatctcctcgcgtgagccgacgccgcgagcgaagcccgcggcgacaccaccacccaccaacgttagcttctgcgtgtggccgtgggcgcgcgctccgcccgcgccatgacgaccgccaccgccatcgtcgccggccacggcctcgcgctgcgccggagcctgcacctctccaagcccagctgcgccaccttctccgcgcgcgcgcttccgcccgccgcccattgctgccgcaccgtcgtcgccgcggccgcgccgtcgtcgcggacatgccggtgccggtccgtctcctccgagagctccaccgccgccgcggccgacaccgccgacgacgaggaggaggtgaccaagagcgactcggaggaggaggagatggacccgctggcggaggtgtgctacctggacccggaggcggacgcggaggggatccgggagtgggagctggacttctgctcgcgcccaatcctggacgcgcgcgggaagaaggtgtgggagctggtggtgtgcgacgcgacgctgtccctccagttcacccgcttcttccccaacacctccatcaacagcgtcaccctccgcgacgcgctcgcctccgtcgccacctccctcggcgtgcccctccccgaccgcgcccgcttcttccgctcccagatgcagaccatcatctcccgcgcctgcaacgagctcggcgtcaaggccgtccccagccgccgctgcgtctccctcctcctctggctggaggagcgctacgagacggtgtacagccgccacccgggcttccagtccggcaccaagccgctgctcaccctcgacaaccccttccccaccagcttgccggagaatctcttcggcgacaagtgggcgttcgtgcagctccccttctccggtcagtgcagtattggcaaattcgctgatccattaattccatcaaaaaattggtgctgttttgtgtgcttgctagtgtgatccacatgttctcttgttgcgatcgagctgattgttttcagattgttgtgtgattgttcagctgtgagggaggaggtggagtcgctggagaggaggtatgcgtttggggcggggctcgacttggacctcctggggttcgagctcgatgagaacaccttgatacctggggttgccgtggaatcttcgcgagccaagcctctagctggtacgtttctcccatgaccaatgagatgtgtagtgtggtctaggggctaaattgaatgtcaagtgtatgatggatctttactttactgaaacctgaattcagcaagtgcaagttaatttgatgttgcagcacgctactcaaaattgaggatgcgtagggtatcttccgagttaatttttttgtacaatcatagttcatggttgtttacttgtgtatcgaaaaatgacactagtgtaagaatcatgttttcaactttggaaaaataaaatgaatgacagcttacaagaatcaaatgaatggctagtgcatatatgtttatgttatctttattagcgtattcagtatgatattccattctcctcattgttgctgctttttatggtagattgatccacgagattgtaggaattggggattgtatgaccaactgtctgcagtttaatttctgaaagtatcttccaaaagaaaaaaaaaatcatatcgagtacattctcgtgacagttaaataggttcattgtattcaagttgtccgtttgattctgtcatgtttgattgaccattctatattttcaagactggtgttaggactcaaagaggcttaatcagaaacatgtgttcttcaatccttgcagcttggatgaacggtctagagatctgctcaatggaggttgacacgggcagggcgaacctgatcctatcggcgggggtctcgaccaggtacgtctacgccgggtaccagaagagcgccgcgacgacgcaggaagccgaggcctgggaggcggcgaagaaggcctgtggcggcctgcacttcctggccatccaggagaacctcaactccgacgggtgcgttggtttctggctcctgctggaccttcccccgccgcctgtatgattgatcctgcagtccggagagtagcatctagcagcgtgtgtttccatcaaagatcactgtgtagtatgtgtagctccagtaacaaaattttcaatacaagatcccttccatctgtactacacactggtgtactaaggaggaaaaaaagaaaagaagaggagataagggctctgtgtgttttcatgtgagatatgagtttcttaagaaaaaaaaaggaataagttcacttagtccctcatgttatcattgagtttgaagcgcgttcttaaatggcaataccagatataacatgttcctcatcttataagaccggtgtaaatctaatactaaggcagtattggagacggttttggctaaggcggcaccaggaaaaaaaaacatgtggaacccacactggcatctccttcattcctatctctctatctccctttgttggttgcgactacgagagggacgaggaggaggaggtgaacgagaagcaccggcatgggagggtgcagcgggaggatgggcacaacgggaaggatggagagaagtgccacgaggagaagcggcaggagcgaggttgggcggagtggggggggagcagaggaggccaggtgaaagagcaatagtgggaggccggggggaggagcggcgggagcaaggccacaatgacactggttctgcttgtccatccgcaagtctaggcttggcggcggcattggtagcaatggcaatgtggtgtcctatgcaccaccacgagaggagggaggcgtgaatcaactccccgacatcttccttgtcaaaggttgcactggcaggaataagcacaatagtgtcagcacagtggcggcgagcaagtccagctactccacggacagggccaccccaatgacggtgaggtagcagcgcgccatgtcgccccggtgctccacgaagatctagcgcagaaagacgtggactctcgttgtgaggtcctgtaggcgtctacatctctacgcagcccgacggtggtggcggtggcctagatagtagggttgtggtggtccatggacgcccgccgcgcgcggaggtggtgagtggagtcgagaagacgaatcaacgctgttttgtgtggtggtgtgtggcgcgctttggcagagcagcgtcttggacgcctcgtgcacggattggaggtgcatcacaactcgttgcgcattgcgtcagctccctcgtctctttcctcttctcttcttctaccatagaccaccggtgcccccttgtcgccaatctcctgttgctgctaccacctcctgctaatgggctcatcagctgccgcccctctccccgccggtgagcttctgcggaggaaatgggagaagtggaagagagaggaaaggtggaaggcacttacatgcgggacctgtattttttttttgtgaataggatgccacgttatccaaaacaatcatttgtactgctttaggacctggttttgaaatatgaaagtttaacgtttctggttttatggtttgaggatgtaatttgaactcgacattacacaaggtacctaatgggaacttcttccaagaaaattcaaggtttgttacagtagtttcgtgggcttcccctctagtggctcttaagatcagcaacgtgcctactctgccagtccctctgtttaggccttttgtatgttcagctgagacgctcttagccccacgaggccagtctcccaggcccaacacggcgaacacgtcccacagccacaggccacacagtcccgcatgcacccacgcacacggcggccggccgagagatgatccccaccgtttgctgcccacgaggacgcctagctaggatcgcccgtgcgtcatcgagccaacgctcaccatgcgcccacggcccgctggccggctcagcacggcacggccacgagaccacgagcggacccattctctcgctcgcctcattggctccaccccatgctcgggttcccaggccccagccgggcctcgtcctagtcctccccactccccagccccagatccaggtgcaataacgaattaacgaccgagtctcacgaggccacgacaatccgcccccacacggtgctgaaattccactgaaatagtagcactgctagctcttctgtgctggactgctcgtacactgcacttcattcgtcctaaaaagaattaatctattattataaaatatcacatccaatactagctagtttattttttttagacagaggaattacatatcacataatagtattagatggaatcaccaatacataaatggaataatcactaatatacttttctttgctcctactctattaatattaaggaaaaagtacaaatttccttctcgaactatcgcggtcggctgaattttccccctaaatctgaaaaccagacattactcaccccgaactttcagtaccggacgaattacccccctcgacctaatccagagcagttttgtcctacgtggcgtacgcgtggcaacccagtcagcattttcattttttaaaacatggtggggcccacctgtcattctcttccatctccctttcctcttcccctcttcctctttctttctctctctccgtcaggcgcgcacggcgggtcaagcgcgagcgcgcggttgcagtcggcgatggcgtcggctgccttcccgaaggaacggaacacctcggcacggccgacgaggcaggcagtcgcgaacgggtacgggagcccgccacggcacgcgtcgagcaccttggagaaatggcgcacggcctcggcggggaggtccgcgtccagcgccgccaccgcggcggtgcgccggcggagcgggagcttgacgtgcgcgaggggagctgcgacacggactccgcctcgcttcccgccgtccctgacgctgcgccggacttggaggctcttcgcctcaccggcgcggagataccattggccgtcaggttggacggcagcggccgggtctagagcagcgcggcggcgtcctccattaattcaaggtggaagcgggagcttggcccaagtgtcggcgcaggtgttcttggagaagccggcgaggacgcggtgcttgtgctcggatatgtcgaagcttcagaggaagcgggaggcagcgtcagagtggtcacaggtaggcgagagcaggtcggtgcgggaggcgacagcgaggttgcttgagccggaggagcaacaggaggaggaggaggaggaggtggaagaggagggccaccgctgccctcgcgtgccgaccgcacgcgccaccgtggctcctcttagccgtcgcgcgtgtcccccgagccgccgcgcgtgtccccgcagtcgtcgcgcgtgtcctccgagctgccgcgcgtgtcccccgcagccgccgccgcgtcacccgccgccgccgctgcgtgtcgaggaggcgatgtcgaggaggaatcacgtgctggtggtggcgaggaggtggaggccgtggcggcgcaggaactggcgcgagaagaggcctcaggtctcgccgccgacgaccaccgtctcaccgtctcggcgtggcccacgctctcctcgatctgggtgtgcagcaccttggacatgtcggccaccgcctgcttcgtgttgcgggcgatgagcgccgtgtaccacgccgtctcgggcatcttcatccgccagtagtaggtgagcgccgccgggacggtgccaaacatgacgatgatgcgccacacgtagtcggcctgcgggatgagggacgcggcgtggttgtcggagtaggacgacaccgggtacgcgtgcggaaaccccgccgacaccgcgagcgcgacgatggcgtcgaagaggatcccggacccttgcatggcgaacacggcggcgatgaaggccccgcgcgtcctcttgttcgcgtactccgacatgatggtggcgctgagcgggtagtcgccgccaacgccgtgcgcgcggcgcgagcggcgagagagagaagagatagaggaagaaaagaagagtatggcaggcgggtcctctaattttttattaaaaaaacgctgattggattgccacgtatgcgccacgttggacaaaaccgctctgaattggtttgagggaggtaattcgtccggtttgcatagttgggagtgaagaatatccggttttgtggttcaggggtaattcggacaaccacgatagttcgggggggtaattcgtactttttcctaatactaatatatacgaagcaaggtttttattcttctttcaaaaaaacataagtttgtatagcagcatctcacataaaaacagattttcttttctaggaatatagtaaacttttacattgtcttgtttggatgaacacacgatcaatatcgaaagagctgatttgcaaatggttgtgctcgcgtgagcgggtttcgatttggattcaaaaaaatttatgtagaatgtttctatatccgtcaaaagtttctaacattaactttctatgcataaactttttgaaataacatcccacggtgggccatgcatgtgggttaattaggtcaaacatgttcatgtatctaggtcacatgtgaacactcaccaattagacatccccggtcaatatatttagtgacaatggcacccaagtacatttttatgtcttatcttgagaaacataatataaatgtaggcgctcacaacgggcacaaactcactcctatgaacgtacacatacacatcttacccctataaacatctccgaaagactaagctgatatatcttaagattgacgagatcatcacaatcgcttcgctgttgatggataggttgcttatcattgaaagaactagctggtggcccgtgcaattgcgcggctagcacccaaatgaaatcatattgtcagggttatggataccacatacctaatagtagttgactaaatctcggcaggatccaccacataccatatcttatacggaaactaacctcgagggagttccggataaggaaagacaaccagagttctacatggaaacgacaaggactactcggattgtatccatattggtttccctaattctacttggacaaggggacacatatgggtataaatacaagccccttaggaggacagggagacacccacgatgagaagatcaacacccaccagaagccacaacatacaagcctatatacgccaagacaagccgccggatatcgacattagagatacgcctggatcgaccctatccggtactttcaaaggccggccttagggatctagcactgtctctgattccatcgggcgcgagttcgaggaggagggctaccctgttgtcgactacgagtcggaccttcagaccgccatgtcgacaacagttagataggctacctcaaatattgtactggtgtgattaccatgaataagagcaataccggcttcgaccaacaggatgtagggttattacctgacaattcaggggcccgaacctgtataaaaatccctgtctccatctcttttaccttagtcttgcatatatcctagcaccgacgatccccataccatgcaaataccagaattgtgacatcaaacgtcgacagtggcgcgccaggtagggggattttggtgcttcaggatttcgacgagatgggttcaaaagatggattctccaacaacaagctactcgatgacttcggctgtggggaggtctaatccgaccggaatatatcctccgacgagatcgggaccatcgccgccgagaaggagacgccgacctccacccggtgcagctgctgtcccaagtgcgacgcccatccaaggaatgccaagcccgacttggtggcagatcaatctgtatttgcttcgttcttgtgtccggttaggactggaattaggcaaacggaatacgtgcatgcatgacaaccgtgccgaccaatcaggactcaggagatatccatccacaggcctacatgttgacgtacgtacatatgccgatcggtttccaaaacctattcggtatatgcacatcaacacatgtctacacagcacgactgcataatattcaaacaaatcaacaaaggtatttagtagattgatttttataattgatctactaattccgtagatacatccggcatgtatctacaaaggtacgcaatattttatacacaatttatcgtacctatatttccaatttatacagtattgtcagatcaataatttattatgtttatctagagcatgcttcttatacaatatccgttgtgcgagtacttccgacgataggccaactatggtctaacgctgggggctcactccgttctcttatgtataaatcatgcttgtttacggtttacataatgcctgataattacatctgctcgttatgtcctgataatactagaagatccatgcagttttttgaatacatactcgatattatctactatatatcttgccttctagaaaatatttttcaggaacaattgagcactcgagtaggttatagtcgagtacactccattatcgagaacattctcgacaaatgcggagttatcacacccaacctaccaacgaagatcgacgacctatctcatagcaccggccatcgctggactactcgagaaaaggttgttaacggataattcctcgcgaacgtcgtcagcttgatcaccccacatgattgcgagcggacatccggatatgctgtaagttgggtatgtgagtcatgctggccacatgatatgcatatataataaaccaactttaccgcccctataggtgattaagagactcctactcctggttctcgaaccagtaaaacatagtgatctctcttgcctcactttaagtggtcgagttgcgactactgcctggtcctcgaccagcgacgtgtttctccggctacttccacttcaagtggtcgagttacgactactgcctggtccttgaccagcgatgtagcgtttctcccactacttctactttaagtggtcgagttacgactactgcctggtcctcgaccagcgacgtagcgtttctccggctacttccacttcaagtggtcgagttacgactactgcctggtcctcgaccaacggtgtagcgatttctcctactacctctacctcaacaaagttgatagtaggtacataatatcgccaagtgttttacccagagatcccttaccacgacgacacctagcgttgaaacctatcctattgtccctttacgccgtcttgacaatgcctccgaggaacctaaaggatcttcggctggggacgcccagagccgataaggccttgtcggatcctgtagagacaaaagaccatgtaagatctggtagtgtaagagttctcgccgtgcgtattaaccaatccgtgtaatcggaaactgagctttccaacttcacggctgggggctaggatcagtgcttattcaaccaaggcaggtcaagggtccaagagccttatcctccgagaacgattctccgacgacaaggctgggggctagggagagtgtatgactctacaaactgactgatcgaagtcggtaagagagaagacgctcatacacaaaacattggtcggtaaatttaattcattttcaatttaccatacatattataacatgtcaccctttgagcattcgctcgggggctatttctatttgatattcttttctgagtattgatttcaggaaaattctattcgacattatcgaagactccatgtctctatggttctacaccaagatcgactaaggtgagtacgacaaatgtcgacaaagctccgtcgcagactctacgccttctcgatcgctcgagaacggttgctggatctcgacaaggaatacagaatgaagagatggtgcacccaccgagataaaatttcttgacttcaatctaaattctcgattacagcaagacgagagacttagtcgtacgctctgtactttctcggtcgacatcagagattgacttagacaaaccctttcggtgcccgcacgaggctgacaaaggaagtccaacgttatctctaaactccccgagaacggtcacatgagctcgataacagttactccaatgtctgcgcgcagttgagaatatgaattcgttcatttgcatcgaagtcgggggctactgtcagggttatggataccacatatctaatagtagttgactaaatctcggcaggatccaccacataccatatcttatacggaaactgacctcgagggagttccggataaggaaagacaaccagagttctacatggaaacgataaggaatactcggattgtatctatattggtttacctagttctacttggacaaggggacacctatgggtataaatacaagccccctaggaggacagggagacacccacgatgagaagatcaacacccaccagaagccacaacatacaagcctacatacgccaagacaagccgccggatatcgacatcagagatacgcctggatcgaccctatccggtaccttcagaggccggccatagggatctagtactgtctctgattccgtcgggcgcgagctcgaggaggagggctaccctgttgtcgactacgagtcggaccttcagaccgccatgtcgacaacagttagataggctaccccaaatattgtactggtataattatcaagaataagagcaataccggcttcggccaacaggatgtaaggttattacctgacaattcaggggcccgaatctatattaaaatctctgtctccatctcttttaccttagtctcgcatatatcctagcaccgacgatccccataccatgcaaataccagaattgtgacatcaaacgtcgacacatatatttttcaatatggttttacttaaaatttattaaaagctatctacggcctgtgcattgtcttttctctttattatcattgggattttaaaaatcgaacataattatcgttcaggttcatttttttattttctagaagttccgccaaaccatcagcggctttgccattgtactccattatggctcgcctgctgcctcccttctttattgtcattgagatttttgaaatctaacatgattatcattggtttttttttactttttagaagttccaaacctttaaaaattggacattgtaggttttagagtttatgtcttgttgggtttcatgttttataatttttagaagtcctttcaagtgatgccactatacgcctctacagcccatctgccacctactctttattgtcattgggattctaaaaatcgaacataactatcgttggagtttattttttattttatagaagtcccgctaaccgtcggcagctctgcaactatactcctattcaccccgcccgctgcttctcctttttattgtcgttgaaattttaaaaaatcaaatatgattatcaatggggtttattttttcactttctagaagtccccgcaaccgccttacccgtttgcttcatggcctgcctgtcgtccctccttttaatcgttattagaattctatttgatgttttattaacagtttttatatgtcgtatcaaccacgaccactctactcctttataaccctgttacttaatttatcttcgtcatgcgttttagatggtcttttcgaacaatagtctttattttttaccaccatatttggttatttataaattgtattcctaattgaattttttttcttttttaatttcagatttttttttcaaatttttattaataccgtatagtgttcttttaatatttttattttttatttttgaatttaagttgtttcaaaattgtattcctacttgaactctcttttagtttttctaattttggatattgttttattttttattctgaattttaactaatctcatatcgggttcttatatatctcatatcgggttcttatatgtattcttctttcaatattgattatttgtaattccgaattttagttaattttaaattttattcctacttgaactctttttttctttttgctaattttggattttattattatttttattccgaatattaactaatctcgtattgggttcttatatggactcttcttttaatattccttatttttaattacgaatttcaattatttttagattttatttctagttggactctccttttattttctaattttggattttattttatttttattccggattttcattaatctcgtattgggtttttatatggactcttatttcaatattgcctatttttaattccgaatttcagctatttttatattgtatttctacttggactctccttttctttttctccgattaatgtgggaatttctagcccccacagtgaacgtggtgcctcctttcaaagcagttttaataatataatagatagataattagctctaaatgcgagcaccatgtcaagtatagaatcgaatagacaggctccaccaccagaaactcaaccagttgagttcagggtttacgattctgacaggcccttccgtttcgagctctggcggaattcggaatttcgtgaaatccggtggaaatccggtaaattccgaacaaatttcataaaccaaaacttgaatacaaattccctgagtttaccgataagttcggttttggcgaaattccgatcgaaatcatcaaaaattcgatcagtaactgagcctagtacatgcaatctagcacatgtaagtgttttctttttattattattttttttattcttttctttcctgatataagtttgagttaatacacacaatacattattttttaaatttttgttatcccaataggttctatgaatatcatagtatttataagattttatttgatttttttctttttttattaattctattttgaatttggatgaaactcctcgaactctcagatggtttctactttcgagtctcgtcgagccgttgaaatttcacgaaatcggaattgtaaacccaggttgagttatgcttactttgcatcatgaaagcattgtctcccccatcgtcataggtaattttttttttcaaaaaaacatttgtggttgtttcttttttcttagcttgcacactactcattctggcactagcagctagtgtgcacaagttttttaaaagaaaaaggtataatacatattatttttggagaggatatccgtacgaagaacccaaatttatgaatcacaaatcgttaacaatcaattgcaataacatcttttgtgtttttaaacctttgtagggaagaacggattcgatgggggggggggggggggcgccggctactttctaccacaaactcgatagcgtgcgcgtaccgtccgtccccccaacggccgggcctgcctacataccggacctaaccaacaaaccaactgggctggtgcacgcacacgcccccacgaacgtacgcacgcacgcacgtgcagtaatgagacgcaacaacttttggttattgcaccggcgcacaagcaaagtccgtcgtcgcagcaccctacagccaccaccaaaaacgaagtactactactgctctctgctcgatctttctctggaagggcgtggcagggttttggatctatggacatggatgtgtcactactcgctgcggcaacgcgtagtagcagtaggagtactgcgcaagggtatgcacatgcgcagctcgataggcaatacagctaggaatagtcacctagtattagtagccttttgccgcccgcggtgcaaaatcctccttggtagccgcgtccgtgcatgcatgcgcctcccccgaatcaaatctcccaactcctcccgcgtccgtgccttcgcatcgcgtcgcatgcatctccatgcgtgcagctacctatagctagcgaagcacccgtccatccatccaccagaccgacccccgtgccgtacgtacgtcgcgagaggctgcgagcgtgtataggtagagtacccgatctttcgctggccgcgccgcgccgcgcgagcgcgcgtgtcgtcttgtcacctcttttggccggcgcgccgctgcggcgatttcgcccagcgcgcgagagaatgcatgtgcgcgatcgatcgatcgacgtaacgagcaatctcggcatctcgcggggcgcggcgcagctagctagctagcgctgtacacacgcgcgatcgtgcatggccgcggctactagctagcggcaaggaaactggcggactggcggtgtgagtacgggaggatctgcttccacgtgcatgctagctgcgagcatatggcaaaggccatttgggtgcccatgcatgcacggatacgcataaaatggctattcgagcatagaccatgcatggtagggggtggtggtgcagggcatatgcagatgcggcagatgattagcggtaccggagtagcctttttagctggctggccaagctctgtacgagtacgcacatcgcagtatacatgctgatagatcacaaagatgaggcgatgcgcctctcgatcaggtcacaaagatggaactacgtgccacacgcaggtcgcacgtgcctccctccctccttattactcctacacacttggtggcgcatgcatcgcatgagattctcattagtactttcagctactttctgtcttcctgcatgcatgcgcggcgttggaatctcatctgtctaccgtaccagctgcaaccctgcaaactgcaagcgccctaaattaacctgccctgatcaaaaccaaagctatcacagcaacagctataatgctgtcgagattactacacctactccgtacgtaggagtagcattccaatccacattaaaaatgagtgttccataatgaggactttatatctttttgagctcccagttactatacatgtaagaatatactgtactgtatttcatgcacttattttccaatcgttcacctaaaactctggccagatgagcctatatcggtatatatatctcgtcttgagcacgtacagttggggctctatcaaaccatcccagcgtacatataacgtacgccaaacagttcggccatgagcccatgatgaacgtacgtgcagctggtacctggctacaaaaagggagcaattaatttgtttcgcctggtatgtatgggactagtttggatcagctgactgcaacttaaacagctgcagtgagcatcattggatgcaaatcggacggtctagaatctctagattacacactgcacagtccatatatagcactgtagcaaaatactgcagtacggagtcctgttcatattgttactatatatcattgaatttgaaccgttgatataaaatcggatggccaaaattatgtgtagtagttactccgtaactcaatttgaaccgttgatataaaatcggatggccaaaattatgtgtagtagttactccgtaacttgtagtggatctataaatttgtacatatgtacagcactgttcataatcagctatactctattgatttattggactcacaatatatataccagtatatgcagatggcagaactgatgcatgagaagttgtaattgtaataaacacatatcactactagagaaaggggctttagtcccggttaggaacctcctatactcccgattatacaaccgggaccacgaattcaggactaaagatgcccatttttaatcctgggtaaaataaccgggagtaaaaatccatttttaagtcccggttggtgttactaaccgggactaacaccaactgagactaaaaatggagccaggataggtccgtttgctcctttatttttttttcttttcttcattgtttttgatatattgatttcactctatcccccatccccgaatcgtgaaatcccaaatcaacaatccccaaatcgtaaaatcccaaatcgattgtcacctccaaatcctcaaatcgatcatctccaaatacatcacaaaatcttaaaaaaattacctcacaagttctacaaaattcatcacaaatacatcacatattcacatcacacacaaatcaaatacatcttagatccgaatcacaaattctaaaaaaaataacaacccaaatccggcaaaggcacaaccggccactgtgcgccggccgccgccttcagcctgccacagccagccgcgctgccctccgtgctagccgctcggccgccgccgcctgccagagaagtgggagcaggggggagggggagggggaaggagaaggagaggaagagatagggctagtgaggagaggaggagatagaaaccacacgcgcatgcctcctcgatcggattcgcgcgcacgcctcgatctccgtatatgccgatcttttttcccactacaaatagatctttataaagaaaatataagggtctgacactggctgccgttttttgaaccgggactaaaaatgatctttagtcccggttgatgttaccaatcgagactaaagatcaaaaagtacccctgagcttttaaaccgggactcaggtttttattagaaccaggactattgtgaaatttggccgaccgatcaaaaatagtttctccagtagtaccttttcttggtgctaattagtggggataagtactgtatatcattacggatttaatttatggaagtgaacaatatagaagctttttgtgcactgagttcaactagtagtggagcttcacaatatagttaactagataaataccccgccgcattaatgtgggaaattaagttgtatagtatgtacaaataagatgtaatatgattattaaaactaacaaattgatacttgtgaattttgagcctaaaaataatgcatggtgttatcggagaagaaagaagaga

SEQ ID NO: 7156 - DNA, 52782 bp, Oryza sativa
tgtcaccgcccagcgcccgcaccggcccggcccccccgcgcgcgcgccgtcagccagctgccgcgggcaccgcacgcggcgcggtcgacggcgtacgaccgaccgttcgacggagcgaacaccgctttgagatgcgagtgtggtgcgcgccgagtggtggtggagggggaagggggtgagggggtgccggctatataggcggagacggccgcccgctgggccccgcggtggcaggaacccgtcgatccgcgggggagggacggacggacgcgcggtggaacattccgcgctggcagatggggcagcctggctggccggctggctagctgccttggctagctagggtttccccgccccgaccgatcgatcgatcgatcccgcgccgcgccgaggcgcgatatgatgcgatcgcgccatgtcgcgcgcgcgcccctcgcgaacgcgaacggcttctggcgcaataaagccgagccgtgcgctgcgccgcgccgcgccggaggggggttgtgggctgtggccccctcgacacgacacgaggagggggaaaagcgcgcagcggcgcaggatatttttttgccaaatattgcttctctccccttacccgactttgacagtacgagagcagagagagctgcaagtccaaactgactactgttactctgcctgaccgacctgcaggctagctacaattcgcacgcgtatgtgtacagttaattaatggacccatcacccaagccacgacccatcactccatcaggttgcttttgcgatcgagatagtcaaaagagataaagacatctctccggccggctaggagtattacctccctaaaaaaaaaagacaaaccatgagttgtcgtgcacaacgtttgaccgtccgtcttatttaaaaaaatgaaaaaaattaaaaagacaagtcacgcataaagtattaatcatattttatcatctaacaacaatgaaaaatactaattataaaaaaattcatataagacggatagttaaacgttggacacggaaatccacgatttatcttttcgttggacagagggagtataagctagtgtcatgtcagttaggtcgtcctcttggcctaaggccctgttagttctgaaaacaaaaatttcaccctatcacatcaaatagaatatttggacacatgcataaagtattaaatatagaaaaaaactaattacatagttcgccgggaaattacgagacaaatcttttaagcctaattgtgacatgatttgataatgtagtactacagtaaatatttgctaatgatggattaattaggctcaataaattcatctcgcagtttcctggcgagatctgtagacaatgttaaatacttcaaatgtgtgtccgtatatccgatgtgacacatcaaaacaaaaatttttggaaactaaaccgggcctaagctggagaaattttgttgctgctaagaacaaattttataatagatgtgactatcacctataattttatttatgttaatatatctctacaaattaacatatacacgacaagttacctacaacacacaaatctcagtaactctaatttttttatatttttattgaattttgtatagaaattgtccctcgtacgaggggtgactacttaatttactctctcttcatttctctctttcacattagtaaatgagattacatggtatagaggatcataactgcttaaatgcttatagtggcccggtttagattacaacttttttttcaaacttccaactttttagtcacatcgaactttcctacacacaaacttccaacttttccgtcacattgttccaatttcttcaaacttctaattttgacgtagaactaaacacagccagtatttgacaaacccgagaaaatgcacagccaagatcgagtggttttgagtgcagcatcgcttgctccaaaaggatcaggccaaagagcacgagagcacgcgtcgaatagtttttttttttcgcgtgattgcaggcatgttgatgcagcaccaggggctacctgcaaatctacagtccgatcttcacacttgttgtacgtagctagctagctagctaatcctttgcagggtatggctagtacaaatgtctttcttccagtttgaggcatgccaagtggtggtggaggcagaattggatgcatgccacaccgctcaacttacgaccggtcgcatgcatgatacatgtgactgctactgggagctgacaaaatttgacacctcccaacagaacggctcagctatctttaaagcatgccacatgagcttcaagacgagatagagctgccagataaaacttgtactccctccgtctcaaaaaaaaaaagataaaccttatagattttcatgtccaacgtttcaaaaaattataaaaaaattaaaaagacaagtcacgtataaagtattaatcatgttttatcatctaacataaataaaaatactaattataaaaaaaattatataagatggacagtcaaacgttggacatggacacccaaatcctctacggtaacacacaggtagaatggtgtccacaattacagatgttctttctcatgagtgatcatgtttggtatcgagttagccaaccatcagtgataggcttattggtccataacaaaatcggtgggtatgtctagtgaaatatgagcctactatgatattaggtccatcacaatattgtactattgatcggtattacaggctctaaaatccagtcagccttaatcgaaagaggattaggatggtgacgattgaactgtatactttctagattaagcctgggcaatgtacaggatgttgaggggtggatgatctggatgaacctcacagtcctcagtgctaaaggagtagcgcctgggacgagtaaaggcaaaattaaatcggttccatcttcgtatataacatatatgtatgtacaaggatgatttttgccctagctaatttgcacgctctttttttcgcatgtgatatctaatcgcatacatgacatagagagaactagaagcaaataagacaatgggttaatttttatgtagacaaatttagtggtttgggagtgtatcaaagagagggaatgtggctcgggtcttgttcgaaccagggcaagctaggttacatgttactggcttgacagacaaactcatagtttttacacaatgtcctaggagctcggggagttgtgggccccaccaggcctttcctcccaggggcttggggcgttatgggctccaccaaggcctacaaaatttgcatcttgaagttgttaagaagagtatcgagatctacaagatctacatcttcaaggtttcaagaagagcaccaagccctacaagatctacatcttcaagttgtcaaaaagagtatcaagacctactacatcttgtaggtgcaggagcggtcactagtgggtaccactgtctcgtccaaggacatgcccatcatgaactccttcatcgacatctttgaaaatttcgtccaatacaacaatgaaatttacttccggcaatgggagcactctaaagtgtccgggtgggtgccccaaggactcagcttgccaagaggacacaggttgacccgaacacagcagccagccgatgacaagcatttagtctctcgggccttgagcactaattagggtctcccgagcactccttgctggggttcatctcattaaggaaagttgttcgggtccagtaatcacatttaaaccactactttacattaattgtgaggtggttcaagattggcgtacaactcatacgctatttggggggcgtgacggtacacgcaaccccttgcatgcccacatcgcccgaagaacacaaggcatgcgacgttgcacttcctcaacaaccatcccatgggcccacctctactggctacgatggttgacggatggtcctagggacatttggaacgaagacttttaactcccctctccacttgttagtcagtaggtgtacctgccacatccggtcggcttgcttggaaggaaaaacgacaagactaagcatatcaattttagagtagtagaccctactcctgcatgcatgcaacaacattgtggactccccttcacatataaaaggaggatccatgaaaaacaaaatgtttgcgctctcatctaagctagctaggttagccaaacatccagtgagtaaggagcttttcctcctcacttagtttttcttcccacatcactttgtaattcctaagaacatgcatagtccactgcacaggagtagggtattacgtattcatgcggcaagaacctgcatatttgcttgtgttcatctctaccacgcaataaaaaactcgggctcagaacttacacccaggccgaaactcacaaatgaggagtacttagcttccctgctagaggagtttcacatactcactcactcactctctctctctctctctatggcgaaaaaataagcatcattgcaaaaattatcaaattatcggttactatttgagatgtcctcgagcctaggcacattttcgtccatgcaaattaagaccacaaatcctatagcattttttttcatgaaaacttttaacatatatactccctccgtcccaaaataagcgcagctatgagtttccgtgtccaactttaatcgtctgtcttatttaaatttttttagaaaaaactaaaaaacgtaagtctcgcataaagtactattcatattttataatctaataataattaaaatactaatcataaaaaattttaaataagacggacgatcaaagttggacacggaaacttatggctgcacttattttgggacggaggtagtagtgtttattaggagcattaatgacgccttgaatgctatatcacaagttcacaacattagggagtccattgactatctatgaccctgttggttgaggactaacgttgtcacacattttttttaagtaaggtgacttagcttagacatgtcacatttttgtggcaaacaaaatgataaaccatgcttaaacaaagttagataaaaaaagttgggtcagatgattaaaaagttagataagtcagagttgtaaccgaaaccaaacaccatctacttaaaaatataatttatctaagattagatgtggtgtggtaaattcagttaccaaccaaacacgtcctttctcttcgtcggctacccaaagccacccatgcatctactgttaatttgcatcggaaaacatcattactactactccagtagctagtacgcgctgcagttgtgtgcatccgaaaacatcatcacgatataatttcacgtgcgccgacaaaagccttccattattgttcactgtcacaaatgttttctctcccgggatctaaacatcactgaccgatcaactcgcactgtagtaactaattgtacccggctagctttacgttcacagtacaactccacaaacagtaaaacaccaacagtaaacacaccagctgctcgttccaattacgagctactcctaacttattagagcaagtttaatagtataatcaactattagctccaaattatctagagtcaatgtaatagctaattcatacaatagttgcttactatactattaatacctggtcccacctatcatacacatgctacgttttggagtccatactgtaactggttacagatatgtaacctgctgcttttttttcttttttttatctctttaaaatatatttatagctggtttataacctcttgttcctgctcttagctgtttggtaggcaaggcacgtagctccacaatttttcctttgctgtttggtaggccgaggtcgtatagctccacaaatttctcctttggcacggttctcgagtgccgagatcggaaatgtcctcttcctctaggctttcctcttttggtccgttcctaattggccacgattaagcttcacatggagctcgatcgatcgaccgatcgcgctgtcccagaagataagccgcgcccgctcgcgtcgcttcgaggaaacgaacacgccggcggcgagatcgatcgagcaggaggaggcaggaggccagagccactctttgtcgactcgtgattggccgcgcctcgctaatctattgtttaatttaatttaagagtgcttaattaatcgtcagaaagataaaagcagccctgcttttaaattttatcggttgcgagacatgcaggcagggacattattggagcagagccaataatgatagttaattaagtactatatgtactagtggattggttaatcagataatgtgttgttaattagtctgcacaatgccgaagcttttggccgggtgagcaggagctcgcatgtgcactgtgcacgatcgatcttgcgacgaagattttgtaattcttaaggtagatcatgtcgcgctaagtgctcgcgaataggatcaatatttggtggtttattttgggaaaatgtggttttggttttcttagtgtacagcgtcaggggtaagcatgcatgattggaacatcacaaattcggctcctcctcctcctcagactctaatactttatactcctcttgtactttagaacaatagtaatcactcctcttgtactttaatacgatagtaaccgctccatttgtaaattaaaacaccaaaataatcgctcctcttgtactttaaaattaacaatctgcaatggtacaattggtacgtcatatgtgtgcttttcgatcgaagtgatagcatgcatgcatgctcctagccctaggttcatagaaggtcagtcagcggcgttctggtcccctgtagtaccatattctactcggagcatgcgtgaaggactttggaatttgagtgtctcttcctgctattttaaattgccatccaatttacagtgagatttggatttttggaggcagaattaaagaatttaaataaggcatggtagcatcactactcagaattctgatattattccacctgttataaaagttagtcaatatagcggaatgacgactaaccttctcaatcgcttcagtcattgaccacccaagacatgccagatgacgacacaggaacacacgatatttgttaacgacgttcagccaaaacctacatccctggggctctgattatgggcgctcctccccaaccaatatagcttctaaccgctatgagtccggtcatggcctcgccgccatcatctctctgcgtgtctacgctctattatagtcgccatggttacattgtggtaccccctctctatttaagactaccaatttatttccctagtacgtccatgtaggcttcgatcttggaaattcagtgttaatcaaacggcttaattagattatttttattttctcgaaatggcatggaatcgctcttgaccccgcagcacaacttactattggtccaagcagcacccactctcaaccttacaatatcacctcaagatccagatgtagaaaaacaaatgaagtggtttctggttgccttttccaaagcaagaaatttgtaatagtgtatagacatgattatcaaataaccactttaatatacgaagaaaaagtcttagattcatataaaaaataaaaagtcttagattcgacaatattcgatagctggcgtgtcgttggtagactatacatgtataattattaaatagaaaagtattacaacttgcgagatgcgtgtcgtggttcccggttgctttttttcaaatttgaaaatttataatgtatagacatattattaaataacactttaatgcatgtagagaaagtcttagattcgacaatcttcggtagttgttgtgtcgttgatagattggatatgtctagttgtattaaataaaaagtacaacttgcgggatacatgtcacagttcctgctagttaaatattgaatccacatgctactataaggtaagttgtcacgagactaactttatgttcaatatatatataataaatttctaactggacggtcataaacgatctatgtgtcgagaataaactggtccgatctaacccaaaacctttaattgactatatccacaccactactctacaaaccaaattgaccgaataacatatggatacattatattttggattccaccggttgcacagcgtgtatgcatgcgtcgtgctgggtttgtgtgtgtggtcctatttcgtgctccatgcatcgatcttgtttttgtgcatgcaatgcgtggtccatgcaccaccatgccgctttttgaacggcggtctgagacatatacagtagctagataactataccagctatagctagctcagcgagatcgattcgaactcttttgaaaaccaagttgtgagatgtgcgagcctatatagcataaagtagtgcatacctatacgaatgcaaagctagagacgcaaaataattggctaacctatacgaatgcaaagctatacggtatatgcatgtactccactctctcctatagctagctactattcgatcgacaggtgtattggcacagtatcttttgccaatctttatttttggcccctgcagggttactttaattgtgcgcgtgattggtcggtccgtagctcgctgtagtgtgggcaccaccacacacacacactgtgtggccccccctgcgcgccctctgccactgcatgcgcctaagctaggaagcaagatccatctcctccatcgctagcttgagctgtcatttggccgcacgtctgcagatcgatcgatcggtttttgtggggagtagatggcatggtcgccgaccgatcgatcgacggcgagaccttaattcgtacgatcgatgcggcgccgtacgtacgtacctgcgtgcgcgccggccggcgacagttcgtcggtcgatggatggatggatgcagagcgcgagcggcgcgcgccgctcgtagctggtatagcgatcgagctagacatgcggcatgcgcgcgtggtaggaaacgatgtggagacggcaagaggagacaaagtcacaaagagagaccgatgtactatgcgtgtttgtgatgaccggcgtatgcggtaattgcgtatgccgtgccgacacgatagatcggggccgggccaagtgatgatcgtacgtaccttcctgagtcctgactcgtagtctcgtactagctccgtccgttagtcgggaaagtccaatgcatgtgacgtgcaagtgtacctgtagtccatttagcccctatttacttcacaccaaacttcccccaaactcccaacttttcattatatcacatcacatcaaaaactttcctactcacataaatttctaactttttttttccaaacttcttccccaatttcaaaaactaaacacagccttagtactgtatttgttttgaaattcaagcatacatcgcggattttaataacgtatacaatattgtattcctctgcttgtggtaacatatatactagtagatcgtagtaaagcatatttaattgcttagcctgtagatgataatatgatatgcgctagtgcttggtaaaaatcatgttctcattaattatttacaagtttataacgttgacacaatttctattgtacatattttaccattgtttttctaattatgaatttgtgaaagtagttgaaaatacaacaatatgaatgtatttttcataacaaattagtactactagtttcatttttggataacaaatattaatatatatattttcacatagtaggatttaaaatataaaacattaacatcatcattatttttttctgattctcatcgtgtgtctacttaaatagctgcctctcagattatggtctatttggtcgagctcgaacttcaaggaggtgggtctggagtggaacagcctaaacccagcttcacctctctagttcattttgtgagagcgctacacctagcttcgtttcttttttagtggagctgaaactgtttggctggcttccagctcctaacaaacccttagtctccagctcccacacactacacaaatgaccgtaatgtgacatcgacagaaggaggtgagagagataaaagatgggaaatgatgctaaactctcgagtggacaatattccctcgattttcatatcatttaaatggttatatatttattttagaaaaactagcaagatagataaatataagatgtatcacttcacaaacatataagatcgaatttaacttcctataattcataacataataaataaatttgactgtgaatgtatgttaacaagctatagtttagtttgttctttttgttgcaacttgtattggtagaatttaacttatatgttttagagtgatatatcacatattaatctatctatgttatcttttttttataactattcggatgatatgtgagaggatattttctcgagagtttaaaatctatttacaaagagggtgtactgtacgagtgcaaaaaaaacattatgcattattattttcatgtggcacgataaatactggtgtcggagaattgtcgtcgtccttcttgtcttcttatacgttcttcacctctctctattgccaacaacagtagccattaactgagcgggatatctaccccctttctctctctagatctctctgtcttaactgaagacatgcatagcactactttagtttggtcccttcaaaacatgatgtcttgtgtacaatgattaaaaggtagggccgctataaattcctatctctgtggagtgagccagatgtgtagtacccctatttggtacgccgcttatctctccacccacccaaatgtttcctgatctggcagctttcatgtggcttgcctggacgtgcgactgtctgctcactagctccaaacaacgtttaagtgtccccgatttgagaactgaccatctcccgattttagcagcacatatactccgtaatctattggtctgtacatacattaccacattcttattgtctttggtactcttaacaaattccaagtgtgtagtattaaggatgcacatgcagtatgctcctttttttttctaagaaagaaaaatataacctgacctgaaacttataagattgtgtggtatgctccgattcttcaacggaaaattgataactgttgcccttcgctttattcatatataactgtcgtcgtgggtcagatggaaaattgagcaagatgggggcctcccaaatcttctaattgggcctttcgcagcccatccaaagattgcccgcttcaggaagcccgcgatgccgcacgtcgttgcacccagcacccgtccgatgcggacgccccaaacgcacacgcgcttgccgatctagcgtagccggccgggccgttgcgcttcggcgagctaacgccgggcgcgccgagatccatccaccgaggggaagccgtgcgtacgtgccgaactgagctgcgtgcgcgagctcacgcggaggtaacgctcacctcgccagaaaacctggcgatcgcgcgcacgcaccgcatgtcgtacgggcggtggccgctcgcacgagcgcgagtcgcgtgccatccagctacccggtggtcccggtccctgccgcaacgcgggtctaggccgaggcggtaagacccaaccctgccatatctttgcggcgcctcctattccgtcaaggcaggccgcagccggcaaatccactgtgaactgatccgacgagctgtgtgcacggggaaacagggtgaggaataagttcactttaggtcccttaatttgtcaccgagtaggaaattcatccatggactgcaaaaccggatacaacgcatcccccaatttacaaaatcgtgcaaacgaaatcccttggcagtattatactccggttttggctgacgtggcaactatgtggctcctttgactaggtcttcatcccacgtggcattgacgtggcgcttacatggcaattcgatccgaaaaattgataaaacaggacctacatgtcagtttcacatacaaaataataaaaaatggtaggtccatgtagcccacatgtcatcctcactactcccctattctctctatcctctctctccttttatctctacccccctctctccgacgggaaagcagcggcgcgcaggcgctggccggcgggaggagaggagccataggcaaagcccgaggggtgagcctcctccctctccgccccccttaccgggcggtgagcttggtagagccagagccgagggggcagggatctgagagggaatggagagggagaagcggccgcttcccacgactcctttcctcccatcggtcaacgctcgcgcatcactcctctctcgccagccactgcgcgccacttctctcccaccggccactgtccgcgactcctttcctgctggccgccgctcgcgtctcctttcctacccgtggctcctctcttcctgccggccggcgcttgcatctcctctcccgccccggcgaggtcgatgaacacggcgacatccttctcatccacccgacctgctgctctacctgcggcctgccgccgctccatctcgcttggcctgcgagagagagaggatagagagaagagtggagtagtgaggatgacatgtggggacacatgggccccaacaattttattattttttgtgtgaaactgacatgtgggtcccgtgggttttattattttttcagattgaattaccacgtaagcgccgcgtcaagagagccacgtaggcgccaccgatagccaaaaccggggacaatagtgctgaaggacctcgtttgcatggttttgtaggtaggggatgtggggatgaatttcgaacttggcgacaaattgaggacctgatgtgaacttattcgaacagggtaaacccatgtcagggcaagctacgtgcgtgtgcacgatgacgaaggtttgtctgaaactctgaaggcggccacaggccacttattcaacccgcagttggttgctgtggactaccgaggcacccatttcagttgtaccatgcgttatggacttccacctgctcacggttcattgctagcacaaattttcgccggacgattactagcagaatttagtactactctgttccggattaagcttttggccaacttgcgggctttacctttactttactgaagcaatcattaggatccaattatgctttgcttccagcaaagtacaccttgaatagtatatacgaggtttagtacgtactttgatgtcataatcactgtagctagtagagtatccgaccgacaccagcccctctcgctagaatgttgcacacaccgagtactctgaacttacaaccgacgagcaacagattcacttgcttctcgttctgaattccgaaccacttctgcagattcacaggcctagttgggtagttgggtaccacacacgttactgcttagtgcttacttgcaaggttcccttcgagggtgtcctggcaattttccctctgatctgcagctctttactcttgttgtgcagttaccagatgaattgtagtagtagtagttagtctgcgtacgaaacaacaaagattgatatgtgcaaacaacttccacacaaccataaatatacatttcttgcaatctttacacactcgacacaagctcatcctgtcattcattcagtcagtagtcagtaggtacgactgaaaacgaagctatctccctgcacatcctgattcgccttaccttacgtttcaagtcaaagcatgtcgtgagaaaatttatcggatgtctgttcgtttgttcgattgtttgtttgttttctacgtaccaaactctgaagcgaaacgctcaaccaccagctgctgcaacggtgcttcaaattggacgagtggtcattgctgaaagagagagaacggcattgcgatttgcagcatattcagaatgttcatcagtggtgacagagctcgagacctcgatccgtatgtgatatgtttgctacttaatacagtagttagttagggattgcatcaaaagcagaaaacagaatgcaaatgtgaggttgttaatgtgaatctagcgcaggttcttttaggaaaaaagatggctagttcggaaaatgaggacaggccaaggagtaggcaaatatactagaaggacaaaacagagagatccgagcaagatatgttcgattcttgctctcttttctactctgctttttgtttctttcctcgattttactcgcagatatggatagcaagcaggtttgcaagtaaaaggtacaaacagacaagttaatcacggtgtgatacgattatgacatcttggggcatcataatcagtggagagcagatctttcgccctcaaatatttgcaaactgtagccctgaaacatccggcaactatctgacacaacagtttgaaaatgaaaatgattttgacagagcaccaccgaaaaattgactactgatgtatcaaggctcagcaacaacaatcgttgcttggtgatcattaacatcacaaccaattgaacaggagtgacaaaggataatgacaaagctgattcttgaaaatgacagcattccactgatatctctattctagtagtaattactaggaaaacattttagtaataattagcagtttttttccccgcacagcacatagcaaaaataagttgaattagattttaatacccttccttttgtttgtataaacttaattttatattgtacacaagcatatcgataaattacaccgttataacgactcaccgcgatcaaacagtgcacatctatctctttttctctaatttaatgtgtaatttctaaactccaattttgccatttggatgacacgtgaactttttactcctaccgataacagaagttacaacgtgttgctctgccagtttctctgtcagtagtgttcggtaatcatcattgtcactcctctcttgttacagagaccaatcccaatgatggtcaggtcagatgatcggcggcggcgacgtctcccagacgtcgacgacattctcctcgttgtgcagggcgaagaggcggtcgccgccgatcgagaagtcgcagatggcgccggcgtcgctgccccgcagcgtcgacgtcagcacgtggtcggggccactgaacaccgagatggtgtcgttggtcgacgcgaagagctggccgccgtgcgcggcgagcttcgggtagcacgtctcctcgccgcgcggcgccgccttcttcttcctggcggcgagcttgctccgcgacctccaccgcacgccgccggcgccgccgctgctccggacgtcgaggaacccgaggtcgtcgtactggttgatcacgcagagcgaccggccgtcctccatcgcgatggcgtgcagcacgtgcttgtcctccagcgacgccggcgtgccgacgtcggaccacgaccaggcgacgttcttcttgtcccggaagtccagcaggctgatgaaggaagagtccgtccgcgggaacatggtcgccgccatgagcgtgctcgtgccgtcgagccactggagcttgtcggcgtcgccgagcgcgcagcccggcggctcgtagaagaagtcggcctgctcgccggtggtgcagtcccagacgccgatgccgtactcgttgaaccggcccttgcagctcgcgaagaccttgcaccggctgtcgaaggcgagcgccccgggggtgtaggacctgacgtggcgatcgtgcgcgacgcggaagcggtggcgcaggtcgccggtgagcgcggagaaggccgccacgccgccgtcgcgcctgccggtgccgggcctctcccgcgcggcgacgaggagcgtggcctcgtcgaggtaggccgcgtcgttgaccggcgcgtggtcgaggtgcacggcccggcgctcctccatcacccagttgtacacgcgcacggcgccgccgtgcgcgacgcagcagccgccgtcgggcgcggcgcggacggccgtcccgtcgcccgcggcgctcccggccacggacgccgccagccgcagccggtccccgtcgaacggcccccaccgcgcggcgcggacgcggtcgaggagaccgtagtagagcgcctcgcggcagagcaccccgtcggcgacgtggggcggcacgtggagcccccccgtgcggagcaggtcgagcagcaccgcgaagcactccgggtcacggtcgatgaagtactcgtccgcgccaccctcgccgtcgccgtccccgccgccgccgtggttccaggaggcgtcgatcatggcgccgagcatggtgtcccggccggcgctggcgagcgtggaggccatcgtctcgaacacccggcctccgacgttgagccgcacgcggccccgcttccccttcatggcctcgcactcgcggggaggtggagagcgagtggcgcgcgcgacggtttggtttggttggggttggggttgggccacgccctcgcgtcgcgcggctgcagtggtgacgcggggcgtttttgcagtgggttcccgtataaaacgggctcgcgcgcgtgccgggccttcaggtggcgggcgggtgaaccggcggaggatttgatcgggtcgcgggagacgtcacccaaccccacgggtatcgcggccgttgctttcacgcgagacgggggggagtggcgttcggggttggggattacggtgggggcggcgcgagcggtggtggatttgggggacttttggggcgcgtggtggcgtcgtctccgcgactcgccgactcgggtggcagcgcggtgaacggcccaagtgagcgaggacggggtacgagtccttgtaatggtcacgtagtggagtagaaagttgtgtttgtgtgggtcggttggagttggactggcacgttgcacgcggtcggagagcccccacgatcccgaaccactccccgttctaccaatgcgcaccacggcactacgtagttccaagctttaaaaagaaatgaaaagctccaacattgccgagtccaactagtgctaccacccaaagaatttgtataagtataactacagggcgctaagggcaggtacaatagcatggtataagccagctataagcatattttaaagagataaaagaagagatagaagagcagcgggctacagatctgtagccagttgcagcacggactctaagacgtaatgtgtgtatgacaggtgaaaccatgtattaataatatacttcctccgttttataatgtaagtcattctagtattgcccacatttatatagatgttatgtgtgtctagattcattaacatcaatattaatatgaaaaatgctaaaatgacttacattgtgaaacgaaaggagtagtaagcaactattgtatgaattagctattacattggttatagatgatttggagctagtaattggctatactattaaacttgctctaatgggagggcggttcacagttagcccagttccggaagaccagcggatgcggaatttactggagaatcgcctctcgctcgtaatcccataaagcacggcctttttgtcatttaacttccccgcaaataaaaaatattggattgaacttttaaagagatgatatgcactaacctaggatatgttaggcacgtagctcaatcatggccttcgtttcttctggctgaattcaggcagcctcacagctctgcaaaggacggaaaagttaacaacgctacgctagctgaatcatcatcctcatcatcaaggataaaaactgggactcaaatggcacatcccgcacgcgttgttgccgatccaagcgaggcatgcgaggtgataggatcacccgggtcccggggcgacgaaaaattgtgcaaagaaaacgacgcgtcctgcaaaagggaggtgagctgatcaagcatcgcacttactaggtcctatcctggtcgactccactgtcggataacattcacaatgtttcttgtctgacgagaccgtgttcttttcgtttttgaccggcgcaaggcagtgcatgaccccgttataaaacgacggcgaccatctattgcaaactagacatggacagctgccgaatcccgctatcgcgtctcggcttgaagagagattcaattccaatttcagttgactcttatgaagatatatagagtttactagtgtcaaattgaccagtaggggactgaaacattgcaaactgaacagtttagacctaaccccttgaccgatgatgcttcccagatgaccaacgaaatcataagccgttgtttctgaaaaattaggtgacgttcatcttgtaacgtgttagttgaccactgaacatcttttctgtcgacttggagatgggatagttgggagaaataatggaatagttgacctggttagtgtctgcctccgctatggcatgagatgagaggagacgacgagacgaccgaccaagtcaatactagttgataatggtcgtgccgtcatggacttggtagcccactagcccgaagaggaacaagccgtgtggcctcatgggtatgcactatgcagtaatctgaacctcaatttccagacgtttgtttccataggccatgtttagttcattggccaatttttttttaagtatacggacacacatttaaagtattaaacatagactaataacaaaacaaattacagattccgcctataaactgcgagacgaatttattaagcttaattaatctgtcattaacaaatgtttactgtagcatcacattattaaatcatggcacaattaagcttaaaagattcgtctcacaatttacatgcaaattgtgtaattgattttttttccacatttaatgcgtcatgcatgtgtccaaacatttgatgtctatttttgtccaaaaatttttgggatctaaacacacccatagccactgaacgaatgcacaggggccaattcttacatggactgttattggcttgttgttaccactgttaagactaaaatatagctatttctagaatacaaatttgttttaaaatgcaactatttcttcgccaaatcctctcatcttaaccaatctatccctatttaatttttctattactttctcttctaaatcaatcataacctttcaccattcatttatcctatctaattccttaattcctgtgaaaaatctaaagaaatgctttacatttaaggttgaagtggcaacatgcaatctctataagttgtgataactttttacgctggcctttatcgatgatataaatgattttcatccaattccaattgtaattaggagtggccctttaggtttctccttccattaaaaatgtacctattttatattttggtttttccaaataagttagttatatttgtagtcctccatgtatctaagatttaaatgaagagatatattaaatgtttgatcaaaactcaatgaactatcttaaaactatctttattacatgtaagataagttaatttctttttagttttagtaacaaagtaacatgtgcaactttttgaatgaagggagtagagctttaaggcttagccatacctctcatggataatgctggaagtgcagagcttagccaggccgtagtcagcttcaacatggttgcaatctgcgacagggagatcgctgcttccactggcatatataaaacgttgaacagaataacataagtacagaattaagtatgccaagataaacacaatgagacaacctgacagttgtgaaacaacctgcagagatgacagaaagcagttagcaataggcatgatctcccaaaagagacaatagacgaaaaaaaaaagagaagataatgtatactctactcgcagaggaatatgagctctgaaaaacaggatttcttaatggtgccaggcagggctgacagaccggcacattagctacaaaactcatttgctcatatggcctaaataaataagacatcaacaggctagctacaacatcatccgacacaactatgatgtcattggcctcttggcaagcatggggttcaaccaaccattaaaagttgcgcacttgcgcctaacatcacaactacagcatttttatcttgtctacaacccctagttaaaaccgctacatgcccaatcagttggcattccaataggtcacccgaccgaagagttacaaccacacagggtgcaatgttttaacaccttttgagactaagcgaaccttttgagtctagagagcgaatccatgtacaagagaaattagcgggtaacttcaagccttccttctgcgcttcttttctccagtagaagcgccaccagcggatccctaacttcaagccttccttctgcgcttctttcctccagtagaagcgccaccagcagatcccccctgctccacttcagctgctgcctcgccttctgcttccttctgcttctctttctcagctgagacattggccttagattcctcaccagccaccgcagcaccggcaacctttggctttcgacctggcttggctcttccttcacttggtttgctctcacccttcaaatccttgcctccgctgctagcctcctttggtttactggcactcttgttgctaccatcctcaggcaaatcatcctttgtcttctcagttgacttagtggctttgtcttcggatccttcttcagcttccttcttaaggtcactgccaaccttaggtgtctcattttcatccttccttgcagctttcccctttgatttgcttgaagttgccgagatgttacttttgggtgtaccattgctggaacctttcggacgacccctttttttgggaagatcgcctccaccactgccattaaacagaaacataagtctcagaaaatatgtagtcaattgtctacactgcttctttgattaccaaattaccttttaggtgtttctgcatttccttccttcaattgcactgagctccctcttccttttctgcccctaccccgtggcttcggggaacttgaaacaaccagtaacacaaatttatcaaacaaaataccacttgatgcaaataagtatgacaaattagtcacaggtttcacaattggaataactagggatgtttgtgggaatcccatttacttcacacctggaccaaacggtgttcaatttagtaatttttgagttaatttgcatggaaacgaattaggatggacccatgggctggcacaacccgacccagtcatccctagagaaaactaggaattattgggtgtttgtaaggaatttgctgaattcccaacacagtcaggacagcagacatttctctacagttctttttaccatggccaaattatgacaaaaaaaaacttagcctattcagcaagccaacatagcttataacaataggaggtgccaagcataatagaactcaagaaactggagagaaataaatcattaaaaaatgcactggatgctacgattgaaaaccagtgattgaatcaataaaaaacttgaactgtatagctaccataaatgcaaagtaaaaatgtgattttgaagttgcaggtatggaagtggtgtcaagataattcacttacatctcggaagccacatcaggggttttgtcttgttcctgatataacaactgctaattagtttaaaaaaaaggaagaggagaaagcagaatcacaacattaaatgcaatctaagcagaatcacaacattatgtgcatacctcactgacgaattcccacttttcatccctaaggagaagcacctctacatctccatcatcatatgcaatctaagctccaaaagtacaaaaaatcaaccatacaagaaaaacagaataaaacctttttttaccaagagaataaaacaatattttaattggcataagctcttcatgtaggtcatatatcccatgaaagcagatgatacaatgtacagggctcataccttgtgcctttttgaagctgtatcaaatgagtcaacaatgcccttgtaaaacctgcaaatatttaaaacaaaggacctcaaaattttgaaacaggatacaaaataacccaataaattgtaccaaagcaaaggacatgcctcatcaataatgagcaaatatattattatttgattaaaacatcaaacaggactaacctaaatactaagtcaatgttaatatatatacaccatttagaaaaagctacacagcagatttggaattagaacagcggaagaatagaaaggcataaagaagtaaaaaagatgagctagcaaatatgccgtgtgatgataatgtctatatatctggttagtttatatactccagtgtcaacatgaaacatggcaacaattgtaaaagatttagcatagagactaatgatcatatcacttacttcttgtcgtcaggccaccatacttggatccttgcaccaacaaggctagcatcaaggcctttattcttcctagaacgaggagtctgcagagggcatataaacttaagaataagaccaaaacataggagatgttaacaggtgtcttgagaaccaaacatcttcaagctcaactataattacgcttctaaaacattgttatgcattaagtgattttatcctaaatcacctgaataaactgggatccctattgaagcgtatttttttatcctaaatcagctattgaaggttgttacctagggtgtgcccagaaaatataatcaaatattttttaacacagatttttctaacacagaattaccagttttgaagttgaagttgttgcaacaaacaaatattatatttgagctattgcaacatcattctctacaagtcagattattaaacagaaatttagtaagcacattatcttttggcacaaaaagaaagcaacatgctaacttaaattacacctttatgagtaagcgatcaaatgaaatatgagcagagaaaagcacagcagacaggcaacagaacacagagaatcaactaatcaagaatgcatgcataatcaagtgcatacctcttgttcatcctcttgtgaccttttcctcttggagccattattgtcctggccttggctgcccttggtcttagctgaccccttggacacggactttggagagaccatttcctttattgagatagaacaaacagtacaacaaccagtgtgctaaaaagcaactgaatagatgctattaaattctatctgttttgaattaacatcaaagataggatcaaatcacaattgaaccacactaaataactcctatatactcagtgttatagcaaagtttacaagacaataacaggatttgaatcacaagcaactgtatcagtaaacaaaagctcgtaataccttgaaacagtaaacacactcaaaacatgtttcagatacacaaacatagcatgccagagagaaatagtattaacaaagactgaataatgcagcaaatcaatgctaaagacaggcagctttactaattatacaaaaaaattactactgacaagaaaattacctttaggctcagatccttagcagtatcttccttggagtcagtttcatccttctgtttcaaactgatcttttgttgcttttttgatgaccctgctccacttgcctttcttgtagatgacttggaatcatccttagatgactgcttcgataacttccctgttgaatcagtagtctcctcaacctttttcagacctagaactttctttccagcagccttcttctccaatgactttagtccaggaggtcgacctctttttgatttgaccatagctggtgagccatcaacacgttctgatgtttcagcagaagctccattggcaacctttgctgactgcttaacaccatcctttttctctgaatcgggattggataattccttgggattagcagctgcagattctgtgccttcagtaacaagattcaacatatcagcatcttttgtatttacagaacagtaaggttgttcaaggcttcaagcttatcctttggaggtgtccttaccattatcaactggagttgcaccactgccaatagcagtagtctgagtaacatcttgctccaactttgcaggttcctgaaaatagagatggcacggtgtattatcaaaagttcatttgtttagttgataaaaacagaaatgcagagcagcatacctgaggtagctcatcagaaatagtcctttcagaaagtttgccatcatccacctgaacattattaactcaatagtaagaatagatgaatccacatcaagagcccatgtggccaatttgttttccagtttcaacgataaggtgttgaaatgagctgtatattaagttctgagactaatattcacaccatcacaaagtacacccgtacactctatagactaaagccaatcacaatttcatcttccaagtgatccattccaatataatgcagagagcattaatgaattcaaggcgtatttcaaacatactaaaaaaattatacacataatgacctattctaacacctatgattatcacatagaagtctaaggtaaaaaagaaacatctctgaatattagttgctgcatgttagtaattcaactgaccacatcttttccagaaggatcagcatccatgtcttccttgacatctgaactgtcttcacaaattgttgcgataatattgtcatattcattcaaggaagtgcctttaagtaactgcagaaagaccggtttcagtttttcagagcatgcacctatcaccttctctgcaagttcaaaagatgcagcagaagtttcctggaaataaaaaccaaatcaattagatggtatctttttgtctgggtaggaatgtagattcatattgttgatgtcaagaaagttaaaaacatatatatgtaccttcagttcggacttagcatgcttgagcagacattctgcaatgggtatctcaacttcatcatcctcttcaattaccaaaatcattattgtagtcatacagtttgtaacattttctgggtgatttggtctgaaatatgagacaagggatttcaaattatgagtgtacatacaaagcatacaatgcagacattaaagtataatatctaacaaaaatgtgttaattatcaactggccaaagtagtaacacaagcaagttatttaggtaaaaacaatgtaatcatgaaagatcttaatattggcgatttagctcagactgatgactttaaatacagagtatataagaagcctataagaaaaacattgaataagatctgtgcagaacagaacagccaattgtataaaaaactatctgatattcttgttcttgaagaaccgttacaggtaagaactatgttaaggaaataaaattgactcatttagcattcttggagaacataatttagcaaaacttacttcaaacttatcatgagaactagcaaatatagatgaaattaagaacaaacgaagaggtacttacttcacagttgtgaagaagttgtgaaacatttgcagtatcagatcttcacactcaagatccaacatcaccacgcatagccggacctttgccacagtttcaaggattgcaactatccttcgaaacaaggggttctccatatcatccaatttctcaaaagaccccaccattatggaaaacacgtcctgaaccgaaagtagatagcacaggtcagatgtcaggatataggatatcaaaacaagatcatcttcatccgataagaaaaaggtataccttcatgacatcatcgtcatatggagtgtcaggtgcagtgatcctagttatctcagaaatacaggacaccacagaaagtttcacctcatagctagaattatccaacagctctttcttgatcaaagctttcattgctggagttatagcactaatcatgctttcagaaggtgcttgttccactttcaatatatatatttcggcctcctgcatgaacaaacaatcatgccaatcaaagatcagttttctagggaaccaagaagatcatatatgctcttaataaaactgtaatgttaaaggagtatggtgcatttacaggaatcaacaccacggcaaactccgtatatcaacaatccaactccatatgtcaacaaacacgacggaaaatactctagaaaaacaaatgcttgctctttgtgccataacggaaaatcaaacggattgcagagcagcagaaaccaaaatgaatctaaagcggaattccagtccagtaaaaatcacgactcccaaccgaatcaatcctcgcggaatggtatcaagccaaagcttccgaaccatcccgaaatcaaaccaaccatcccgaaaccacgcaatcaacaggattaataaaaataaataaatccaacaaacagcagaaccctgacaggagaggcaaaaaaaaaacgtttcaaagcgaacacaaacgaattccagcacagagagggttagagagactcacgtggatgagcttgagcaaggcatcgacgtcgtcggggggagactggagcttctccccgacgtccctcagcttcccctcgagctccccgagctccgccattcccgcgcgcgcggcaccccccgcgcgtcccccccctgccaccccctggatccggccgcccccgccccgccccgccccgccgcgcgagatctacggcttgcttgctagggtttcagcggggagggaggagcaacgccgcgcaccaccccctgcccacgcgcgcgcgaggcagcggccgacgccgacgacggcaaaccaaggtgacgggaagagaggagaggagatggatttctctatagctatctctgcctctctctctctctctctcccccacacccaccggtccccttttcccctccctccccccgtgcgagacgcgatttcggtgcggtgcggtgcggcgcaacccggaggtgggtggtggagatgtttggaatcgggcggggcattttatgggcgcgacccggggaggggttggggttgggcctcggccgccaaaaaacgaacgggagcggacgcgtccgggggtgaggagggttagggcgaaaatgtgcgcgggtttgtgcgtccgaggtgcgccgccaagttttgggggtctagcggacgggagtccccaggcttgtctgaggcgatctcggccgtcgctggctcgcgatggagcggggggcagggtggatggatggctggggaacactgctgttccacggccgccgaaaatggcagtccgtaatcctcggcccaggtacatcctcggccctgtgacaataggagggagagagagaaaataaaaaaattgactcaccggagtacgcgcgacacggcagcggaggcgttagagacggaggcgagtggtggcggcgagagaatgaggtgagcgggggcagcgtgacgaggcggtaggggtgcgctatgaacgagggtggagtatcgttgttgttggtaccggcattggtggaggggtgcgggggcagataagatgggagagagtgtagcggcgcggacgggtgcgtctgaaggtagaagacgacgttccgagacgaagggtatatataaaggcgggagagaatggtgaccgtcggattagtgtgatctaacgatcattgtttgtaactgtacgacgtatgaacctgccataaataatatgcttattttgtcatgacgtatagagttacgctcgacatcagcccaccgaagtaactttttgtgaagaatgtgggacctagaaatattcaaatgctagattgggcttggaaaaaaagctaggcccaagtctgattctcttccaggaccgcatctttcacaatcaccaagcctaggtccccatcgacatgcatcatttggtttgctcgtctacacaatagattggagcgcgaaactttgaagtatatataggtcatacttgcaccattctttggtacacaacttcatcataaggccaaaaccatctgttgcttgacttactccctattgaccgatgatgctctcccacctcttggtctgcctcttgtatcacctcttccttcatgtggttagaacaatgtcctacctgactcctctattggtttacaacaccgcaagacgatagaacccttctaacctagtataaggcctctacgtacgaaccaaaaggtttgttcaaattaagaaacatttattggttcaattgctcgagtatttttgcgctcacattcacgattgccatgcaagctcaacttaaatttgcgttgtagatacaaacattgggagaaaggcactttttcgaaatggtgcaacctaatgtgcattgctaaatttgcaatggtgtacatatatcattatatttaatgagcccatgataaataatgcttctttggtttatcaatgtttgactctacataatggacgtggatgtggcacgccgtcaaatattgatgattagagtctagatgtagtattcctactctgtcgtgttgtgtatcataacacacttgaagtataggaattgatatatgtgtgttttaaattgcaaggtttcttatattccatccattcctaaatagtatacaaacttctagcatttgaatcttatttcaaaatataagattttatagcacagttcactgtactatttatctcatcaatcacctcctattcaaattttattcccattttatcccctacctaccctctcgcctccactcatctcatatttattgaggacactaaagtattttcctcttaacacagggatggaccaaaaatggaccaaggtctaggccatcccatcaaagctttggcccaatccatactatttatctcatcaaccacctccatttaaaattcattcccattttatcccttacctaccctctcagctccactaattacatatttattgagggcactaaagtcttttcctctcaacgcaggggtggaccaagaaatgggccaaggtgtgggtcgtctcattaaagctttggcccaattcacttactatttatctcatcaatcacttcctattcaaatttattcctattttatcccctacctactctctcacctccactcatcacatatttatcgagggcacaaaagtcttttcctctcaacacaggggtggatcaagaaataggccaaggtcggtgccatcccattaaagctttagcccaattcattgtactatttacctcatcaatcatctccatttaaaatttattcccatgttatcccctacctaccttcccacctccacccatcacatatttattgagggcactaaagtcttttcctctcaacacaggggtggaccagaaatgggccaaggtatgggcagtcccattaaagctttggcccaattcacttactatttatctcatcaatcacctcctattcaaatttattcctattttgtctcctacctaccctctcacctccaccatcacatatttattgagggcactaaagtcttttcctctcaacaagaggggacccgtaaatggaccaaagcccgggccaccccattaaagttttggcccaacaaagtattatatggtggaatttgaaagtgttctatggacctttcatcctgggcctcgggctgtggcatatgtgacacatgatgtatgtttgcccctatcttaatattaacctctgcttaataacctagaaatctttttattttgaaacggagcagcatgctctatctctctagcaacttacactaatctcaatgcaaagcacaatcccaaattattgataaatctctaaccggaggccgaaggctttctcttccagataggaattatgtttttcagtactgtgtgaaattgggattcggatgcttcgaagagaacgtagtactggcctagctcgacatgattgatgggcatgatgattggttagggtcattcaaggctttcatcgacaaatcatgcatgacacatcaatccatcttgtctggattgttcattaagggctggtttggtttgaggcctaaattaagcttaccaatatttatcaatttcaatagtgtttagtatctatttggtttgaagccaaattttgacatgcctaagaaaataggccatttcaatagtgaatttagactattttggcttcaatccaaacacaactttaccttaccaaaattattcatgccaaaacttgctaaaatttggcaccaacaaaatttggtaaggcctatttaggtcacaaaacaaaccaaccctaatattcccacaccttgtttagttccaaaataattcttcaaactttcaacttttccattacatcaaaattttcctatacacataaactttcaacttttctgtcacatcattctaattttaaccaacttctaattttaatatgaactaaacatagccttcatcgacaaatatttgctgctcctactgcaattggagacgagacaccgtgccttctcgaccaatgtgcttgaagttggagtcaaaagttcactttttaggccgagtttagttacaaattttttcttcaaacttccaacttttccatcacattaaaactttcctacacacacaaactttcaactttttccgtcacatcgttccaattttaaccaaacttctaattttagcgtgaacggatgagagcccgtagtttcccactcgatcggaagttcaatctcgctgcgtgtctccaaagtttgttggaacgtttaaatcggatttcctctatccgaaagattacaacttctgacagggaaaatctacagctttttttcgaattaactgaaaatccccaccttgaaagttcgttttgctcatgtgaagtaacaagcgcatagcagtaaaatacgccaaacaaaaatctaaaaatagatgatggccgagttagtgatctctaaatatttcaagaatccccaaacaaaagcttcgaaaactcaaaaaagaacaaataaaattggagcaaacagaactctctctcagtctcactgaactactgaagaacgagtaatactgcatgatctgaaaagccggcatactgacaaagttcaacctatctaattattatttattcatcattgatcagtacacattttaccaattaaaccatgaactaaaattaagcacgtgtaagagttcatttccattaattcctgtaaagcacagcattacaaacacacaatcacctcaagaacacactcacaccaaaagtccattttattctccactgctactgaaggcaaattcatactatagctatacatcgtcgtcctctgatccatccatcggccgctgagaatttctcgatcatttgccgaagagcgacttgaaccaccacgtccccttggtgtcggtgggcgcggcgtcgctctccggcggcgggtcgtcctgcggcgtcttgcgcagcttctcgacgtcgtacccttcctccttggccttctccagcagccgcccgtacacctcgtcgtccatgctcgtctgccggcacaggatccacaggtccttgcgccgcggctcgccgacgagcgcgtactggtagtcgtcgtcgacgtagagcacccagtagtcgccgacgacggggatgacggggaggaaggggggcaggtagaacttgaccttgagcttggcctcgtcgctggccgggtcggccttgtaggcggtgcccttgatgtagtcgcgcttcccgctgctggtccacgtctcgttcagcacgtccaccgtcgcgccgtcgggccgcagcgcgtacgtcgcccgcgtgtcccggccgtcccggggctggaagaagttgggcagcgacgcgatctcgtaccaccggcccatgtacctcgccacgtccagcccccgcaccaccgtcatctcgctcccgctcttcttctccaccgccgccgccgccatcgtcgtcgtggtgattgtgttgctgtgacgatcgatctagctgcgaactactgatgttatctgtttgatatgaattgccaacttgagctgagttgagctaattgcaaggatgagtgtggctatataggagagggttttggcctcttgggggggttgggtttggagaagaactgaagaagctagagaggttagtatagaggataagattactacgtggagggctctggagcgcttaaaaacgagcgctttggtttggttgcttgctccttggggccggccttgtgctatacgtggagacttgcacgtgaagctaacttgcatggacgtactccgtacatctcttttactgtgtgcttttggcggttttctggccgttttcgtcggtaacttgggactggggttcaacctgaaaatctgaacggcgagtatcactgcaggattcagagaagacagtgatctggtttcacacattcccactaggcgctttccctgctacgagtacgagtacaaaccaccggaatgctcgagagcagtccagaacgacccctatggtgatggactgatgtgtgctcggcagatagctttggccgagtctggccttatttagttctaaactttttctttaaatttttaattttttttatcacatcaaaacttttctacacatataaacttttaacttttttatcacatcgtttttaatttcaatcaaacttttaattttagtgtgaactaaacacaccctcggtgtgataagcatgttttccttgctccccaaggttaaaactctttctagcacaaaagaggtagtagaagggtacagtctacggcatggtagattgccagtgtgaagcaccgatcgtaatcgaggcttggagctttgtccgtgtcgctgtccaccaaggtaagaaggtaagggtcttattgcttgcgctatcacttataccagtttgttgccaaaatttaaattttgaaacttttgatttagatgccttttcaacataaattccttcaatattggtttttaaattattaagaacacatatttaaaagttttattcatatttttttattactagttaataagccgttatggcttatataaagtggtaagcaaccaatgaggacctaaatcctattgcatcggatatccggaaacatgaacgtccttttcgttgattttatagcttgcttacgtgtttccatggggttccaatccttggatggtttcatggcttggttacgtgtttccatggggtagttgttgacgaaaaaaatcgaacacatcggcctgagagatctgcttagctccagtgcaggtccaaatcttgatgaagtgcgggcgtgccagtcagtttgatcctgcaactgacaagatatgcaaatagtagatcaaaacagccgatcggctgacaagccgatggagtagttctagccgataatagccgatgttgataccagccgatagcgatagggtttaagcaatcggctatatgtccaaagtagataatgatataaaggcaatcagctgatgatgatgtaataaaataacaacataaaccaatcggcaaataatgatatgataaataagcatcgatccgaaggttaaagcacacatcggctggaggtccgatgtcatgaaatccacaagattagattaaacagtgaaacctttgttgtcatcggctaaatccaacttatatgtatatgcaatccttatgagccgatgcaacgttcagataactcaccgactgaaaccccgatgaaaccctgattggcaatcaagaagcaggctagagattatggttctaagcacgacttagtagatcaaacttaactgatgcagcactaagtatgaaaagaaacataatatctagacaatcaagccgttgactgatttttcagggtggtagatgcctaagctaatctaatctagcaacacaatttagccaataccggcagaaaccctaaaatgagaagcagccgatagagctaaattgatatgctaagactagattaacagagacatatgataaataggtaggcaaatataccatccaaatcagagcaatccaagaggtcgaatgtactgatgcagccttgaacgacgccgacgtagacgatacaattgcctgggccgacgaaacattggacttaccccttagccagagatcaaacaccgatgcagccccgcgtcaggtgccaagtcccgccggacgataaaataaagtagaaaaggtaaaaggtggcgatgcgccgaattgtattgattgtagcgatagattacatagaccctgggtgtacatatttatacccatgggttgatacaagtccttgtcggacaagaaagaaactttcctaaagataaaaggaaaagataaagtccttataggacactaaacacactttcctaaagataaaaggaaactaacaaactattcctaattaatagataacttgccatgccgcattctcttcgaactcagtctcttctggataagctttctttggtagattagtttccttaaccgaatatagcaagaatccgacaactgacgacttgacaactctcatcggctaatctcaggacttcgaagccgatgctgactctaaaccaatgactactccgggcttaccaaatttcactgttaacagtagtagatacgaaagaatccagaaagtcatcagagtaagcaacacctccgttttagattttagaaccgcaatccccttcatttcccacaatcatgtttgtgtacatgacacatgaattgcacaacaattaattcaacaatttagaatcgcaattcctacacctctctttcaacagtttagcaccacaattgaatgttcagtcattgatactttcttcgggcaacagtgaatgccttctttcctgcacccttctttgaccccactaggagcttaggatgaccttcaaaacattgagcctcgcaatcttggacagtggcctgcatgggcacattagcaatgcagtcataaccaacatttagcaatctactatatgcaagaaaagcttttaatgatttgaacctcgatgaaagttgtgttaacaaggtacattttgtggtatagtcaatcaagcatatgcaaatatttagataagtttggaatcgaacaccctatgaccaaatgaaaatactaattttgaagcattttttatatgataggaaatggtattaagcatagtgcactagctttcttttacctgcactgcccgatgatcacatgatctcgttccctcacacgaaagcatggggaaattaatgttcgcattgatattagggtgtctcttctcatacctatcgatggaaatggaaatcatttttacaacatcatattatgtgactacgtacccaagtgaaaaaaataataattaaaaacaatgtagacttgcttgcctctaatacttcttgacaaagtgaagatagttcctacttcctacaatgatgatagtcctgttcattttagcattgtgtcgtgttctagcttgcaataatgcaactactaattgttaaggtaccggtgaatgggcatttcttatcaatgtaggttcttagaacaagcaccaaattaaggacatgtaaaacttaattaagttcaatataaatttctactccaatactcactctatcctaaaatataacaacttttagctatgattctagacgaacactagttcagattcataactagaatttttcatattataggacgaaggcagtacattatataggtaaaacacatcaagaaaattactagcaaaacaaggaaaatagacaaaataattactataacaacaacacaaaaatgaatgaaatcaaatgagcttttagctagatttgtcaacgatgaaaataatagtcacaatttacaaatgttgaatgcaaaaataaaatcttcaaagttaatatctatgtttagaagaacaacgagagcatacatttagatgaaactttgagaaagaaacacgagcacaaatagtcctgagaacaaactagaaagctatgttgcacacaattattgggagtctaggaggcaacaccacatcaatggcgtgacaactaaacaaaagtttatataaaaaaaataacaagcagtgaagaaggatagcgcaacttcaaatgagaggccacaccaatggacagttaagaggcattaattcaaactcaaaatgaatactccatccattccattatacaaggcataactgttttttttttcaaaagttctataatatagggcggcagatgcagcagcaccactccgttagtctcgtccacgcacatgcatgcattgaaggcagttgcatcggcatctctttgaatcccgtaattctcatccgcgcatgcatgcagtaaacactattcgttagtttgctttggttgttttaaagacccctaattctgcggtaattataggagcttccttggtttttgcatccaaagaagttacgccttgtatagtcaaatggagagagtactagaacttcagatatagggtattagatatcctaggaagaactatagcatattttagttcatcaaagaaaaaaaactctcaagtgagcatcccctgcaacactaagtcactagccacttgatatagatcacacttacaaccaacaaaataacaacatcaaatttgttgaagtcacataccctatatgatgtctaagaggaccacaattgaaaaggtatcaagccaaaataacttataaaatacaagaagcgaagtactccctccttccacaaaaagttacacttattactttatcaccaatactaaggagaaattaaatcatcttgcatatatgtaacaaagatcaaggagtatatgcacacatgcaaccaatcagtattaagatgactcctcaagtttagttcaaacatttaatttatctcgccatttaagttttggatgcatagagactgcaaatacgaacaacttatttggaaaaactaaaatatgaaatatgtctaaatcttacatgtagagagagtactaaagaaattgaagaggctatcaagctcttgtggatagaaggagtattgaagaaaccgaagattttataaaaaatgcattgttttccggtttgaaaagtacacataagatatataataaaaaacaaaggggacctcaatagaaataatcgaggagttcttgttattatggtatagtacttctaacatggcatataaacccatacattcaaggcaaaattatagtagacttttaggctttagcaaaaacaaggaaaataatcccagtgcccttatccaggacgtttgtatttccagttctccacgctccaaatgaaaaaggaacaatttgtcttttgcgtgtatggttcccactttcccaggtccactacaaaaccggggcaagtccgcgtctcacgaccaatggaaacgcccattaatggcaagcttagccccccgcgctaatcgcctcctcctactaattccttgcgtctcgcttcggccaccgcccaccaccacctcctctcgcctctcgcccccgcatcgccgcttcctccctcccccacctcacgagaccgttttttttcttttttttttgtgttaccgccatggccgccgcgttgacccgctcgtcgtccgtccgttccgccatccgacggctcggatcctcccgcgccttctccgcatccgccgcggcggccccgcgccgcgacgcgaggggggcggcggccgcggcggtggcggtggctgccgggtcggggctggggatctggctgctgccgccgtcgccgcggccgctggcggactccgggcaggcggggaatgaggtggcggcgttcggcgacgtcgcggaggaggaggagcgggaggagaagcgcaggttcctgttcggaggtgagggcatttgatttttgttttttttattgttcatgcgtgttgttttgggttgtaatgcgggcgatttttggcgcgtttatggcgggggagagcgactgggtttcattcccattgttttcgtcgatactaattttgcgtgaaaagcgaatttgtccagtagtattttgctactcggttattcgcctctgaaaaattttaaatccgctattttacaaacggcacgatgattttcgtcgcaatgtttcctcgaatgtagactcgtatcgcagaagggtgttcttcaactacgagaagaggattcggacgcgcagccctcctgaaaaggtagcgaccaatgtgccatattcagagcaattttgtgtatacacaacatgacatgataattcttcttggtttgtgtagtaataattgtgtggtgtttttactgcaagatctttgaatatttcgcgtccatccggaacccagagggtgaagtttacatgttacccgccgatttgatgagggcggttgtccccgtttttcctccatctgaatcgaaaattgtcagggaagggagtctcaggggagagcgcaaccctggcgagctacactgtgccccgtctgaatttttcatgctgtttgacacgaacggagatgggctcatctcctttgccgagtaagtagcgactcactgatttgtgtccttaggcgtggtatctaatttcagaaccagacagaattgtttgcacccggcacaattattgtcatgtagtgatttacagaaaatgcaccaggttctattggcaagtagaacagtctgtttgctagccatattgggtttgaatcctcccttaaacacattgtgtggaccatacattaagttgccataagcataacgtcattgcaactaataatcaccaatgcttagatatgaacattttggttaatgagtgccactggtatggtatgacattaactttatatgctgctctattgttttattgaatgaaggcagaagtaacttgatgaatttgctgaaactgcttgccatgacaggtacatcttttttgtgacattgcttagcattcctgaatcaagtttcaacatagctttcaagatgtttgaccttgaccacagtgggtaagctatcctccagctcctcgacctggttgtaaacttataaccaaatactgtgctcttcagatctatatgcatctattccttaattgtacaagcaccttaaccattttcattaaaaaatgtatttcacttacaaattttagtttgaagtgtacttcattaatttatactaactgatgtttctttaattatgatggctgcatgtatattctatgatagcatccctacattctcttctcttgaatggacttgatcataccgtgtatagagcttacagattaccagtatgctactatgctccattgccaaacccccattcatgatagaaggaccttacagtcttacacacgagacctaaggaatagtccacccatacactaactatatatgtgcagcatcattctggtataatcagttttcccctatagcctatgccaaacctcaactctaggagtcctgcaaacaaattaatgtcattggtcactggcgaatgtatatcaaattctcagttaattactatcaacattgcatgcttgcaaggttgccgggagctaaataagaaagatttgacagccctaatctattcacttatgcatttttcatctaatttctgaactttattatttgctgaagcctttaaaggtactataagtatactatccccttttccctaggatttacacaaggataaattgaatatattgttgtttacatgtgacaattcatgtgcagttaaatttgtggtccagaaaagacctgcttttatgagcatgttcaatcatctcacttgttagttgatggtaaagaagggtatggacaatttggcaattttttttaatgctatttctttactctaatctggcatttgaatttcgcagggaaatagacaaagaagagtttaagaaagtaatggcactgatgcggtcctatcataggcaaggagctgcccatagggatggtttacgttttggtcttaaggttggtcagtcagtggaaaatggtggactggttgagtacttcttcggcaaggatggcaatgaacagttacgctatgataagttctccaattttttgaagcaattgcatgatgaggtgatttttttaaaaaaaattcatcctttgttccaataacataattatggttccgaactatcttattctgaatgcaacacatgagagacttgaactgaaagctaaatattttttttgtactttcatcctttgtttcattaacatcattatggttccgaatgatcttattgtggatgcagcatttcagagacttgaactaaaagctacttcctttcccaaaataagggattttgggtggatgtgacacattgtctgtctagattcatagcacttcgatgtgtcatatgcacccaaaatcccttatattttgggacggagggagtaaataatttttccagactatctaatcacataaggaagtaaaggagggtaggaaataacacctcgacaacccacatgtcacatccctaatataattatacaagcacaacatttgctgaatttccttgtttttatattttgtgatgtgttgccactgaagaacaacactatgcaaaggtcaaagtccaatgcctgtacattcattgatttgttttgtcctagtgtaattggagaactgtcattgtgttcttgctctaaagcagcatttcagaatccatcgaaaaccaaaagtgggatcaacaaagaaacataaagttgagattataaaccccagaactactataccacacccaatgtgttgtacattttatagaatgccccagtacaacataggggtaaaaaatttacttgctgtgtatttgtgtagcgggtatacgcgtgattaatctgttattgcctctggtccggtttgtcatcattgtatatacttgatatctcataatttttcattcaattatctgcagattgttcgcttggaattcagtcactatgatgtcaaatcatccaagacaatatctgtgaaggactttgcattatccatggttgcttctgcagatatgaatcacataaacaagctacttgacagagttgatgattttgatgattatcctgatctcaaggatttgcgcattacctttgaggtttgaaagtttgctatccagatattccaattgtagtacttgggtttaatgtctctctttatcatcataattattacctgaacttcaggagttcaaggcttttgctgatctgcggcgaaaattagaaccatttgcaatggcaatcttcagctatggcaaagtaaacggtttgctgaccaagcaggatctaaaacgtgcagcaactcatgtaagattcttcataattccgtttatttccttttgacataagatgtagtctgaatcagctaatgttaatgtaagtcttaagctattttggactatcactggcttgtttcatatttccagccctgtgctaactgaacagctaggtcctaggtcttgggagtaggaccttcccaagacacccacataattggctgcattttctgattgactttacaacattttttataggtttgtgaagtggacttgactgataaagtggtggacgtcattttccttgtgttcgatgcaaaccgggatgggagccttagcgcagatgagttcttgagggcattgcaaagacgagaaagtgatattcgccagccagcttcttcaggtttaatgggagtatttacctgtttgttgaactgtacaaagtgttctcttcagcagactgtgatctagtaagcctcttgataacccccaaagtcgtcctctgttgcccttggttacgacactccttttgatttcatatgctatacttgctaaatataaaatttcagcagcataattcagcttgcataaggttcgagtttgtgatgtttctttgccatgcgcaggtgctggggagcgaaaacgaccacccactggagttctgcaaacacgattttgctgtaaatagtcttgcttatcaaagttaccgaaacatgtagcagctgcaaataacatgtttcgcactaagcccaaggcttcgctgacagaactctactccactaatgtaaaatgaacctatgacatggaacctcgttaactgtctacgccttgattcagttactatatccttacatgtctacgtttggatatcaatcttgttggtaatgactaaatatgcaaaaatgaatcggtgataattgtgatctctatttggtagagaagctttcggtatgggctacacgacttgcaacaatatacatgatgttgagattaaggggcctaggttgttactaccacattttgtgcctaccgagtagtgactagtgagtactaaaggtctattgggaaaatataaagtgtggacatatgttgatatatttggtttttgcctttttgcaagacgttcctcccaagtaattgtccctttaccaacgaggggacctcgatatcccctcgagggatgaaaatagcttcccctttaccaagggggggcaacgagcatgctgaaaaacactttactatctatttttgaacataccgaaaattaaaaattaatgatgatatcgtcgaggaaaaacatattacacacatgttacacgcagataaataatcgacagcatcgactgatcatcagtaggggagcctgacgttgagccgcctgagccagatggagtggagcaccatgtggatcatgtcgaaccggcgcgccgggcggtggagcacgaagtggcgctgcgcctgcagcacccgggcgcgcagcacccggtacctccgctccgacacccgccgcaggatggccctcagctccggtatcctcgccgccggcacggccaccgacatcttgccccagtccagcacgtcgccgaacggcggcgggtagccctccgagatgatcaccggcacgcacccggcgaacacggactccaccaccctcgggctggccacctcgaagccgctcgggcacaggcagaaccgcgcggcggccatctgcgcgtggtagtcctcgccggcggggaggtactcgtggacgcgcatgtccccgtcgccgtcgccgtcggcggcggcgccgcccttgttcccgatcagccagtgccgtaggagcgattcgcggatgtggccgtgcctgccgccggcgaagaaggcgagcgtggtgcggttctccggcggtagccccgcggtcgggcgccggaggacgccgtcggcgaggtttacctccggcagcgtcgcgtccttccgcggcctgaacccctccgacgtgttggcgttgcacagcacccggatcgcgttgccgtacagctgccggtgcgcgctggtcaccatcggcgcctgcgcatcaccggccaacttagtttcagtgatatgatcgagacacaaattaattaattcttgcaggaacaaacttagagtgcttaaatgttgtctaaataatcataatttttttaaaaaaatattaaaaatatagattaatgtgaatatatcactttacaaacctacaagttcaaaaattcgaattcgttttctataagttctaacaaaaataaccgtttgaattcgatttctataagttctaacaaaaataacaaatataactgagaatatatgttaacatgttcaatttaatttgttgtttttattataacttgtagaatcgaaattaactttgtatatttgcagtgtgatatatctcatattatctatcttattatttttttatatttttataattatttaggtggtaatgtaagaatcaaaggatatcgagggatgaattaaaaatccatctccaagtggtccatacgtacgtacccagtcgtggcaggagacgatgacgtggtcggcgccgcgggagcggttccagtaggggtagcgctcggcgacgacgcggacgtagtcggcgacgaggccacgcagcggcgcgaggtcgccggtggcgttgaggcggtagacgtagtggacgaggttgcagacgctgatggggaggaggaaggcgtgggcgtcgtcggggcgccgcgcggcgaagcggctccgcgggtcgtccatctcgtacatgaactgcccctcgatggagtagatgtcggtgcccggcccgatgtgcgccaccggcggctccccttccctgtacgtccagatcttgaacctcctctccatctccacgtagctcctaatcgcaaatgcacatcggtttttgcaacaacggtagaggagtggatcgatggatcgacggtgtacgtacgtacctgtggaatgcacgcgcgttgcggtagatggcgccgcgcggcacgtagtcgtcgtcgcccgccgcggcgacgaccgtggaggctgagccgcggcggcggatgctctcgtcggacggcggcgtcgcgcgagccgcccggcggatggccgcccgggaccgagctaagccggcctcgatcttgcctcgcgtcacctgctatacgcaccaagccaccgatcaatgcagcgtgattttgcagtgaacattttccattcgcgtgtcacgtggcgacgtgcgcgagtaaattaccttcttgttgattggtcgagcatggacactcgtcggcggcgccttctggggttcgtccgggacgtgccgtagtgagtgctcgctgccgcggccgtcttggatgccggtgccggaggaaggagcgggcggcagcgcgacgccggcggctacgacggcgaggagtgctaaggcagtgagcggcacggcgacgcggccgctctgctccatggcaatgtttgcaatggctaagttagctgctgctccactcgtttgaattggcacgcgcatgtggccacgtttgaacggtaggccgcgatatatatatatatatacgtgttgcgtgtgcttgagttgactgatcccgtgatccgcactgtcagctcagttcgttacaatcgccggtgcctcctgagtttacaaaccttcgaaaatgtgcagcgacaacggcaacctatcgtgatctgcagctgtgccgcagccattgtgcatttgtgccggactggactggactgtacatttctgctttggtcatgttcagaatcttaggacgtgacggcctgatgggcagcgaaaacctgcttaccgtcactgctcctaacacagttgcaccgcctccatgcgttctacgagctgggaacatatactgtgcacatttcgtgcatacgaattagcaaatgtcacagtaaaaaattagacacatacttttaataatgttatgcatacatgtgaaattttatcttcaaatttattatattttaaccataacaaaaaagacaattctgacagatttttactcttaaaaccgtcaaaattttcattttttttatgattaaaatataatgaatttaaatatactccctctgttttttaatagataacgccgttgactttttctcacatgtttgaccattcatcttataatttatgtaattataatttattttgttatgagttgttttattactcatagtactttaagtgtgatttatatcttatacatttgcataatttttttaataagatgaatggttaaacatgtgagaaaaagtcaatggcgtcatctattaaaaaacggaggtagtaacactttacatatatgtgcagtactattaggagtagatgtctgtttttttttagatttgctagttgatatgtacggaaatcttgtatacataggatatgttcacctacgagttggaggtaatccatacattgtgccccatcgttcattccgtcgccattgttcccgtatccaaatgttggtctttcccctgtcaacggtctaagtgcttctgaatagcataatagtacgttgtccaatttattccttcagttccaccctgcatgctattagtctaataaacctgcagtaaaacagagcaaatgagagacagagagccaatgcggaagaaagaagaaacccaagcacaatgacatcacaaactgccacagaaaatgcggcactgtacaccacactacacataagcatcccacaatggcgaggaagcgcaatatttacaattttgttccttcccgtcacgccttggagggtacacggagtgaaggaaatacaagtaattttttcagtacttgaaaacgaaaagatcccgataaacggagcaggaaggacctagtaaatgctgttgagaatagtcccacattgaaagtttagggggagtggcaccaacttaaaaggggaggggtccctcacctcatgagctagcttttggggtgtagaaaggctttctcccggttgggccaacgtctcccggttttaggccaacaaatgctaccatagactttacttattaatctggcttcaatccaggcccttgcaaagctatctacatgaagccatccagatgattatttacaggtgatcatgtagtgtccagctactcgggtcgaacgcttatcaggttggggagcaccgtcgcctgcagcttcttcacctcacttgtcgtgaccctgcaggaatcaagcgacagcgagcgcaggttctgcagatccttcaggtggcggaggccggcattggatacacgagtgttggagacgttcagcgagactaaagcagttaagcctgcaaaccgggcaatcatgtcatattgtcatgtgataacagcacagatagacaacaatagagtgggcacatagggacgtcatatttgacacggaggaataataccagaaatcagctccagggttttgtctgtcaggttaacgttctgagaaagattgagttgcttcagagctttgagatccttgatattcttcactccagcatcagtaattaacccaccgcagacttcaagagattcaagattcttaaaaactgaaatagcatagatcatgttagctgatgtgccacgtgaacatataggattcagcagatgataatcaatctgatatttctgataatgctgctaaaatcatatgccactatgcttataagacacttatctatagatatgtctacttgacagggttcagagggagcaaaatacatttagtaccaagtgtattgcctagtaccaatttaccatggtacagatcagaccgataaatattggacgaaaaaaattgcaagctcattttgttgtagctaacattaataaatccattttgtattgacattgatgtagcattgtataatgtagttgactcttcgaggtacacaggtacaaccaagtaatcaacatagatactttctagatgattctaagctagccgaagaccaaattcagagagtcgtctcaataaaatggacgcaattatgcaatttagtataataattctaaaattgaaatagtttcagagtatgcccttacatctgaagcagcttgtgccatagtccgttatcctagcaccaaaaaggtccagatgagtcaacccagtgagacctgcattacctcccaaggatcaaaactaatataaagtgtcattgaaattaggatttgcaactactcgctgcatgttaatagatcaagttacatatgatcttgcaaaattacaccaaaacccccacgagatgcaaggtatcaaacataaataaaaaacaaggcatggaaaaattcagcaaatgccacacaaattcataatcagtgagatccaaaacaaagttgcgaagaaaaaaaaactgcagctagcagttagcgccaaccaatactgatcattattatattagtgcaattcgtacaaaagaagtatcatgcattaccaaagttgtagcatataatacatacttgtaagtgctgctaagccaacatcagtaatctgccgattgtcaagattaactgacttcagtgaattcagtgcagatatcttcttcataccggtatcagtaactaacgtaaacgagagattgatgctttccaaattccgaaggcctgtaaaagtttaatagctttccaatcaaatgcttcaaatgcccgtgcaacgacaaccaaatacagataataacaaaaataactgcagaggatttgtgatgtagcaggttgtgccagttaagcattataatcggattgagaaaactgtacaaaaatcgttgcacaacttgacaagttttctaagatgatcagacataacaaggatacgatgagagcatgtattaatcatttcacttttctgaacattcactggttgcaaacatattattcagtaactgttcacatgctagatactacaaatctacaatacatgcagtaaagagattaagaaaataaaatgataaaaacaatcacaagatgcacataaaactgtagcattaacacatttatgttttgccacttgccgaaaacacttcataaaagtaatcttgtacattattcatgccaaagatgcagaataagtcctattatccagtgttttacaacatgaatgacattgcatggcacttaactgctaaaaagggttagagctagaaatattattgttcataagtgaaaacagaccagatagatgctggagtccactgcttccaacttcggtgtcagatagctccaaacttttcaaaagcataaggcctacacataacataaggcatatatagtcacagtaaatagatcacaaatgcaccaacgagacaatgataataattaataatcagcaaaccaagtaatgctcttaaacaactgaatgtacaatacacagaaaagcagttataacaggtacaggctgacataaatactatagacacaaggaacaaagtgcggctgacaactgtatcgtactattgaaaatcacaagtaacaagaaaattaaactctaagctattggcttcaacatgttttgggagcaaaattgaaaaggtaagtttttttttttttttgaaaggtgaaaaggtaagagtgagcagataattctaacaaattatgtaagagtattgaaaaatgaaaatgattaaaaactagctcacctctcagatgtaataagccttcatctccaaccttgcatgagtccaagtttagagattccaaattgatcaactctagaagcagcaaatgttaccagttagctacccaataatagttgtgtgactttaaagtgatatttcagtttctatgtacacaacacaatgtaccacaaaataccatgctctatcttctttttctctccagtctatgataacattcttgagaaatatatataacatatcaatcagtataatgcctcttttattccaataatttggcattgaaagctcaaaccacaatcaatttgccaatttcaaaattgcatggttaatattacgaacttctaccagaaatgtcactgtttcatgataaatatcaccaagttcatttctccatccaaatatatttttaaaatccttacaggaaatattcactagtgcctactggctaacataatgaagccagatatattgcttaaacaacagagaaaaaattgactgcaccacttatatttcctgcataaacatccatattcttaaatgtaaataaagttctaacaagaacttagtcttacctttcagatgtgctaaacaatcatctgtgatattattgaaccccaagtttaaaaccttcaattttttaagacctgcaaagcagaactgttgtaatgaatagaagaacagatatgcagggcataaacttttcgagctggtgtcaaccaggtggaaacataatattaggtaattctgtcaacaattattttcactagagttcacgtcatcagttattacaactgccagtgtataacaatgacaaaaggttccatggataattatatcttgaacatacaaagctcacaaaacatccttccagcttttatgcaaacatcgttcaatgcccccatatttactactcacctgaatttacttaaaacatgtatgttggcattattccagtttgtcagcagttggcattacaattaccttgaaagttttcacagccttcaccgtatatgccacaccgactcaaattcaacaccaccagagaagccaatcctacaaaaggaaatgacacacaaggttgtgtttttatggtgttctctagatgcaatcaggtgctttgaaagaggtgaacactgccaccaattgtagtatcccaatacactattaagaaaagttgcaagacctgatatagcttccaaacaggcagcagtcactggacagccctccaaattcaactgtgttagcttggacaagcctagagaaaacaaatgacaaatagaaaacatgagaagctttagataaggtcagaggtaaacaattaaatggagatcatgagtacacccataaaacgcaaaacagaaggatgactctttcgtcttttggttgttcaaccattaaaaatgaaagatcaatgtcctaatcaagaatgattaaaattatgggcctgtttacctctaagataagaaacacccagatcagtgattctacaacaagccaattgcaattctttcaaatttgtgagatctgcgcaaaagaaaggtgcttgtcagcctggaaaggatgagataaagagtgatatatattccttatagtttaaaataacaatagctcaatttctataaaaagtggagcttaaaaagcaccttatacagttatactatgtcaagcaggaatatcaaaggaaataaatatgggatcccaataaatatatgtgctgttgttacctgataagtatttgatatctgaatctgcaatgttgttacaatatctcatattgagtgactccagattcctgaggcctgtaaaaggataaatgcagccaatataccaaactatcaatttctaggcagttgaagttgcaaccctgacaggattatgacattcaggtagggaggggaggggtgaaagccaaaaggactacaaaaattcaatttagaattctacatacccacagtagtaagcatataaaatgtgatgtttaggagctgaggtaccttttaagtgaacaaggccaccatgaatctttaggcatcgttcgagatcaagatttaccaaattaactaaattagcaaatgcttccattgcttcagcagtaataccatcgctgctcttgaaactgagagatgtcaggtttgaaagacctggatatttaaaaggcatgaatatctagttcaacaggatagttaacatgacaaacagccaaaacattcaagaactatacaaggaagaaactaatctatctaataagcgatcaagtgggttaagtttctcaaataaggagtttaattatatactaacaatctgttccaaaaccatctctgttgtaatcatataatcttaaggcactgctaaaagatttaagctcatgcttaaagctctccaagatgacccaaattagtcctataagagcatgtctcagtaagtagcatgttactgacctgacaagattcctaggccatgctctgagatcatatcacagtaattacatgccaagctttgcatgtttggacaatctctaagaagatataacccactatcagttatttcagagcaagaaatgtcaactgataacaatgaatgcctttgagaagccactacttccatccaagcatcattcactccaggatactcccccaaatcaatgtcctgattgtcaaacgtatgcagtatttgttatcccacggagaaaaactcagccttatatagacaattatcagatgaccttcccaatacaaaagctaattatcaattacgcatgctgagaaaattcgacttccaaataaaggaagtgcaattaagagcctgctcttaaataaatatatagtttgatgaaactggttccatttgttactttcttgctaaagtataccagctcttcttttcttttttttggtgaggaataccagctcattgttattgtaacatcattcttttcttgaagtcttgtaagtactcatatgttacaagaccaaattatgtgtcatgcctgtaagcatgaacaatcttacctgtagtgcacaatcccgaaaagtttcaagcaatgtctccgtgagacggttcgacgctaccaattcattaaaaatctgctggctgagatccctcggcaatacagaaaaactagaatacttgttaatatcctgcaagtaccaggacgttaaacaaaaggcaagtgaaaatggcagcatccattggtgaaatcaaacacattagacaccaaagtacctcgcaggctttggccacacaaagctccattagagatgggcaacgaccagggccctttccctggcccttgcgggagacatcggaattgctgcgtggcagtgtaagcagcagccatttcaagctgctggtctttgagaacctggaagatgtctggaaagagtcatcctcgtgcactaattggcttctcttccttgagcagacagcacccattataagtgtggaagtattgaacaaaacaaatcacttcgtctatgaactccaaagaatctctatgttcagacacaattttgaccatgaatgcaacttgtaaccatctgtggcctagtcaaaatcctgggaaatcatcgaataacttccattccattctgccacatgaagataccatagtgttactgctggtggtttttttacaattagatgaatgctcttagataaagatcaactttatttaaactattttaatcatgcatcgtactatgtgttccccattcccaatgacaaaaaaaaatgtcatactaaaatagaaacacatcgaaaccatacaggcgtccggtttttgcgcgatcctatcaacagaacaaaatacacttaaggatcatcggttccattcagaacacgaacaccagaaccctcgctaagtaaagccacaaaaaataaaatccttaaaatccaaccgaattaacagaaaaacctcactcaatcgaaacgcaactggacccgagcgccgatcagaacggcgtcgtacaacctcaccgcaaggccaaattactcccccagaaagctagcggataaagttaaccccccgaaaaaatctccaaaatcgagtgaagaagcaacagtgcccaaactaatcccgcatcacccgcacacgcaacagaaaagaaaatcccaaaacagctgcgcacggaattctcacccacaccaccccacaccggagctcgccaccgagc

SEQ ID NO: 7157 - DNA, 74753 bp, Oryza sativa
agggacccagatgaaaaaagtacggccccaagctttttatgggtggccaaaattgcaattagccccttgccgccctctgtatgggcggcaagggcctaatcgcaattttggccgatggcggcagacggcgcggtcgacccatcgtctgccacgtcagcttgccgcccaccattgaggcggtaggggctatttctacaatttttttggtcgatagattatttctgtaaatattaaaaaaaatctaaaaacgaaaaaaattctcgaatttgactacagctttgggataaaaaggtcctgatgggctggctgcttgtggatgaagagatgattctagatgggccgaatgggggataagtcatcgtacgccggcccagcacgaccataaaacctgccatcctctgctgctgcttgcaacacaaagaccgaacacacgtttcttgctgaattcgatggtggttaattaggttgctgaatgctgattagtctcatacaatcatcagcgttttgtttctcaaatactgtccgtcataaaaaagataaacttctggttatcaatttaaatagatctacatagttagaagttgattttttttttctaaggaggaagagagtgtaacattataagatgaacccggattcatttagtgcagaaagcactttaacacaacagatcgattttctgtacttgtgcagcatatactccctccgtcccaaaaaaatcaatataggattagaggggatataacctgtactctcaactctagattgatttttcgtgagataaagggagtagattgctatccttctggacctctttcggatgataatgagatatgtgcgaatatgtgcttgaaattgcaaaaacccaatcctaatgtcttggttttttctcgagagattgtccatcatacgggcctggtcatgatcgacaatggatgttgggccacacctgggctagacaggtcaatagctgacggacgggtacagcaacgagcaattattttttttttcgagaaatagggaatatattatttcctccgttttatattataagattttatagtattgttcatattcatatatatgttgatgaatagacatatatatgtgtgtctagatttattaattataacctgaaacgaaggtagtactcaagagaagcttcctcacaaaccatacgtgagataaagttataagtattttctagccagagcccaaacacatattcgcatcgagccttattcgctaaaatatggctaatacagttttagctcctctggcccttgatgaatttagggcctgttcacattggtgtcattttcaaccttaccaaattttggtaaagttgctaaaaaaagtgactatatttagtttcctgccaaattttggtaattatataagaaatcatgttaaaattttggcaagttaccaaaattttagcatttgataatgccaaaatttgataaggtttttttacagcaagatgaacatgcccttaatctccctatttcctaatagcaggtccttgaccttcacggatcagaaaggctatgtccgaatatatcctctcctcatactgaatcatattgattgcagccagacagtccgactcaatgatgatcggcaccagggtccactgcaaggcccgagcaattccttctttacaggcgagcatctctgactctgcctccagtgcactatatggcaatgagcaaggtgatcataagatgcaaacataatcttcccagcactatctcttaagtcttaacacagcacctatgccccccttaagcttaaggggagtgacgtacgggaatttctgtgaaaacattacatatatttttaacatatatatcattttaagtatgttagattagattaaatagatgtatataaagatatatgcatgtaccaatacatatatttgtacgtattctgtacgagtacatatgcgcaggcatgattcatgatgtaatgtgattcactactagaaaaatcatttttttaggcggccaaaagtagttttttcaggcgggggaaggaccgcctatagaccaacgactgcgaaaatcgatagcccgcctacgaaaatcctctagacgaacaaaccggccccgcgccttgccgctctcccccggcctccctccggccgtatctgggaggggagccgcgccggagccgccgcccccgccccgcgcgttgtcgtcgccaccccgcgccgtggctggccccacgcctcgcctcaccaccgccgccctcccctgacctccctccagccggatctgggaggggagccgcaccgccgcagtcgccgtccgcgctgccgccgtcgctccccctccggcggggagggagggagggaggggagggggacgggcccggtggggagaggagaagaagtgttgagggagagagagagagttgagagggaaatgagtggtagggagggggtgggaggagaagataaggagttaagattttttttttttgtggtaggtacgatttttgcaggtggagtacataaggttcgcctgcaggcatcgcttaagtagtccgcaggcgaacagcgaacttcaccccgatttatattttttaggcggtcatttggttccaagggttatgtcagcctgcgaaaaaaagaccccaatgtcgggaaaaatgctttttctagttgtgattaataatccttttaactagatgatgtccgatgctttgctgcgggatatgtgttagacaatgtagaaatgataaaataatttggattgaaatattatgaaaataatttgagaatgatgatttagcatgtgtatgtttagtttttaaatgaaataaattgtagatataattattatatgtttgtatgttgagctttttgtgtttaatgggttgatgtggcatgcttgcatgtagcttttaggagtgctaataaatattatgcttgcatgttagtttcaggtgtttaatgcacattaactttattaactttatagaaagaagggattcctgcatgagaccatcgagttgcagaagtaaaggaagcaatgggtcgtatccgtatgcgagcctgtttggtagagctacaactcctaaatttagctccaggagttgagtctggagtggagttgtggagctgtctaaaaccagctccacctctctagttcattttgtgagagcgctccacccagctctgcgtggagctaaaactgtttggctgggctccaacttcatgagaggtggagctagagctagagctgtgccaaacagacccgcacgtttgctcatgggctgactgcttctatgtctgtttgtgagctgaaggaatgttgaatggacaaaactgatcggacagttatatatgagatataatctccgttgttataatttatagagtaaaatgcaccgatggtatcacaacttacgaggtgggtgcaatttagtcactcatcttgtaaattgctcaaacaagtcactcatcttgcttcgatagtgcaaatgttatcaaatacattttcacatcgattgtttgttttcaaattggagtccatattaacctagcatcatgcattttttaccaatgtagacaggataagcattaaaattacaaattaacacttatatttttatgtatatactactacccctactttcaatgaacacggtcatattgtgcttggcaatcaataacaaaattcatcattaattgaattttactaccggtagtattgcacgttggattatttatgaatcgtgtgaccatgtttgcaaaataaattaatatagcatataacttcattgcgaacactccatacgacacatgttttatatgatttacacccccaaaacaagatgagtgatttgtttgagcattttacaatatgggtgactaaattacacccaccttgcaagttatggtaataacggcgcatttcactctaatttaaacctaccgcgacctggcagtatagttatttattttttttctcttcaattaacgtgtatggtgatttcgttttagctatatttagatagatttttttttccaaaaagcataacccatgttgtgacaatggccatatcatgtacgttgctttcttatggtctggcaaaaattctgaagcaattaggagtcagattctcgtctcgagttagcatgcataaaaagcgtggttgaatttcaaaaccaaaattcagtttggttttgaagtttcttattgcctaagagcaagttcaatagtatagcctactactagctccaatttatttatagccgatctaatagccaattcatacaatagttgcgtactatattattaacatatggtcctacctgtcatacacacattacgtcttgaagtccgtactgcagctggctacatatttgtagcccgctgcttttctctctcatcttttatctcatgaaaatatgtttatagctggctaatagcccgctattgtacatgctctaaagactcctttaaaacacataaattgaaaaaacacacgacttagtaacaaggattgttaattcttatagaaagacaaaaggaaattttaaaataggtgttgttgtatcgcaagaaaaattgtaagaaaaaaattgaaaacatgagctatgacaattcgttattttcatataaaatcactttaggattgtttattccatagaaatttcaaacaaaacagtagaattcaatatttttcctttaataaagggttgtatgataggagatttttctctatgattacaatccttaaaatttctcgtaccaatcctcccattcaagagggcctaaaatttaacggaattaccccaaacttagagtaaatctcgtgaaatcggagaaaattattcatctccttcctccgactttcaactcacatcgctcctcccgtcctcccctacctggaggctgcagctcctggcctcccgggcaactagggttcggcaaatcccccgcaaggagggtgaaacccttccccaaaactccccaatccccacccgaccttcttcgaaatcggaggcaaaaccctaatcgcaaacagctcgtcctcgcgcggccgccgctccgcagcaatggcgtccctcttcaaggtacggattccccccccccccctccgaaaccctagctacccgagctcgtcgattccccctcctctcgcccttcctctgaggcggctcgcccgattcgcttttccaggacccgaccaagctgtccgcgtaccgggacaggcggttcaccgggacgcaggaggagtacgaggcggcgctgcaggcgtcggtgacggtgtacgtcgggaacatgtccttctacaccacggaggagcaggcctatgagctcttctcccgcgccggcgagatcaggaagatcatcatgggactcgacaagaactccaagaccccctgcggcttctgcttcatactgtaccctctcctttccttcctcaatccgttttttttttaatacaagagatgtagtttggtgctatgttcaaattaaaggtgctgcttctgttttattctagtataagcgggtgtccaaatgtagtttggtgccttttaagatgtttttctagttctagttatgcattgatttaacagtgaagtatcaatggtggttgtgacttgtgacagagaagctaagggagttttaggagtctgatgttgtgttggtactggcaggaatgtgtgattttccctagaatacgggcagcaaagaattctatctcagtgcgaatatttggcttgagcagttagatattgctattggttaagtgagtaattttgtagtagtgagctcatatgtggctccttggagagctggttttggtccgctagtatgggccaatatagtgcaccaagtttcttgttttttaccctttgtttggttacttttaatctgatgtagtgttgattagtccgcaatatggtccagatgtgtcttggttgtcgagggggcatggtttaagttatatttggccaactggtgatttttgagagtctattgggatcttttttatgtattcaggctcttgttttggtgttttgtgttcgaatttggggttttgtatgctggtagttagccatactttgtacctctaattcgaaatgtggcatcatcttgatctctgatctgttaaggttagagtatgtcttttttgttcattcaaaaaatatataccacagttcctttaactggtgtgcgtgtcttggattcctggcagcaaggcaccccttgaattatcaatcttctattaaccttacagttatggaagggattattctctgataggcatatattgctttattgtcttgtgcatcgggcatgttgttagtttatattggattttggaagatgtaaaaatgacatttatctagtttgagccaacggtgtatgtgctgttagcctacatatcgttataataccttccttcctttcaggtactactccagggaggatgctgaagatgcggtcaaatatattagtggaacaatgcttgatgatcgcccaattcgtgttgattttgattggggctttgaagaaggcagacaatggggtcgtggacggagtggtggacaagtattaccatgatcttattctgcatgaataacaaatgtatgacatttgaccatatttttgatgatagttcatgtttcttttttcataggtaagggatgagtaccgcacggactacgatcctgatatcctttggtactattgaattaccatttattacatttagagcggggttatgctggtaactcagaaacccatccgtgttagttcatactgatgaaaatgttacctgtagatccatcctaaatatggcaattcaactatctgctgattgtttcttaatagcgctcctttaaattttgtatgcctttacatgctgctatgttttttctgttgagttggctacttccttaatgaatcttacgaagaggtggctatggtaagatggttcagaaagagctagaagcacaacgtgagttagttgactatggaggtgcttttcaacctaatgcaccacctcaatgtaagtgctgaaagttttgaggactgtaccttaagcctttaactacatccttgtataattttcatttgtgttaaccttattaactgcagtaattgctttgttagagatttgcatgtgtggcctcttgatatatttttcaattggaagtattttatggtgaaacaatttgctttataactggtccgatcatatttacatgaagttagcattcatgcataatgtagcctttttttattctagtaaagcataattagacattacctttttctctggtgaccatgtgtgcctttccactattgactctgatctcacttgttaactttagctgcattttaccttgtcgtttgccaccaaaaagcgttggttgagagtttggttcactgctttatttgattcaatccttggcagcataccgtccaatcaatttactgtttatcttctgtccaaacatgttcctgattatatttcatcattttcacaaatcttggcattttttgaaatatgcagatgacagaggtgacaggaagagagggtatggagattcttaccggaacgacagaggtcgcacatctcgcatattcttgttcttttctttcccctgaactaatagctaacacaatctggtgtgctgccaccagattaccaacggaaacgttaccggaacgatgagcgatcgtcgcaaagagcacctgactctgagttcaagagagatgcgattgattcggtattagagcctgcatacgtgtcatctggcttttcctgtactaccccttcggaaaaacaatatgtttacaaaatatctcgtggttatgtttgcaggagaagaatcctaggtttcgtgagaaaggtgattctgatgaagaagacgatgattatgataagagacgccggcgctgaactgaaagaaacaattgctgataaatgcaaatgggcagttgcagtgactacactagtaaagcccgtcgagcttatgttttttaccctgttgtgtaccatatgacttatatatctgtcgtcagctcatttctatgttgcggttcatcaccacatgcttgcataggtctcgcatgcgactgggaatggattttgtgtttattgacacttcagcttatgtattgacctgttatttaggttggcaactaattgattttggtcggtaacaattaccttgcgaactatctgaaaaactgccgccttaaacttgcaaatactcgcttgttcctggtgttaagtgaaaatgttggtttagcacttgttaattgtgaaacttcggtcaaaatatatggtctaatgtgaaaattactcattatcgaacgaacaaccgcgaaccttcctgcggctttctgatacaatactacgatgttgatttcgctgacattgtgcatcgacgtttacagatagcaaagtcgatagcaaattaatatgtgaatgatcacttctctgaggccggccggcagtcatcgagatcatgaagatcgtggaggagctcctccttccggcgctggccgccgacttgaccagccggctcgtctccctgctgatccgctcctaccgcagccgcgcaaccaccggcgtggtggaggacgacgacctggagaagctccagctgctgctccttgagctgcacgctgccgtcgacgagggacagggccggcacgtcacgagccagaggctgctcctgtggctccgggagctcacgcagagcatgtaccggggctactacgtgctggacaccttccgctaccgctccgtctccatccaggcgcagcagcaagacgacgctcgcggcgctgccgccaagcggctgcgcaccagcgccggcgccgcggtgcgcctcgtgctcggcagtagcagcagggacgacgacgactcgtcccgtgccctcgcccgcgccctcgcccatctgcaagccgtcctccagaacgtgaccccgttcctccagatgctgggcacctaccggcgggtgccccggagggtcagcgtggacacggagaggtgcgtgccgatcgggcgtcacgtcgagaagcagcggatcgtcgcgttcctgctcaaggaggacgaggcggctgcgcacgtcgtcggcgtccttccgatcgtcggccctaggggcacggggaagagcaccctcatacacgatgcctcccacgacgcgagagtgcgcgcgcacttcgcggtgatcgagcgcttcggcctcgacgaagtgctgctgcccctacacgccgctggagcgggcgcagccgccgccacggacgacacgtcaagccggagcttggaagatcaccggatttacctcgacgcggtgcacaacatcgtccggcaagagcgctttgcccggaacaggtccctgctcatactagaggacgcaccggccgtcatcgaattcgccgagacagcgtgggtcctaccaatggctcacgggagcaaggtcgtcgtcacgagcgaatacgaccaaaccaaggcgggtctcggcgcgacggaggaggcaatcagaaccaagaagatgtccaaggaggagtactggtaccacttcaaggcgctcgcctttcgcggagcggcgaatgatccagcagggccggcgcacccagcgctggcggctacagctaaagagatcgcatccgtcctgaacgggtcattcctagggatgcatatattgatcgccctgatgcgatccgacccaagggagtgcttttggcgcgccgtactccagagcctcgtggatctctgccgctcctcgaactccaagaggatcaaggccgacatgggctacgtgcaggagttcgcgctgatcgggcggatcgctctcaagcttgtgcttccgatgcgtctcacgcttcgtagctgctccatcaccaagcaggggggcgatcctcaattaggacctgagcttaatcgtgtggcaggagggatagcttacagttgtcgcagtgatgactctgggtgcgtggatgtcatcctatgcagatcacgcatccctccctacgagatctacaagctctcctgcgtcatggaggaagaggtccatctagaacgtgcgtcctagaaaaatgaatttggtaccctgtataaaaccatgttaatttgcttgcttctaggtagtatatgatcttgatgaaatttacgtcttgcttgcgtatgtacggacccattctgttccattgatgtacagtgactgtgaactaaacggaaatttattttttgtatcactgatcatgcttcctagacatttgactaccgcttcagtgaatttgaaacccagttaattaaaagttatgtacaaaatccagtgaatgtcaacctgctgcaacggtctccatgttaacactagtcagagtaaccgtcgtccccgtcgtgctcctggtagtaacgccggtccagaacgagtgcttggcaatggcagcggcgcggcggcaaaagtcctccacaacggccgcgcgctccgccgggaagccggcggcagcgacggccatctcctcggcctccagcctcttgctcacttgctgaccaggaagaagtcgccgctctcgtacgtgaactggccggcgaattctgcaatatagctgtgaaacagtatagcacatatacctagctctgaaatatgatgcgccaaaacggctgtaatcacttggcagcaaaaatatggcacacactttttattgaaccaaccgatcaagttcagactttcactcattgtcagagaggcatccaagaagaacagctaagggacagcctgctacagattcaacagcagctaagtgatcaggagagcagcttggcacgagtggcaggatcttccttgctttccacccacatcatgaaaacgtagccgaggcaccagagaagaacatattggaatggaacccaacaaagcagtgccacaaggctgagcatgctgccaacatattgagggtctttgatataaccaaatggaaattctgtcacccatgggattttctttccaaatcgaacaccgtagtaggtgcctggctcaccgagcagctggtacaccctgaagagaaatcacatatatcagccacaagctaactaactgaatgatgattaccccttccgtctttgtgataaatacagaatttagtctactataaactgttgtgtactatactcatattaccaaatgctcaaataatatgtgttgccgaagtggccgtttcaagattataggaaagtgtttttattctgttaaagagacgttaaaatcagaataaaaacaaattttggagcttgagtgcctcctcgactacctcagactatttcctactggtgtaaagagttgctagaagtccaacatagaatgcataggaattagcataaaaataagttagcagtgactaatccccagggtagtggcttcacaggtatcaaactcaatgagtcatggattagcactgttaagtctatgacacttaacttacttttgcatcactaagtgtctaaatcgctaacaattgtaaacaattctaaatgtttataactaatattgaaggccctatcttatttcaaggtatggcaatcatttaaggaagatagggctttaggacaaaaactatagcaaaaatgatattgttaaaatgcaaaacaaatactgaacgagaacgggacaactacaatagatgcatcagtccattatagagcattatgagtacacatcaacttaagatgaaatttggccccttttttttcatattagatgagagcattgcttgtgcttttaaaattatactccagctataagtttttttttttttgtgtgtgtgtgtgtattgtagatgccattctggcaaatcatggagaaaattcataaatcagtaataattggtaaatagaagcagatgatcgttgttcctgcttgaaaatcgtcccatcccttactcatcccttgtccctacagcaaactgttgattctgcagcactaaatcgacaaacgaccaacacagatttatacaatcgcaaatttttggtgctgaactgcaattagtggattattgatcatggaaagatcacagatgggaacagataaattacaccgaaaacctagcacaacacacatagaaactagaaagtcgcagacgatccgaacgcgaggggatagcatcgcgtccgactgtcggaagaggggtttaggggatatatctcgcttacttgaaattgaggtactggccgacggcgaggagggcgacggagtagagcggcggcggccaggagaaggaggcgacggaggcgagggcgaggagctgcagcgccttgaggacgtgggacacctgcgccatccggcggcacgggtccacgccgccgccgcctccgccgcacaggtcgacccaccgctgcgggtggttccagagcgcccagtagaacgggaacggcagcagcacgccgacggccgccgccgccatttccatctcgttgtcgaaggcagagcggtcacgaggggctcgtggaattttcgtgtcgtcgcgacggcacactacttgggtcacctggggcgactcacactagacatcctggggtcacgagcctcgtgacatactgacatgtgtaaagtctactagtagtaatgccatgtattcttcaccgtcacttggttgctaactactatatactcagcaaatgatgcctttgtttcaagagatttctcaacagatttaaaacttaaacgctgcggcaagcatgtcacttgctacaactctgctaatgatgcctttgtttcaagacagggcgccatcgttttgcagacgctgttgcttttcagcagtacctgatgcttataaacatcagcaattccattgttttgcttatagctgattaatggatcttctgtaaactgatgcattgcctctgcttgtctgcctgtgtgtgttgtgtgctcgtcagcactgactccagatgcgtggccgtagatagattccgacatgtatagggcccactaccaataacggttcgcatttaggctgtaacagcgaaccgatacgcttctactgcaaaacagcagccgcaaaagcgaacagatgcatcctatatttctcgacagatttaaaacttaaaaaagctgcggcaagcatgtgagatagtagtaccatcctaggacagctcaaaagtactacgtcaccgttaggatacaagtctactatgtaaggacagcatgtgagttagtgagtatatatgtttaatgtttttgttgaggtttctcaagaaatccagtgcatagcctgcttcttgatggcaaattgcaagactggagatcatctgtttttgtttaaggtttcccatgaaatcaagtgcatagcctgattcttgatggcaggttacaagactggactgggaaatttctagatggtgatcgagtgaccggtagtccacaagaccacaagcacacaaggcaccaggcacgctttaggggttaaccagaagatagacaaggaaacgtattttgcatcgagtgactggtagtccacaagcacacaaggcaccaggcacgctctagtggttaaccagaagataagacaaggaaacgtaaggcgtgtttactttgggctggtttggtttgaggcataaattggtattatcaatatttgataattttaatagtgtttactgtttatttggtttgaagccaaattttggcatgtctaagaaaatatgtcatttcaatagttaacttagtctattttggtttcaatccaaacacaactttgccttgccaaaattagtcatgccaaaacttgtcaaaatttagcattgacaaatattggtaagaccaatttaggtcacaaaccaaaccagccctttgatgctattttcaaccataccatcttttttaagttattaaaaaaatgtctacgttcagtttgttgctagatttgctaaatacataagaaatcctaccaaaattttgataatattgtcatcctgccaaaattttaacaatattaccatcctgccaaaattttggcattgccaaaatatcataaggtttattttggttaaaatccgtacaggcccgtattttgcagcgaaatgttggaaacaagaaaaaacaaaagagcaaatattggaaacaagaaaaaacaaaagagctgatcgaattctctactactgttgttttacatgatctccaatactcccaaccgatcaaaaaccaatttacctctgcttatcattgcaactgctcgatgaacggagaaaatttcctaaccataacaattgaccacacgcggaggaaacagaaattttgaggcaatatcaacactcagcgtcaacagcaggaagggggaaattttgagtcaaatttctaactctatcctattacctgcttgacacattccagaaaaacatcaaaatttctggacttttcctgtgaaataaaaaataaagccccatcactcagcattatcatcatcaaaaccatcatcttcagcctccttgaccttttgaggtgctacactatcttcaaccatcgcaggatcgtcatacacgggtttttcagggcctggtcctgcagacaccttgaccatagcagggcgcaataatctctccccaagtttaaaacccttacgaaattcctgaaggatgaccccttcttcatactccactgattcttctctcataatagcctcatgaagctgaaacagaaggtgcacaaacaattcttattaagaaaagtaacaccctttgaaaacccaagaaattttggaaaataaaatagattcctacacatatccagccctttatagtagacttatcacccaaaaccatggaaggcacaaaatttaaaagagacatggaaatttcaatatttgagtaaataagtgtttgattcaaaagttaactggattagtatgtcatgtgctgctaacaatgcttaccataggatcaaatggtttgccaacagtctccacatcttcaactcctagtgagttcagaatatcaataaattgcttataaatgctctgatagctgtcgtttatttttgtttcttgctcagtttccacctttatttgtgtttttgctctttcaaagttgtcgaggacaggcagcaagctctctataacttccccttgcacatttgtcatcaacgaaagcttctctctttctacccttttcctgtagttatcaaagtcagcacttatcctcaagatacggtctcgctcagttgtcaattctgcacctaaggtactgattttgctcaaaagagaatttttctcctcctcaatagagaataaaaagtcctctatctcagcgacttttgtttcatcatcattaatcaaagcttccttgtatgattgcaatgctgtgacaataacagagggagtttcttctgtggctgcagcggcatcatctgcaccagtttctccagtttcagaatcctcctgtgacatcaaaaaagatgtctaaatgagaagccaagtgtttctattgacaagggtcaacttcttttgcttttatattagcagtggaagtgaaataacatactgctactgtgctacatgccacctcaacaactgtcagtattacatttatacgactcttcagcagaatgcagtttcttacctcaaatattgacaaagagatgcactacactcttgtgctataaacctataatataatctgcacaggccctcgcgttaaaaactggaaaatgaaatggtcgcattactgacctactatataatctagccttgctcttacagaatctaaggaaatagaacaggatagctaaatgtgactagtaaagagtcagagaaaagatttttgcaacaatgcaataactccatgttatcaagtaactcgattgcaaaatacacatgggccaaagataggaaacattgagaaaataaaatagcatcttcacacgtgtaagcacagggaagtgtggaaggcacagctaaaatgcattcataatactgaagttacacaacaactatggcaaacacttacaagtactgatgtacaagttcctaaaagaggacctatgccaaatgtgattccccaatagatcaatgacatgcaaaatagattggaaataatcccatatcagcaaaactttgctatttccagccttagtcatgaaaaagaacagatccttccaactttcatactccctccatccacaaaagttacacatattacttttgtcaccaaaaccaaggagaaattaaatcatcttggatgttacaaaatcaagtagtgaatgcaagcatgcaaccaatgagtatttaaatgactccttgggttctaatcaaacatttaatttatctcttcatttatgtattgaatgcatgaagactacaaataggaacaacttatttggaaaaactcaaatgtgaaatatgtctaacttttgtggatggagggagtactgcacaatggctaagctaaataaaacatttatttatcttgaccagcttgaggtccacatggttatgctgaatgcaaattaagaaaagcaacttactttagaatgtgaaccattagaagtcaggaaaaagtactttagttggcattccattagaattttaccaaactaattaaatcaggtgaaacaaaaatcctacattgagtattaaatttcctgaagctaccaatgaaggtcaaattcaatcattttatcatccatcatgataagccaagctttcacataggtagtgcagaacttttgcatcacccaaataaagcacagaatgggatttctttgttaattgacataatagcatatagaaaaagctgatcaactaaacataaaaccacccacaagattcctgcatctaaagccagttcgcattaattcgatggatacataagcttaaatgagatatggtacaaacaaggtagatactactcgtaaacaattcgtgcagaaaatgctagtatgaagcgatcaaataccacaccatgacctaaaagagttactaatacacaaaacttgtgtatcctacggatgagcaatttgtggttctgaaccaagcactgctatctagcttttatctgatacgctacaaaattacaaatctgataggccctcttcaaaactaactgcttatcgatcggataacaaagtaacagcatgatttacagaagctacagcaaaaaaatcaccccccgatgggggatggggaagcaagcccctctcacctcagtcgctgtctgcgcggcctcgtcagcctcggtggctcctacccgcggccgccgcgcagcagcgggcccgcgacgaagccagggactcgccgagccgcgggcggcaggagcggctgcgcccggagcggccgcgccgccgcgcgcctggcgaaggcgagcgacgaggcggcggaggacggccggcgcggatcccgggcgggagacggcggcggcgcgagcgcggcggccgtgcggaggagagcagccatgggtgaggggggattggagggaggggggcggagtttggctttggccgctgcacgctgtcgctcgctggctatcgtcgagtcgagcagcgcgcacggcacggggataactcgcgcggcgccggctcggacggacgaacggacggacgggatggatgggtcgagaatagagatgggcgcttctggaaggaggcaggggttggccggttcggttgttagcctgcttgatgggtccggtctatggagaagtggatgggccctgttctggaggcttagccggtgaggagaaaaaggacaatatgccacttcatacggtggatttcgataaaatgccacctaatatattggaaaggataaaatgtcactcaatcagtgtgtttggataatggaaaatgggggtgagattgagattgagaaatgaatgaagggttagcattaaatgaaagagggagaatgaatggctaggatttaaagatgcattttaatggatgggaaatcatttccctataccattagccaaatagggctaataggttatctttgggatattttgccactttgaagaggtttaagacaaatatacccctactatggagagagagaggaagggagagagagccagagaggggagtcgaacgacggcggccgtggtcgccggtagcgggcggcgacgagggaagaacgagtgccgtctgtgctcccgctagcggcgacaaggagaggaataagatgccggtaagcgcgcgaggtggcaccggaggggatgagcgcacgtgcgggcagcgctggagagccctccacgtcatcgccgttgcctcctccctcctcccgtcggcattgccctcctcacccatcaccgccgccgtcttcctcccccatcgcagtcgtcatcttcctcccttgtcgcagccgttgtcttcctccctcttcgtcggcgtcttcctcccccatcgctgttgtcttcttcccccatcgtcgtcgtcgtccttcccgataagcgtcgttgtcttcctcccccattgcagttctcgtcttcctccctcttcgccgccatcttcctccccctgtctgcatgtcacagcccgccccccgtgtgctcgccacccgctgccggcgagcatgagcatcgtccgggtcaaccttccgctcctccctcttcctctctatccacagctagaggtattttggtcttaaaatccctcaaagtggcaaaatatcctgaaagtaacctactgagtggcattttatcctttgcaatgtattgggtggcattttatctaaacccaccaaatggagtggcatattatcctttttctcgccgggggtgacaggacaggaagccaagagaagcaacaggtaaacagggtcatatgttttgtttcagtgccgcaaacgcgaaaaccagtctatggcacactttttcttttaagataatgaaatagaatattccgacccttgctcaacgagctacaactgattattacaatgtaacacacaaaaaaagaagctcacatgaataaaaaagaagtccatggcacacatgtgtgttaaacatcgctcacgcatccaagcaagctaaagcacaccatgcccatctgacaattaactaaatgatatgttacctacttgacatcacaagaccacgccacctcaagtcaacactaagtagagatggcaattgccctgttggggttaagtccccaccaggtacccgctcgtacggggataaggcaaattttcacctgtaggtctgtcgagaaggggcttaacttcttgcggaccagggtggatttttgttttcacccacgagtctctaaaacggtaaggtacattggatcattctacaagtccattgcaaaagacaataatcctactaataacccaaagaaaagccctactcatcccaaccttatccccacatcccttcccgcaacacctgcacgttgccagttgctttgactttgttgccctaacaagttgagttgcaaagacgcaaagtggcggatgttcccctcagtcccatagtcatgtcatcatctgctagttttctctttgctctcacacaaccatgttgcgccactatttgtcctcctctggaccatgctccctcgttgcccgcagatgagggtttcggctagctgtgagtgttgcttctgcatggtcatgccatgccgccagcctgccatcctcctcccttagtgttgcttgtccaactatcccctcacccacacaggagcatgtccatcatggatggtccacaccgctcactaggagaagctcaagatactatgctcaacagtcagcgtggcgaacgacactcaaagacgcgaaggtgcaaattgtgggaccctggcgggggtggggatcatttcctccagttgtgggttctgggatggggtcattccggtccaattcggcctcgacccattctgttgccgcctctaacaccaaggcatgatgaattaatggtatcaaacactgccccaggaccggatggactgccagttagtttcctgaaagagttttggggacaacttaagatgcaatttaaagaaatgcttgatgctctttttgaagggaacttagatctttggaggctcaactattggggtcataagtttgattccgaagattaagaatgccaatacaatcaaacaattcaggtcaatttgtttgctcaatgttgcttttaagctgattactaaggtgttagcggtcagactgtcaagagttgcagggaaaatcattagagaatgccagacaacatttattcctggtcgatacattttagatggtgtggtcattctacacgaagtgattcatgaattgagtgttagaaaactagaagggatcattttaaagctagatttcgagaaggcttatgataaagtacaatggtcttttttgtttgatgtgataaggaaaaaaagctttgatgagatatggattcaatgggtgggcaaagctactctgaacgggagagtggccataaacataaatggagaggtggatgggtatttcaagactcagaaaggtcttagacagggggatcctatatccccattgttatttaacttggttgccgacgccctttctgaaatgttgaccctggccaaggaagctggtcacttagagggagtggttccaaaccttgtgcctggagggctcactcacttgcaatatgccgacgacacgatcctttttttgcagaacacagaagaaaacattctaacagtgaagttcttgctgtattgcttcgaggcgatgtcaggcatgaaaattaattaccaaaagagtgaggttttcgtgataggagtagatgatgctgaagcccaaagaatagcagaaaaatttaattgtgagagagggaagtttccaatgaaatatctggggatccccataagctcagtgagattgacagtggcagattttgcagcctccccagataaactagagaagagactggcgacatggaaatgtgggcacctttcttatggggggaaagcaatcttggtgaattcctcctgacttctattcctatgtatacaatgggtgtctacttgctaccagaaactactcaccagatgatggactcaattagagttcgttttttctgggaaggtcttgagaataagaggaagtatcatatggtgaaatgggaagctttatgcagacccaaagagtttggagggttaggttttattaacactagagtgatgaatgcagctttgcggtgtaaatggattgttagaattgaatctggccaagatgatctttgttgcatgctacttcacaggaagtattgcagcaatgagggggagggaggtttctttcaatctagacaagagggtggttctcagttttggaaaggtttacatgctgtgaaacattggttgaggctagggagctggtatgaaattggtgaggggaattcaactagtttttggaacgatgtctggtctggagaggcgcctttgaaagttactttccctgcaatttataaagcgtgctccaaccataatgaaacagttaagcaagtgcacaactcaggtgaatgggtgataaatcttaggagatccttgacagagttggagttagaagagtgaacagagttgcaggagttgttataggagttccaaatgaatggggggagagataagatgagatggaagctaactaaatctggtgtattttctgctaaatcactatacagagagatgacctttggaggcgtgagagatagcagaatgatggaattttggaaggctccgattcctcttaatattaagattttcatgtggctcatactgaaagggagaatccaggcagcacaacaactgaaaaagatgaaatggcctggaaatcagcagtgcaagctttgtggagaagttgagtcagtggatcacttgttttttgcgtgcacaccagctagattcctttggtgttgtctgagagatatcttaggttggagttatgtgccccgaacaagaaatgagctaattgagaaacttaaagatcctggcataagagcaatttgttctacatttgcattttctctgctgtttgttgggttatttggcttgtgaggaatgattttgtttttaacaataaatgtctttcgggcattactttgatggctcacaaggtggtaatgttgctgcaacagtggagtcccttggtggcacagaaattttctggagaggtggagcccttcaaggactcgctgcgtgctcgaatcaaggagctggaagagggaagaccaggctgatctcagggtcctgctcgaggaagaagatagtgtagggagatagcgaagtcagcaacatggttttggctccaggcgatgcatcgtgtgcctttatgttagtttcctgggctgtgtgaggggctagtcactttcagctatctgtacttctgtttcaagttggcaaccccaattgtgtcatgtttccttttctgttctttatcttttccttttcgctttctgtatcgaaccttgttatgctttgttagtaaagctgggcgtggagcctttgatctaaaaataattaatggtacggtggcaatgatgaaggcaacaatggagccaatgagttgcaacacacttttgtccaattatcctcccttacacatggagccaagagttgccctcttgttgttttcatttatctaatgatgagcaacaaaaagataaagcgaagtgagcgcagcttaactgattaggtttcttgtggtggaaccaatcaatttggattcatgtactagatttgacatgagtgcttatggtaacttcgttaatctcaagatatgtcagcataatctttttaagatgtcaatagggatagagtgcgcgtgtgtctgtattgtgagggttttcgtttgtattgcgttctaaaaacacaaagatcatcggttattcccgctaaaatcggttgattccacttggaccacattggcacgtgtactgccacaaatatacccacgtactactgtttgtctgctgtactgcatccgggtttagcatgatgtttggtcgactattgagatggtcaagagagcagggcaataactgttattctgataaggacgcatcttctttaataagacaagtgagatgcacgttgtctgaaaacagttctaccttactgctcaccctgtaccttgcggtacaaatcctacaccaaattggctctaccatttggtgccattttgaccgacgatgagcacgagttctacgtgccaagactcttgagctagaccgacacttttgatctcattctcaccagcccaagtgattagtgcttcccttgtccctttttatccagctgaagtcttttggttgcttccacacttgcacacacctgccagataatccgtgagatacgacggctacgaaatcgcaatgaatcgggtccatactccaatcctcacctactgaccaccaccaaacaccaactccttccctcagagttgcttcacgtcttctcaacctactccctcaagcctccagtttttccacgccctgataggtgacttgagcgctggccgctggaattcagcctaactccggtcccatatcgccacgttggccgcgcacgtggccacgtatgacgtatgcatgtggttcatttgggcctcgcttggaatgctgtagttgggtacgaagaccatttctgtttgtaagatacatgggtcctttgcggtattatatctgtagtagcagtgaattacaggtaaactcggttccacaagttagcggcagctgttgcagatgcggtatcgcagacaatcctgcatattgcgatttctgtacttgagaaactgataggcgaagtaaaccaccgtgattaaccttattaaccctctgtgtttcgtaatgtttacggattaattaactgttcacaatacaaatacagttggcacaaaatgtgtcctgcccaaaagcgggaaggcaggaagggaaaaatttgcaggaactaacgtgtggaatcaaagaatcgttgctgcatcctaccgatgataggctgtgttaagaaccaccccgcctcctctccatgcatgtgcgcgttcgtgcgtgcgtacgtacgtgttgtttgatttcagaggatcagaagtcgaagatcatcttgcggaacttctccatgtgctcggcctgcagcgagatggccaccgacaggctgccgtcgccgctggcgctggggagcacgaaggcgagcccctcgtacgcgatgccgccggggcccatgaacaccggccgcccccagccgaagtcggcgtcgtggatcggcagtcggacccagctggtgaggccgaggttggggcaccggaacgtgtgcgcgccgcggaccagcgccgacaggtcgggctgcagctccaggtagtccagcgccgaccggcagtagccgctgtccatcctgtccagcgccgactggatcgtcgccgcgccgtccgccagcgacccggtcaccctcccggcctcggcgagcggcgtcgccgtgaagatcacgttgccgaagtagccgtcgggcagcgacggctgcagccgctggcgtccgtccgtggcgcagtacagcttggtgggctgctccgcggggagcccccgcgccagcgacgcgcaccgccacacgtgcgccgcgagcaccgcgtacgtgctgtaccgcggcgcgccctcgccgcggggcagctgggaccggaggcggccgaggtcggagcgggacagcttgaagatgtccacggcggtgggcggcggcgccggcttggcggtcagcgcctgcggcggctcgggggccagcatggcgggcgccggctggtactcgacgtgcgggtgcgacggcgccggcgggtcgcgggcgcggacgagggtgcggtcgatgaacggcatgacggcgatcgggacgccgcggcagaggtccgcccacgagttgatgaagtgcaggccggagaagccgtcggcgacgtggtgctgcatgcccacgccgagggcgacgcctccgcacttgaagtgggtcacctggagcaaaatggcgccaaagtttaactaaccgctctgttctttcacaaagattacaaaattctttttacagagttatacgtgaccgagacttctttaatctcctgagcattattagagtggaaaaaaaaaaggacgagatcacacagcaccatgtgcttaagggaaaacacaacttctttattgcacctaccgtttcactaagatacctctagttcaactaacgttaccatattaaattccaatcgtctagaagcaattcatttgacctcttgtatctcaacgtacttcctctgtcccactaaacgtgtactccgtatgagcgaatgattgcttagaataatactcaaggtctcggtcatggcaagccaacttggatgttgcagaccaccttacctgcctgaactcaattatgggatcatagatggagcctagacagaaaatatacagctggagaacctgattaagggcagactaagggcttgtttagtaaacagggacttacctgtcacatcggatatttggatattaatttagagtattaaacatatactaattacaaaacccattccataatcttggactaattcgcgagacgaatattttgagtctaattacgccatgatttgacaatgtgatgctacagtaaacttttcataattatggattaattaggcttaaaaatttcgtctcgcagattagctctcatttatgaaattagtttttttattagtctatgtttaatacttcaaattaacgtccaaacattcgatgtgacacgtactaaaaagttttagccccatctaaacaccccctatatggaacgatcaatcaaattaaggtttgcttgctagcacaaagcaaagacaaagaaacatttattttttacattctagctggtacatcattgtctttcaaccaacatgtgtcgtgcatccgaagaataagatgtccagcaaataactaacattttgttgtttggttaggccgtgtttagtttccccctattcccaaatttccatcacatcatatcacataaaaaaatttcctacacacataaacttccaacttttttttcaaactcctaactttcttcaaacttccaacttttttcaggaactataacacacccttaagctcactctatctcaaccgggtcagggggtcacccatgtggatgctgatgatgtaccaactggagcagttgtgacaattgtgaggctgtgcacaaatatgatctggcaatcttatcaaacaattggttcgctacttcgctttcatgtttgacaaaagaaacgatgatagctcgcaagtcacaacaacagcgagaagtcggactcaagtaggtagaacaccttccccaattctcagggtagttttcgacttgtctagctgtcagaatatatggttctaaccaaacaattacacggctaggttgttttcatgctgtacaatttcttttaaatttcccgcaaaagatcttttaaattcatatgttccaaattgatgggatctaatgacagggttcaactgtgcgcaggccaatcattagtcattaccgtactcagataatcgttgacatgagacatgtattaatagaaggcctataaaaacagagagctgatgtggccattccaggaaatttctaaggaataaagctaatcatttccatagaaaattccagtactaacaaatgttttctgcaacaggtatgattttttttcttttcgattcataccaggaataaattaatgaaaaatccctatattaaaaaaagcctacaaatgctaaaaattcatacgtgtttcgataattcacataggtaggttggtcggcaatttggcaccatgaatggaggcttcactcggtctaagctagagcttgatagggtccaaaaaagaaaagaaaattgttggcatgacgcagccagccactaatcacctagcaattgaattgcatgagcgctgaccgggtcgtcgcccgcaggcaagcgatcgagttggtggcggtagaaatagaatagtagattcctactacgcgtgaggagaaaaaatggaggagaattggatacctggagcacgaggatggggaaggaggagatgccgtcggtgtagtcgacggtggggatgaggcgcttgaggtccatggtgggcgcgaagtcgccgaagtcgtcgacggtggcgcccggcgcgtcggcctcgacgaacagcacgccttccccgttgcagtcgatctccacgcggccgtcctcgtcgtgcgccagccgccccgccatcgggtagaacggaaccagcgcctccgccagcgcccgccgcatcctctccccgtcgaagtagctcccgccctccgccgccgccgcctcgccgcgccggaagaagtagacgctcggcgtgtggaaccgcggcaccaccaggtccaggctagagttccacagcctcacccgcggcgtctcctccgccggccgcaccatcgtcgacccccgcacgttgatcttcatctgctcgcatcgcacgcaacacgatcaaccaatcaatcggtcgaacacctcgccggcaaaccagcaaacggggagaaacatccaagcaagcaaacgagatgaaaacagagagcattccaaccaaccttcgccgacgcggggcagatctgggaggcgagatcgaaggcctttggcaatggacaatggtggagttgtaaaagtatgttaggtaagcagctcttgggggagagctggtgagctaacgaggggtggagcgccttttatagctgtcgctgggatgccaaattgccaatatcgcatatatttcttttttcctttttctttaagtaaaagaaaaagaaaaagagtagcggtgttactccatcaattttcataattcttgacttttataaagaaaaagaaaaggagtagcagtgttactcatcaattttcataattattgacttttttaaaagctaaacttttataactttaactattaataacttcaaaaatatttagtttaaagacactaaaacaatctatatagatttgtcttacaaaatgttataataaaaataaaaatatgtttatttattggatatatcataataagagtatagtaaaccgtgtcattatttaaaagataaggaattatgaatatgcaacctgaataagtattttatttggaatttatgccagtaattgaccggtggtggattgcttcggaggaggaagaggtgaggagttggtgggatggatgacctgcgtgaaagcggaggaggtcgggggtggatcggattttcctggcttggcttggggaaggtttgattccatctgcgctcgacggctcgaggcctccgtctccgtggacgcggtccaccccaccggacaatggacgcggcggtgatgatgatctcttcgccgcatcagcgatgacagcttccttcctagtactatctatcattcacgcgggcctaccctaatgacaaacaggagcagcggcagcttcccaccggcgttggaaaatggtgtgatccactgatcgatctcccgtgtttttttgttggcgaattgacgtaacgacttgtcttttcgtttatgcttatacttattagttaaaatataaatttttaaccttaaatttaagttgattttgggaggttttcatcaaagtttattttcagtattgtttttaaatcgctaagaacacatgtataaaagttttatttgtaaattatttttcgtttgcaaataaataaacgaaacgatcggactgataatctctttgagactatgcaataatacatcagtctccggtgacactgtcacatcttctgtatcgtttccacgaacaattttgcttggatttgcatgtgcggttaatcttacagcagcaatctgagatttttccccagcttaaatgcagcgagttcaaggcgagatcgggctgggtacgatctgctcggcacatggtctgacaacgcaaacccgagttaaccgtttcccaaatattcgggcacccaggttatgtatggaactatggatcgggtcaccgccgcgtccagctttatctggtgcgaaatccttgtccaactcgtgctctactgctctgttcagctgcaccgatggggcagttggagtttagatgacgcgaattagatggtgaattacgtgtggcactacgtacggcgggtactactagctcgatcgctgctgctgtcaaatactaccaggcgcgcttttggttaaacagtaacgatcaacgtttgaccattcgttttatttaaaaattttgtgcaaatatgaaaatatttatgttatgtttaaagaacatttgatgatgaatcaagtcacaataaaataaatgataattatataaattttttttgaataagacgaatggtcaaacgttaaataaaaagttaaaggcgtcatgtattaaaatatagatgtagtaaattttagttgtctcgttgaaccagctgatacatagtactgatgcggtgatgacccagcagcaaggctcgtgtgtgcacgcacagaccagctcttacggctgaacgtttcatagtataagattattggttagtggtataattgtacgaaggctgtgtttagttcacgtcaaaattgaaagttggattaaaattgaaacaatgtgatggaaaaaatgaaaatttatgtgtgtaagaaagttttgatgtgatgaaaaagttaatagtttgaagaaaaactttgaacctaaacacttctgcgtagaaagaaaagtcgctcccgggcgagggcgatgcgacgtcgactggtgcgaaatccttatccaagctgctatcttctgacgaatgtttaggttaggtgctacagtaattaatactgtagccaattactcactagctctgaccaagccagcgatcgatcagcttcagatgacgaggtatgcgaatgcgacgccgcgacaccggcagagagccggaacgtacaacgtgtgctcagtgccatactgctgccatatgccgtgttcctttcatcctgcaaacctgtactctgacccagtctaacaagtaacaaagctgtctgatttgaaaatgaacggatatccgttcgacgtctttgcgttgcaggtgttcgattagtgctactggtacctcattcgtgcataatgtttagagcctgctaataatgtttagaatgatggttgctccagagaaacatggactcaagtactgcatgtctgcatacaacaatcctaaaagggaactttcacatgatgtcagcatcccggaccggtacaccgacagccacaggcccatagccaacagaaacgtacactgtcacggcgccacgaaatcgtaataaccgatgatgtgcttcgcacggccttgcagttgcagtggacagggagtccgggaccaaaggcgcacggagaaagtgtcaatcaaagaccccatccagagaccgcaaaatccaacgtgaatcatgcggagattttcacacgatcgcacggctgattcgaagatcgagcaaactactctggggcctggcggctttacacctacctatgcaaggacgtgcatctgcatcgatcatatggctgcgtttggtcgcaactcgcatgggggaaaagtagatgcaaaaacatagtagtggttcgccgttcgagcagccgcaagaggggtagtagtgggtcggtgtagttagcgcagctgcctccattgcttttgctcctcgggaggtttgtgtcgtgtctttgtgtccacgggaaggcttgacggaacaagagcaaagagcaggtacaatagtagcctattagccagctataaatatattttaatgaaataaaagatgagagagaagagcagcgggctacagatctgtagccagctgcggcacggactctaagacgcaatgtgtgtatgacaggtgggatcatatgttaatagtatagtaagcagctgttgtataaattaactattagatcggctatagatgaattggagctggtagtgggctatactattaaacttgctctaagtaaaatcatcgtcttacgtaggatccgagtcaggatgagatatggcgcgttgccggcttgccgcggcctgccgccgcactgcaccggtcgcggccggcacgtgttgagccttttgacgaggccttccggctgggggccttaaaccgaaccctactgcctttagtgccttgtaattgggctctgaggcaacgaggccatgattaaattaaacagaaccaggcagcgttgctatttagaataagttccggccagtttggtttgaggtctaaattaggcttaccaatttttttttggcaacctcaacaataattgtgtatgtttggattgaagccaaattttgacatgcctatgtaacataggccatttcaatagccaaattagtttaatttggcttcaatccaaacacatgttggccttaccaaaaattgacataccaaaacttgccatgccaaattttggtaaggccaacattggtcacaaaccaaactagcccttcattttggatcccttcttcgttgctgagttcgaatttcgtcctcgaaactgcaatacaagatataatgagtttctcaacttacaaaactggtatactcgagatcctaaccagtatagagtctgttcttagccgacgtggcgagtgggccccacatgcgaagtatatttcttgtttcagcaatctccctctctccccttcgttacccatcgccggctgggggaagggcgaggcaaaggcagcgatggtgaacgatgaagcttcgatttgcggaggcggccgatgacgatgacggcggagatggcggtgctggcgactatcagggttgggggtctcgcatgggcgtttctcctctcctctcatcgcttctccatccctctcgttctttctctttctcgtctcacctttttttttcttgttgcatgcaccgccacgtagaggggttctgtgcgctcaagcgatgcggggtggtgatggccttggttccgatgagtccatagcggttgaaaccgaagtagtaatcaattcacatgatagtgcagtggcaagggtatgtggttttaacccccgaggtctagtgtttaatcccaacacgctcacaatttatattaaaaaatgtttggaggggtgtatgggcacaaataaaacgaacaccgaatcgaaccgaattactagttttcgcgtttttggatttggtgcatttatttttatgtatatcggtgtccatgtatagatcggtttttgtccgctgtgaactgacttcaccgaagataccgaacatctcgtgcgcatgagagcaggtacaatagcaggctataagccaactgcaaacatattttaaggagataaaaaaaggagagagaagagcagcgggctacagatttatagccagctgtagcacggactccaagacgtagtgtgtgtatgacatgtgggaccaggtattaatagtgtagtatataactgttgtatgaatgagctattagattggctatagatgaattggagctagtagttagctatactattgaacttgctctgagagaggcaagctgcgggtgcctcgtctcccgcgatctgggcctatatgtgtggttcttgctcttgctctatgggcccactagcttttgttggttctgcgtgatgcctgcatgtagggttgtaaaaaaaaaagctcgagactcgtgagcgtctcaagcgctcagctcgagctcttaacgagtcaaacccgagtctagctacaagctcgcgagctttgtcgagccaagctcgagcttctcacgagcctaattgtgtgtaactttagaataaattagtatctattcaaatgaataattagtgtattttggcatcatatattaatcttgagttctcataatatttttcttcaatattgttaattaaaattattgtttttactaaattttatcatcaaaatatacattattgtatactcggtcgagctcgtgggcctagccgagctcgagcttgtgtcgagctcgagccaaggcaggcaagctcgttcgagctcagctcgatgatagccctacatgcggctccacgtctgggtaagtggatgaatgcatagataagagcaattggatgatgggcagctggaaaacttcttcgatataaagccgaagtccacaaaactgaacggtttactctctaccgttgggaatctctctaccgtttactctctatattaaaaaaaacaaaaacaaaatctaatacgagatacgacatattttaatattattaatctatacaatttactgtacaggtttgtattatcatgatatattaacctcgtcataaatttatttatttaaagataaaaaagagtaaaccctacttttagatgtgcacgcactgcttaacaaattctaatcaatttcgtatttactccgtctactactacaaaaaaaatctgtcccgggtgtatattcacagtgaaattccccgcactcccggagaccccgacccaataccgtcatttccagcaccgaaacggcattttcgtcctcgatgttcgtcctcccgacacgtcgccctccgagaaggcgagcagcgcagtgacacaacctacagaaaaagaccgttctacccctccaccaacatagcaaaacagaccacacgacgccgcaccgccgcaacgcaaaagccctaaaacgcctctgcctctgggggatacaaccctaccccgcccccaatccgcgcctccgtctctccgcctctcttcttcgataggcggatcatgacgcaggcggatcaggcggtgatcagcctgcgcccgggcggcggcggcggcatcggtggcccgcgcgccggccgcctcttccccttcggcgcctccacaggctccctcgacttcctccgcccgcgcggcggcgcatcctccggcttcgctgccaaggtgagaccgctccatttggggatggtgggggtgatggtcctagggttcgatcctcgcggaaggggacatatggggggggggggggtctgcggggtgcattgcgagtgctggctgatgggtgtgacatttcactggttttttggtttgatactcccctttgatttgcttgaaggatatacttgatttagaatctgtatttctgatagcatttgtgaacaataatgattgacattatcaaaagagtgtgttttactattcttagtgcagtgcttctactctttatcaacaactagctgtgcaaatcaaaaagcaatgtagatgaatggaggagcaaatcggcccctctatttgccccaacaattgcacttctcccttcgctttattcacagggaaagtccctcaatgttctaacagcaaactaaaagaggcttcgagccttcgatattgtagtttgtactaactgcaataaacccagtgttagagaacttttacccaaagaaaacaattagctagaatacaatccatcctagatcgttacatgctccgctgggccaatcaaatggcgagattcttgagttgcaacttgttggcttgtttcaaatgcattttgtctagactgtgtttctggtctggttcatttaatatgagccaccagatatgaatatatagtttattaacctctgcttggttggcatttgccgaatctgttacagcttggagacttgcggtttgaacctctcgagcgggttcgttacactagggatcaacttgttgaactgcatgaggtatttatctgttgctacttatttacttactgtatttcacatgatgaaattaatcattatggaacatttagtatagctgtcttctataatgatggagctgctcatattttgaaatattgataaaccaatagtgcggtttcactgaatctatttgcttggtttatgaaacacactgctcagttgctcacctttgttttgcacatattctgcgttttacatattatatttaatatatgtgcattgagaactgaagatttggaagtgagataacaatctagctatccaaaattcacttcaagctttaggggtgattcagttgcttgcacttgtctatgttgaatatgacaaaatgattagagaaattgactttggtactcagaaaatctgtctccttttattttttctgttgatcttttctgctatctgatgtatgaaacttgtataacaaaattagttttcctctggtgttctatggctcttcatttccctgtaaagggaagttgagcatgccatcatgttgtgccttcagttccacatatatatcatttttgtgttatggacaatgactaagttgtacatgaaatggcctttgtgccttgaataattcccaatcatgctaaatcttttcccctacatacataatggactctcctgcagtaattctgttctaaaaccactcgaattttaattgtaacattgataggagtgaagcaaagttgtggaacaacctatgtttcagagaagtttaaatggataaaacaacatatatttgcaacagttaccactggttcttgtattcataaccaaatattcttgtcttctgctttatttccctcgacatctttccaattacatgctttgattctatggttttgcagattatcgacatacctgagaacatcttgaagcttaagcaagatattgacatagaactccatggtgaagatgaaccctggattaacaatgactcaagtgtgagaactcttcctttacctttcaactgttcctatgtgttgcaaactgtatctgctcagtaagactggtgcagtttcacgtttactgattactacctgtttgatgttttatcatatctggcaggtgcaaactcagtcatataaccgctacgctgagacagacaaccgtgattggcgttcacggattgaacaacctgtgcaaactcctgctattggtggtgaagagaaatcttgggacaaatttcgtgaagcaaaagaatcatacatttcaagtggaaagcaagatcaatttaataatcaagacaaattgagctcccagttcagtgcaaaagctcaggtatcttgaggataaaagagtatcaatgggctgtcttctaagctctcttgttctgcatatgtgccaatatattttttttttacaattattgtgctgaactttttctcacctgctcctaactcctaagcttgttgttgtgccatatatattgttggtagaaaattgttccatcgagggggcaatatacgcttgtgatgggtgcacattatcatatacctggttgcaagtagtgattgatattgtggcaattcttgcatttatgaattacatcatagcaacgcaatgatgtatggactttatggctttatctaattctagtcctttggaggcaattagacatctgtcaatgcaccaagtgaaatgattgcttcaaattcatactataattttggcatgtataattacgaattactagaatgtttgctttggtggctgtatgctgatgctgcataagtaaagctacatgcaaaagtaatctgatcattttgatttgatacacgacaattatctaacattctcattcgtggtaaacatcaggttggtccggctcctgctcttgtcaaggctgaagtcccttggtcaatccagagaggcaatctctccaacaaagaaagagttctgaaaacagtgaaagggtattgtttgatttgtatcatccttcctcatcatttttatattttcatatttaggaaatataatttatttactctttttcgtctagtccctaatgtgctgttttagacatacctgcagccaaaccttttgaatgttgagcactaatgcttctttaaatattttgatttgacacatgaaacttgtggagaactcactatatcgagctttattgatgtcctttaatagaaattagttgtcatagttttgcttttgggactgtactgatgtccaaagcggtatttatttgtggctggagagagtaaccaaacattatgttttttcttgcatatatttatttgttatttgtttcacagtatactgaacaaattgactccagaaaagtttgatcttcttaagggccagttaattgaagcagggatcactacagctgatattttgaaggtatgttcttgttgttcattcaactggctttgcctttcgacagttccttgtgatttacatctggtctgtttttgtttcaggatgttattagtctcatatttgagaaggctgttcttgagcctaccttctgtccaatgtatgctcagctttgctttgatctcaatgagaagttaccctcattcccttctgaagaacctggtggtaaagagatcacgttcaaacgtgtgctgttgaacaattgccaagaagcatttgaaggtgctgacaatctgcggtctgaggtcaataaattgactggtctagaccaagagatggagagacgtgataaagaaaggctagtgaagcttcggacacttggaaacattcgtcttgttggtgagctacttaagcaaaaaatggtccctgagaagatagtacatcacattgttcaggtgcgcatgcaatctttcgcgtttagttgaatataccatcaaatgaaaatcattaagtcaagaatacgcatgtgccagaagtgcacctaatcgggatgttaagactgactttttatcagtttgtttgaacacccttcatttgatgacacaagacatccttgtttgcactttacagacctattgatttacctatcaactaaatattttcttacccattttctgtaaacaggagctattaggttctgaaagcaacagatgccctgctgaggaaaatgtggaggccatctgtcagttcttcaacacaattggtaaacagttggatgagaatccaaagtctcgacgatttaatgacgtatacttcaaccggctgaaggatctaacaactaattctcagttggcatcacgattgaggttcatggcacgcgatgtccttgatcttcgttcaaaccaatgggtgcctcgacgtgaagaggtacaggtcctcaacttctctttatatttgtattactctccagaatttttatctgcccagtactctctactagttgctaatagctatgcagtggttattaataacagaaatgaaaccaaattagattactaagaaccttcatatatatggtgagatactatgttgagtcttttgaatgcattgttttttggaaattgcccaagtattgccctggtaatatatacatggttacaccacaagagttagtcatgatggtctgtttcacacgcttacaatacttctacctgacattagttcacttcaagtcctatgtaccttttgcaatacaccgagtggcactcattctagtagtcactgagcatgataaacatttagatcttggattctgttttactgtttctatcaaagcaatatgatattattttgctatatgaattgctctgagattctgttaattctttctcagatgaaagctaagaaaatcagtgaaattcatagagaggcagaaaacaatcttggattgcgtccagggtcgactgcaagcataagaactggccgtactggtactggaggtggaggacccctttcaccaggagctttttctatgaaccaacctggtatagttggcatgttgcctggtatgcctggagcgagaaagatgcctggaatgccagggctaggtagtgatgactgggaagttccgcattctagatcaaagcccagagctgatccagttcggaacctcaccccatcattggccaataagccatcacctaataattccagactgcttcctcaaggcagtgcagcattaattagtggcaagacgagtgcacttgtgggcagtggtggcccactatcccatggtctggttgtcacaccatctcaaactacaggaccaccaaaatcactcatcccagctccatctgtagatcctatagttgagcaaccagctgctgcccccaagccaagctctacagagcttcagaagaagaccatatctcttcttaaggagtatttccacatacttcttctacatgaagcacaacagtgcattgaggagctgaagagtcctgattactacccagaagttgttaaagaagccatcaatcttgctcttgataaaggcaccaattccatcgatcctcttttgaggctgttggagcatctctacaacaagaatgttttcaaagcgactgacttggaaactggatgcttgctttacagttctcttcttgatgagcttgctattgaccttccaaaagctccagtacattttggtgaagttattgggcggctggtcttgtcacattgcctgagcatagaagtcgttgaggatactctaaagaaaattgaggacagtttctttcgtgctgcagtgtttgaagctatgatgaaaatcatgaaagcaaatccatcaggtcaggctatcttgggctcacatgttgctaagatcgacgcgtgcagcaaacttctatcctcggaataaatatttgtcgcaagtttgactaggccaacttctaccttattactgatgtcctaactgggaatgttacattggttatttgttactcggtagttggcaggttttgccctttcagttcgagaaactacaacactgaagttgaggaacagctttttgtgagctgtatttttttgcaaggtcagatgactgataatgaagtaaagaaaagctatagatttagctctgataacaccgtaacaatacctcgatggtggtttacgcggctactcctcttgtaacaggtactgctgcgtgttggcaagcatacttgttagcgttgggtacaactgagttcataatttagtcgaaagttgagatctgatgtaattcttccagccaatctcatgacaatttattcgagatttgtttggttcaatttaacctgtcaatgcagtcttatcttctcatctgaggctgtgaggtaggatatgggaattcgtactgtttgcatttcgcgctcttgcgtgtcatgaatctgatggcctcattgtttcgcttatttatgaaataagccaaacgatatatttgtaaacgaaagtagtttatgaataaagcaaatgttgaaaaatagacttcaatgaaaaaaaatctcaaaattagctctaaatttaaggttgaaaatttaaattttgactgataagtataaatgaaaagatgaggtcacgagtgactagaggcaaatgttgttacggcgtaatgcagacggtagcagttttttttttcttttaagaaaaaaccggcctctacatctggaacagatgcatacggctaatctttgtttgaaatgtgcattgtctcaatttccttagtagaatcatatagtttctgtcaattcccttagtagaatcatatagtttctgtctagtggattaatgtagtttcagcctagtagatccatatagtttcaggctttatggcaaacaagacttttaatttcttattatacacatatgaacgtacattttttttcgagactaccaagttttagatcttagatcgtctcgacacgtgcagacctttaggtaaaactacgtttggctataactctggattttttacaaagtgaaaattttacttcacaaatcacaagagtacttatgttctataaaaaacaaatctaaaataaaatgtgtcacattctatattagattcttttttttattgaacgaagggagtactcatctaacgttacaaaaccacataatactgttgcacaaccactagcaggcggcaggtttggcattgggcgacaaaagaccattgcaagaactttagagcatgatgtatgtccatatcgaatgtagagatcatgttttaatctattgcaacaaactttacacgtcatacatagatatatagatatatattgataattcctaatataatatactcccttcgtcccagaatatacaacctagaaccggattagaagcatcctagtactataaatctggatagggggcatgttcagattcatagtactaagatacgtcacatccgatcttaaattgctatattttgggacggagggagacagggagcattatctttatgattgtagtattatgttgcctatcagtatgttaaaaagaatggcaccattctcttttctctttcccaatcttttacgccattaaaaatcatgttggtattttctttaagatgataacgtcacaccattacttatgccttacagcaagtataatagtgagctactccctccatctacttttgatagtcatatttcatcttggcacacagaccaatatttcatcttgccttagagcaagtataatagtaattctacttatcatccatttaaacatgctactagtcattcctcgtaaacaagcgattcattaatatttacatttcacgatgctcaattagccaatcttgtgtgaaagaatggagagtcatacattaaatccgagaaagtcattaagataataggttgttgaattgaaatatgcctatcaaaaatagaattttccgatttggaaatatgactatcaaaagtagatggagggagtataagcctactataagcttatgtggagacgagataacaaaaaaatcaaggatgttggctctcatgcaagagctagcttaacacatgctcctaggtaaatacattaaatgcatatgtgagagatagagagagaagaagaaagttgtagccaaacttatagctaatcattatatatgttggttttaaaatgggctaatagtagaaagtgagctatactattatccttgctcttaatgctggcaacagggcgaaaggaaatctaggaggaaggaaatcctagagccacaagaattgattcgatggtttaacagggcaacacttattagtaagtttgatgcttcaagattcgtgctgcgaacgtgtcacaactcacacgcgaggattgggtctcctacctggtctccttttccatccaccgacccggaccgctcgacgctctcccccctcccccctcccccgcgactcgtgaaatcccccagccgacacgccgccgccgccgccggctactccgacgaactcgacgccgctcagagctgcctccggcgagcctccgccccgtacctagctcttctcgcccccccaccccccaaagctcgcctcctccgtctccggagcggtcctctcttaccgcttttgactccacctcctctgacctgcgcgccgactcctcctgagtccggtgtgccgtcgggaaggtccctacctgtgcgccgccttctccaagtccgtcgcaagtgacccgcccgcgctctcgatggtaagccacccgttctccccccccaatcttcacccttcctcccacagggttctagggtttgggcattcgtgtgttttttttggcttaatggcaggtgcatgttgtactgatcgagatgtttgtgcatatgatatgttaaagctttgtattgttcagaagttaccggtggtgtagcaatagtctatatagaaaaccataatatgtagtgccgtatggaccattgctatctttttgatagaagcaaagatatgtggtttgcttaaatacagtggcccgggggcctatggactactgcgagcacaaaacaagaataaaagaaaaaaaaaatctcaacgcatgatattgtacgacacaacattatctcaacaagtctacattaagcatggcaacaagcactaatcacaagttcataattcatcatccatttgcaaacaagtgtaaatagaagagtatgtactaaaacatatctcaactccttaagattcaggctttgtacttgggtttctactactagagccccggttgaagtaactcttcaaatctgcaaaacaaattacacaaatgcaatttcagaaacaaatttgtacactttgaatttgcaaattgtaatattcttaaattgtcaacaatatgtacctctttgtgatgccaatgccttccctttcctctttctatccattttctgctgatgacttggcttgcttgctatgcttggtgttggtgctgcactgctgctggctggctagttggcagaggttagtggctggctggctgctgtgcgcctgtgctggcgatggcgccctctgccctgcctgcgatacatggctgcacccctggctggctggtcacttcctgatagctcgcagtcgccgcctgccgcagtgccatgctgtgctggcgcctggtgcggatgccgccgctctgcgcccgccgctcgggagcctggcggcctcgcccctcctcgcctccaccttccctctcgtgcgccgactccgctccagcaggcagcagccgcaccgccgatggggattagggtcgggatgaggattgccggattggagaatcgatggaggtgaaggagatgggggaatttgggtctagggtttaatagtcaaaagaaacatttacatgaaacaagcccagcttggcctgctacctgttggtgagcgtacgtgcggatgcacccacgcagcgcctcgcgccctttcatgttgctcatccaaagcggcgttgccgcgctctttgcggctcggcgccctgctgtccggagaaagtgtggggggtggggggtttatcgggtggcgtgaggtatagcgagcgccacacctcgccctaccgagccctccgccactgcttaaatactataatctttaagcaaagatatgtggtttgtgctactgatggtatttattttttatttataagcagtacattggatagggttgttgtattatcagggaatcactgtctttagataataaagctttctggttgacataattgtgatgctgaccatgctatcatattactatttagtataacgactcctcgcttttgtagtactagcctgatatatttcaggtaatggatactctggaaatatttaccttttcaggaatttgttgaacactctgtagttatggcatgtttgcagtatcatcaaattgcaccattctttcttgttacttgaagcatgcattgaatctttttttttcttttggtatttgtgcaggctgggaggcacaccattattctgatgcaaccatcccaaaacagggcttctagaacatttatggattataattcaattaaccatgcattggatggtacgtacggttttgaaagcttaactaatgatgcaatgcttagataatagcttagatattttttttatatggtcctagtgagtacgatatgatcttgcaattttatgaattcacttttctcatgtgatcgatttgtttagaaaaattaacttgaaagttcaataccatataaactgcaaacgtccaaatttgcatatagtgcattagagacattatcaggatttatggcactagactctcctcttacatattatttgttgaaggctgtttttcagaaaggagagagggatgttcttcagctgcacattatcaattttttttggtattctgtttaaaacattgttttatttatgatctgctatgtgcccgtttgatgcatgacatgtatccattctactctgttataatcggaactatttcatttcttcaaatgtgcttcttgatttattttacttttgctctttgtaaattactcaccacagctctcttctgaaatgacaggactgtgtggtctttatgaaaggaaaattagggacataaacccaatggtaccaaacataacatatgatatcactgacctctataacttcattgatggcctagctgacatcagtgcactagtgtgagtaaaataacttttaaagaattggatcagaatcgtgcaatgttaatttatgtgtatagttttcaaagtaaaaaacaatcagctactatttttttctgcatttgcagttatgatcactcaattcaggcatttctgccatatgatcgacagtggataaagcaaaagttgttccaacacttgaagaagctagctcagcggtagtgagtggtttcagttcgatatctctcaccagcgagaagagatgtggccatggttgtcagaggtgttacctgtaaaacaatgagagtttcacattgtgtgctcatattctgacaaaacttaaatttcaatgggttgcctctggtacccaatatatcagttaaacttatctgctgtgtctctttgtgaataaaagaaggatttggctgtatactccttttcaaaatataagacattttgtttcgttaggataaatatttgaccaaaaaatactttattaggatataagttttgtgacatgaatttattatattagtcttcaaaagttcgtacttatgcttatgcttcatttatcgcataaatgatgtccgagtagagcgattgttattcaaaccttaccctaacggaacaaaatacgtcatatatttttgaaatggagggagttttgcttttatctgtccgttgccttattgctcttgttcaaacatagcagtagttccttttgtgcctatcatggtttacgattgtacttcccacaatcccacgtccacacaacttgacctaatgtattatatttcaaaaatgaatgttgattcaaagtgtggtgcgcctgtctaatctctctattctacgaatcctttgctcaagatttacaccgcgtttttttacacggatttacatcgtgtttgctccaatactacctaccataagaacagaataaatatatacatagacaggctgatacgggatggaatgctcataacttagcgcattagtgcatctgcaccaatttgacagtgtgatataatttcattgttcattaaaatgtaaacatttatttggtgacaaatgcctatgacaggtaagtcataactgatatttgctaagataaatccgattgttggcacaagcacaacctagatatccaggcgttacagtgactaaaagacttattaagtgtgagcatgcaagtacaattgatgaggaaaaaaaatcccggcaataacaggacaagcggccatctacttgtatgaatccatagttcatggaggcatcttcaaaatgaagacatctgatatcagatcaaacaaaaccaattgaagccggaaattttttttgccgcttcagttgacagaattggctatggcgtcgtcagtgctacttcaagattttcaaaccagaatcagtgcctgaatggcagctgatcactgccaacggacaaagccttaaccacgatgcctaccagttggatgaacaccccccctaaccccaaaactagccttgaccccaatctcaattgttggtgatggaacaaagccatgggatttcatcattttgaaatatttattggcttcttccgtgaaacccccttcgagaaggcctgctataatcctctcaaaatgataagccttcaataatttcttcttctcctctaaaatcttgagggatttgcgggttctctcttcctgttgtgactttgcgtacatatcagcaaggaaaacatgcatttccaggggttcctctccagcctttctaatcttctgcacaacttgttcagcctcctgcactagctgcaacctagacaaccaatccagcaagacaaggtttgttttaactccaggtttaagtccatccttctctaacttcaacaggaagctcagagcgtggtccagttggttcttcatcatgtaggcaaccatcataccagcaacgcaacgatcatctggttcatgtccagaactcctcatctgctcaaacagggtatatgcttggccaacgtgaccaccccgtccatatgcttctataagtgatgtgtataactctggcgtgagctggaatccagcaagtaacatcgatgttttcaccctttcggctccatctatcatgccacgctgagcaaatgccaggattacatccatgaatagttcctttgtgggtttgatcgatctctccatttcacgtaacaaattttctgcttgttttggttctccagacttaagatgagctctgatcattgacgtgaaaagcttcatatctggtgggaagccttcccccttaaggaattgaaatgcctgattggcttgttcaagattccccaccttgcaatacatgtggactaaagtgatggatgtgacgacatcaggtgcaataccattctctttcattttacctagaatcctttctgcgtcttccacatgatttgctttagagtgaagatcgattaacttagagtaatcacgaatggttgcaccaaaggattcatcagccagcagaatttcagcaacctgtaaattacaacacagcatacatgtgaaactacaaaagagatttcaatgtaagtggatggctgaaggctttctaaactcagtggcagttggccaactttacaaaatgcaaagtactccctcaatttaaaaataatggatttaaatgccaattgtccacaaattgaagtttcatttccatgtgaactagcctgaccacgttaaatacagctgaaatagtcataggttacagagaaaagttggtgcagaacaactatctcaatcatgggaaagctggacatgtaatagcagtctatctgattatgctagtagctaaaacttaggatttcaatgggagacgaatgcaacatttgcactattcctaaataggcaacaatcatgaacaaatatcagataacacatcttattgtttaaaatcttcaacaaaacgctgaacaaaattagtggtcagaagatgcattttggagagggtgaaagtgagctatatctgatacagaaagactattacatatattgatggttcctttatcgtcaaatactataagtcaacaagtaatgtgatgcaaatggcacagttcatactggtcaacctaagaaagcataatcaggccattttagtgcagcagcaaaagcacacttcaaactgatcaaaccaagaaatcacataatcagggtattttagcggttagcgcagcagcaaaagcacctaaaactagaagatgtgccatgaaagaacaaggaattttacaacctgaaagtaatctacttgactagcatgacatacataaggcacaatagtagagccttcaagtaaaggatatatcaccttgagatacaactcaacattgcgggctttaagacgctcgagcagcgccatccagtcggcacgtttcggcagcagctcctccttccactcttccatggcaggcgccgggtctcctttcctcggatcaaccgccatcagcttctcctcagccttcttcgccttcccttctattggcttggcctcctgtggcacaaaatgcgcttcagcctcggccgcgcgctccacaacctcaccccacgttgggtccgacaagtccaacccatgtatcttgaacttgatctcccccttcctctgcggcaaggctgcgagcctgggcggcgggagcgcgacagggttagcggccgcctcggcctgggcgcgcatgtcgtcgaggccccggtagaactcgacctcctcgagcttctcccgtgcccacttgaagcggagctcgcggagcatctcgccgcggatgccgacgtccgacgcgaaccgcgtcatctccttcacctcctcgcagtggaggtagccccggagctcggcgcggacccggtcccgctgcatcccgtcgcgcacggcggcgctgacctcccacaccgccgcccagaggtcgtcgctgagctcgacggcgccgccctcctccggctcgaccccggtgaggcggcacaggacggcctccgccacgaggcggagcatctcgtcgagcacgtggcgggcatgggtggggaacgccgcggcgagggtcggccgcagcgcggcgacgaagcgcgcgaggaactcgtcgagcaaggggtcgggggccggctgctgttcttgctccgcgtccgcgtccgcgcccgcgcccggggtcagctcggactggaggatccgggaggcgacggggggcggcgcgtgatgaggaggcggtgggggttccgcgtggaggcagcggcggaggggcgggagtggggcgcgggcgacggcgagggaggggaggaggcggcgggtgagcttggagagggagatgagggctctcatggtggcggcggccgcgcccggtggtgacggcggcggcggtgggcagtgaggcgtaaaaccctaccaacgcagtaggggggagaagaggaaggcggggaggggatcggtcgatctggaccgtcgatgtctccgatccaacggctattcgttgttgcggcgcgctcgtcggtctgtcagcgatcagcagccttgagagcaggtacagtaggaggctataagccagctgtaaacatattttaaaaatataaatgagaagaaagaggagtagcgggctatatatttgtagccagctgtagcacggattcaaagacagtgtgtgtatgacaagtgggaccaggtattaatagtgtagtatataactattgtatgaataagctattggattggctatagttgaattggagctagtagttggctatcctattaaacttgctcaaatgatgatcttttgagtgatcaaaaggacacttggtggctacatgtaaatgttgctgtttattgaaggacgaatataaatttgtcaaaaaaattcatcttatttcgtccgaaaagaaaattatcctttgatatgttgcaaatcaagtgagagcagcgctaaaaaaaagaatggcagtaaaagtactaaaggtgtgatgataaaattattagtacatgactcaacctaacatacttcaaatcttcacgtgtaaaaaaaacacaaatgggtacactttgaatttgaatttagtaaggttagaaatttataataaagtgagtatagtttaaatggttagattccttgtgatcaagctagcttacccaaattcgagccatatactaaacatgaatgcttgtatttacggttaaatattttcattaataggtgatatacctgtcaacatcgaggcatttgtggtgacttcgtcaatatcaaaatatgccgtttaatctttcggatgtgcttctaggtgtaggatgctagtaagtctttatcaatctcaagatatactagtcagtctttcggatgtgctccgagcacccgcgtttgtaggtgaagtaaaaaaacaaattcatatcaagtgaagggtctattcgcaagtttgagagaaacgaattccgaattttcaagcggaccactctgcaaaagcagcacggggaaaattttcactcacgaaaaaattttcacccccaaaaaaacgttgcgaggcgcggccgcgcgggggctccccccttcttccccaattcagacctccattccccccattcccttctcccccttctgcacgactccacccacctccaatgccctccaaaccctagcccataacccctcccgcctcgctgccatgccagatctgagcaccgtctgcctccccctctcgccgcaacccccctccaccgccgccgccgccggcggggagctagcaggcgagcagcccgccgccgccgccgtcaccaccgccgcggcggcggtgtctgcgtcggcagaggcggaggcggcgggggaagcagaatccgcctccggtggcgacggcgcgcccgttctcccggtggaatgccgatggagcggccgagttcgcagcttcgcgggcgctggcgagggcgcgggcgcggccgctgtccccgcgtgccccgccccgcgccgcgggggcgggaaaaagccgtcctccgcgccgtcgccttcgtccacggtggcgaccgcgccggctcatccatcgggtcggccgttcgaggagtacgttaaggagtggaaggcgaagaaggcggcgctcggcgtgccggccggacgctgcgagctgcctttcctaaccggcacgcctaaggcggtgcgcgtttttcttttgctcgtaatgatatgctttgatgtagtaacagatgcttgagcttacttagaacttttgtttgaacaaactgaactgtctcttcgtgggcatgacgagtgaaattatgactttagaagtgatctagtggtttacaggggcaaaattgagtagataataatatataccatgtgggtgagaaaaaattgtaaccctgatgcttagactggtaatacatttttagataagtaatgcagcagtttgaaaacgtattagaacatttgaagttttgaatgtgttggttgtgtccttgtgttttgcagattttatttcctctagttctaaattcttagaaacattagaccacacgagctcggatttttgtatatttgaattttgaacaaccatgtattttaagcatttcctattatcacattagaatgatatgggtagattggtcataagacattcttctgtattattatttattataccctacaaagtccataaggacaatattttttgactgaagggagtagcactgcagtagcatgcagtatggaggtgaacacataaatttgacacttttgggtcctcccacactggtgtgcgtgcaatgtccattaaatgtcttgtcatcttgataacttcaaattccatacgattcgtgttctgtcaggtggtaatcagaaataatgtggataaaaagtagtagtgctaacactagatgtttgatggctgacacagaaatgctagaatgcatgaagtatttatccgtggggctatgcttgatgttgctaatatacttatgatgtgctgagacatgtgtttccgctacgcaaatttgtgtaatgttcaagcagaagcattttaaagtttaaaaaaccaaaaatttaataccgctgtaatgtttggtcactttggtgcaagaatcagtccttttttgggaggagtttcctcatgcattttgtttccctcattcggactgctaactgcactcaatgccaacagtaggactgagatatgtgtccgattctgaatgtttacgaaatgcctggttggagttctggaaacattgtatgagctgacacctaggtttctattattgcttgatgcttacatccttacttaataattatcaaacttttatgtgcgtctgccttgttaaaacagcagctcattaataaacaaatgtcaaattgattaatgaagggactgtttcctatgaaattctgtgtaaatcctgcagtaaaagcaggcttacatcaacatcagcactagtttttgttattgtttttttgtttgcttagcagctcatgccatgttcatctctgcacaggttgaatgtcgattatgttctaagattattcatcctggagaagaaataaagtgttcggttagtagatgtggagaattgttccacctgacttgtgcagcagaagataccacaaatttcattgctgaaagcttcaaatgccctcaacatgtaagctccgatcttatgaactggagtgtgctctagtatgtgctaagtctctcgtgcacataagggagcatgtaagattttactaaagaaccactctaaataaaaatccactgctgaaatttgtaggcttctctggccatcttatttaatttcataacatggatagttgttactttcatgcaatgtacagacagtacagctgtgcattatttattgttttgaggccaagggatgcagtatatactatcacacctacgggtaatacatactcccaccatcctaaaatatagctacttttagcattcaataattgtcccaaaatatagctacctttgtacctactctctcatctcaaccaatcacaaccatctctcatttaatgtcttcacctacttcctcatctcaaccaatcacaaccatccctcagtttattttacttttctgcttgatacccatgcccaactctagatgtcattatattttgggacggaaggagtatattaatactgagtcaaattctgtgtagttttaattgtataaatctatcacatgttcatggccagctgggcagtacaaatttatgcaatatgtgtgggggaaggaacatatatttaaaagtgaagacttaattatgatcttctaactttgagctggtcttgtttgtagaacattttttaaaatatcctattttagccctaaacattcaattttgctctattttgtccttttaatggagaaaacttcaatctaatgggtcccaagtcaccgaccatgcatcacatattcacatgtgttcacaccacatgccaaggcatggaaggctattttttcaactaagagcacaggagattttttttttctttttcaaatgaggttgtaatttaaggtgctggagaataccttccaaatgttcatgtcctaaaacaaatcagagctcactggtagctgcccaaacaaaagtaatttgtgaagttaaaagtagagtattggacatttatcaattgtccttctagaagcttccctagagtgttttgtctgtagccaaggagagttgctgcagtccatggtgctgttatgttataaacctcttttctctctctgtttttttttggtgttatgtttcacttcttgctcttggattaatagtgatagttttacttgaacttgcattaatttaattttatctccaatcagggctgtatggtctgtaagcaaaagatgtttttttggcgttgtggacggtgtacggttgcagcacatacaaaatgtgcaccatggccagtaattcatttaaaagatgaccaaggaagtgctatctgttggaggcatccctctgattggctccttcaaaatgaggtctatccttttacccttaagattgaccactttatgttgctagatgccccccaaaaaaaaatctagtacaatatgatatgttctcaagattcaagaaaaaaatgggtgtaagattaaaactaaattgttggaacatacttttttctccttgggtgatgttcattttcatttttttatctgtgcaacaaagctattttgttttactgtatgctgcattattttaatgtcgatgacaattactgctttggatggatatcaaattgtctttatatataattattttctcacttgtgctcagtgaatgtaagacatgttttccaagtttctttcttgtcgctttaacctctcttctgttttaactcatcttatcctgcttatataatattgtttgatcttgctagaagttatttacagtattagttctttttctagaagtgttaatgcttttttataagtgaaaagtcttaatcttctttttttctccatcttatcataacattgctggtattcgctgggttcctaggctaagcaagctagtgcaatcacacatgaatgcatcaaagtccttttggtgcagctgtgacactgaactatcacgatccttattcatctttcactgattcgtttccggaattgttttgacttcatcttctctataatttttgtactcctttcaactacatgaaatgattgtgacactatggttccgttcttattagtaaggttcatgtgtagcatcattttttctattacttgcttttaaccagaggttaacaaacttgtttcatggtttcaagcccaatgctgatgtctccattacattcaaaattttatcctaatttggattgtgggaaattaataaaaccataaaaggttgctgtttaagctaattcttttgaagaatacttcaaatagtcatttcatatgccttcttgtaatatttgtaatgtttgaagtgtctgacaggactactttgtttaatggtggcagaatgctgacttgacgaacagcatagaggttagtgttttgtatgatataactccattcttgctatattctcttctatatttgtttcaattgcttttagataaagccattgtgcacatttcatagctagtcaccttggaatacctggatggttcaattataggcttctgggcatgtttctcttgtttttttggaattctgctaaagtagtgctccccctatgtcacaagacaaatggtattttgggatgtgaatttttgcttcttttttttttacttcggctgatatttgtgcagctatatataggatgccacatatttttatgttcatttgtaattttagtacaatatactcctgctctgaaatgtttaatgttggttagttcatttgaatgaactaacgtcatacaaaaagaaacagagggagtattataaaaatttagttagcgaggctgtaatgtaacttggagacgaaaaagatgaaaacatcagttaatttatgccaggagggctatttgaaacttgcttttactatacacctaaagaacatcagcagtgcaattgaaattcacgaagattggcgaggagcatatttgttacactaatgctataaacccttgtaaaagtatttcagtgttatctcattcaaacaaaaaaacattttttttcttcagaagatgaagtgtgttgcctgtgaaatgtttcttcatggccacactgacatgtttgttctgtaggaagtattttgccgactacctgttccatatgttaatgaagacttcaagattgattcaaccatcagggatttcactgcagctgtctgcaaaccaccacactttacgtttatcagacgcagtatccttaagtaacagttatagaatgaagcctttagctattacattttctataatgaccttcgtctttgtctgcttttcatctctacatatcctatttgttttcttgatttttaaaagatgtatatttaatcaagaaaaaacgtcctgattctcgcgcggaagctgggtgcacaaactgcagtgctgattctacgtgcaaagatgactgcgaatgcaggtaaacagtcttactttgtcaatacatttcatacagaagttttcatgaaagctttagtttgattcgtgcacaaattcttcattgcgctctaaagatggcaccaatgtcctcttctaacaaaacagggtgcatgtctcagcatgtagctatgtcctctgttctttttacctgtatttttgtacattatgtatgctgggaatttaatgccaaatttatcaatatcattatcatataatgaactagtcttaaaatgttgaccatgcattcaaggactagtaagactggataccatttttccaatttgttttaatcaaatgtagcctgacatttgtttcttcaaaatatcattacgttacgtatgtgtgaaggttgccgttgttgttttcctatataaatctttatctgcttttgatagctgtactgctgtagctaatgctactgtagctgagggtgctttagcatcttttttgccactcatttcaaccactctcttctgccatccaaaaattgccactctctcgttaccactcttctgttgcctttttacatgtttctctgagttctaattttttcctgcactttatcaggggcctttacatgagttgttccaagaattgccactgctcagatatgtgtacgaacaagccattccgcaaggataaaaaaataaaagctgtcaaggtaattatgtcctgcaatttttttcttgatttcgttaaggacatcaattaccattacattcttccttacctgtgtaactctttcggcatacatataaagttgcatgctgtgatattatctgccgtaacttttcaaatttgtcaagttcctcatttgtcgaagagcctgtgcttttagctacaagttgtatcatcatggaacaactaacttactgattacattatttgaattttacctaaacttggaactgagcttcaaacgttgatgatatctaataacagaagtattgtgccaacgactcaaaagtattcaagtccacaaacctcctttgtattgttctttaatgtaaaatggcatatggctatgatagtgctgtttgaagttgtcatgccatcaaatgtagattactttcaccttctgttgacacctccgggcaccatcattcttcatttgttagggagaataagtctgtaactgcagcaactacttttctgtacagacaaaacgttgtggatggggtgctatttcattggagccattggaaaaaggtgattttataattgagtatgttggtgaaggtacaagttactctaccatttaaacttatattatacaaattagcatattctttagtaaactgtatgcatgtcattgtggagtcacattatgccattacagtacaatccaaatttcttgacatgaatatttcctgaagataaatttgaagcaacttattggtagttagcatgaaaaagcctgtttagtcattgcatctgtttaacagaaaaggtacctcagctttagatgaaaacttattatattaatctgaaaattggataacgagtgtacattttgttcccactctattttataacataacatagctacgaagcctacaattatgaacaatggcagttcttgttgccacttattcttgtgaccttagctctttgtggtttttattttattactccctctgtcctaatatgtagctatttctagcagtcaaagtgcatcctaaaatgtagctatttctctacctaccttttcatctcaacccatcataaccattctccatttaatttcttcacctacttcctctgctcaaccaatcgcaacctttccccatttaattcaacctacttctcaagaaatgcttccattttgggacagagtatgtctccttcactgttttttagttgagttttatggcgctgtgggatagcatcgtattatatctttctgggtttgattcaaaggctcttagctattctctctataactaattacaacaacttaatgctatgctcatctgttcttttcaaatgcttttctaatgtgttttaaacattattccagtcatcaatgatgcaacatgtgaacaaaggctttgggacatgaaacggcgaggtgataaaaatttctacatgtgtgaaatcagcaaagattttacaatagatgcaacatttaaaggaaacacatcacgttttctgaaccacagttgtgatcccaactgtaaattagaaaaatggtaatgccatctttttggaacagaaaagctctgtactcggtgtttgtgaacagtatgaaatgattaatgttcctgattgtctatgtggcttgtccaggcaagttgatggtgagacaagagttggtgttttcgcctctcgttccatccaagttggagaacacttaacttatgactacaggtatgtgcaaacaatagtttttcaaactatatttttaaggatcctaagtattcttactgaaaaaggtataatgaatacattcttttgatatggagatatagttcctgcatagagaaactgctttcctgcaatcagctatggttaaccatgatttgaaatatatgcatatctagtggagtatatgtacatatgtaaattctggtgtgtgaactagaacctttgtactattattgtgtggcatgtagcttttacatccacattatgggctctgtgaatgactcggcaagaaagagagaaaatttacctcgttttttgcacgcatgcttcccaaactaataaacggtgcttttttggtgcaaagaacatatatacgaaagttacttttaaaaccatattaatccattttcaagtttaaataattaatactcaattagttgtatgctaatggctcacctcgttttgagtatcttctccttatcttttctcctccactcaaacgttgttcacttgcttcccacttcctcttctagatggtgaatttccaaatcatgcttcggtagcagaaacaccacgatttttttctgttattttcttatgaaaccaattagcatttgtattagattaaaataccgttattatgtgggagcgttgaaacggtgactattctcccagcccacacgaagaaagatttttttttcttccaggagtcttgtgaataataatgattttctatgagcaacagtaacaatagttcacgttccttttcaggtttgtgcatttcggggagaaggttaaatgctattgcggggcacaaaattgtcaaggttacctgggcaaccaaataaagaatcctacgcagcgtgctctcgcaattgcagcattggagaacgagtggcttgaatctttgaagatacaacaggacacctctgcttcaagacacaaaccgatgacacatttgttaccttggaccaactgtatagaggtaccatttaacttgagaagcaaacggaaaatacaccggatatgctggggatgcaaaaggaggagatcagccgttgccgttacatctccaacaagcatacaagcgtcagttactgaagctgctgctgctgctgctgctgcatccctgcccgctttgccatgaagtggcaatagctgaagtcgcttctcatctgtataatataggatgacacatttctcacatgaaattgatttttgaacgacgattcttttgcattgctcctccccaccaccaccaaaactccctgttgtaatttgttacaatattcatttgattacatagtttgtttaatttacagttgttcgctgagaatactcgactatctcatgtaatcaatgttgtgctccaactctcgattgcctcagccctcaagttgaggcgagtacatgagggctattattgtcttagagaatcttatactattattttgacacattccttctggctagtgacaaaatatcagaaacacggagaaggcactggtacagaagagtatatcagatttcaacattcattcactcaacatttctagattgacactgaagcatttcttcgtggaaagtaactgcatttgaaatagatcaaatcaacaaagcaggggtacctgtctcagtccctgttgcagaaccacttgggtcactgataggtgcagaacagtgataggtgcagaacagaagtcatatttgccaattgccgtagtgttcgtacacagaatcaaatcagcgtacaaagtgctcaattcattgcctgatagcaacaaatgcagtctcaatcgactcgaatcagattcccatgcaaatccaatacgcaagatgttttgacggtccaatagacatgccaagaagtacctatcatccatcacacaagggaagaaaaacaagcatcttgacaaagaaataatgtgccgcctcccgcctcccaccatcaccagaatactaccacacaaccggaacaaacaaagggagtgacaatgccgacattattataaaatgacttgtattatattcccaacattaaagtttgatattcggatacattttgctcactgtggcagacaaagcagaccacctagagcccttttattcagaatatatgcaagataataaagaacattggtcatagcatatactagtactatatgaatagtctggctggctgcttcacaaagtaacagagtgatcgctactggagttttgagtattctttaatcttcagtgcgcttccctcatcagcagctcctcatcttcttaccctctgtgccatctatctcctcgacagcatcgtcttcccagtagagagcctccattttaccagctttctccgtgttttcatcagcaaagcaatgcagaacagatcgtggcgacccggtggcgatttcagcagtagcagtgaagctctggtaaatgagcaaacccccagaaggcagctcctgctcaaccatgttgctgcaagaataggccccgacatccagccccttggcccaggtccctgcatggttgcggccaccaaagatggtaaccgcaacagagaactccaacgggccaaagcatctcaacaccctcttgacaaggtcaccataggcaagggaagcagggttgaagcccatgacctcgtagctggcatagctgaagccatcctcaggagtcacatgaatggttgagaaagcagggccgtggatggcattcatggagtagccgcagggctcgaaatcgaagtcgcagacttccatctctgggatgatgtcagagatacctgagagcttggtcatttccttagcatatgttgtgtgtccatcagcagaagtcttgaagaagacagaagctttcttcttgtccagcccagtcatgcacatctcaagagtgaccacaggttgctccgggtgctgggtggcatagtagacatgccacttctgccctggctttgcaggatctccaatcacgtatgcgttgccaccagatttgagaccgccgaagtagcggttcaggactgcaacctcctcagagaagttcttgtgtggagagggctgtgcttcaggaaaaatgaatgtcccacgagagtacttcacagcttcaagtggcagagatagctcttcagcaagctcaagaatcctcggaatggcgagcaggagcttggtagtcccacaggtcttgatcacaatcttgtatgggtacacaaagaggctcgattcagaaaggacatacgagtcgaagacctcattggagagctcagacacaatggtgcacctcgccagatcaagaacagagtcaatctgagcacgtgacagtgcacgcaaccccctgccattggggtcagcaaagacaggcgcctcggagaaagtgatctcgaggcgtttctcatatccctcaaacccgatcgccgagaccggtggagagtcagcaactgacaggactgccattgtttcgaaggacgatgccagagatgaggaagaaaggaagcaggactgatgaccttcccggtcactgggaagcagctagccagagagatgtaagaaagcccaaaacgagaattcagaggagtaactaaactactaggtcaaggtagccaagggggctatcaagagggcttcctcgcgcactgcaagagatgaaaacaatttaacaccgtgagcaaccaatcaaccgccaattagagaaacaaactagtgttcagttgattcgatacatacgttggagtaagcagcagagcggaacttcttgatgccgccggcaggtcggaggtcctcaatgctgtagccgaggggagcttcgtacatcagggaggaacgactactgctagacttctttttgccacccttggactccattagtgcatcaatttgttgactgcagagaagaattaaaaggatcgatgagaatctgcaagactaggcaatgcaacagattgtctgatcgtcaaagtttcaattactaaagagatacattcatgtttcatcaaccgtatgaactggagggaaatttcagtaattcgttctgactatgactattatttgcaaaagcataagaaatttcagactcaaatagcagattgtcttgtcatcaaaatcttcgttgcttttgagacacattcatatttatcaaccatatgaactacacaaaaaaatcaccaattcttttggactattatttgcataagcataagaaaattcagactcgaatcatataaccaaagtcttaattcctttacattcatgtttcatcagacatatgaactggagcgggacaattatttgcatataacataaaaattcagactcaattgaagaatatttcaatcagccacctgtggctaacagaagagatgagatcgaaaatttcgactaagttttgacatacgaatctattacgatatagataacttatcatacatcgagcacaaggggatctactcagcaaaaaatcataaacagaataacacgatatagatcagaaaagaaaaatatgaattcagaattaccattcacaagactgagtgattaaagattatattttgacgccaacaaaggaaaatacttctcctaccattcgtaccgaaaataactacttttcatagatcatctaacatactagatcaaacaaacaaacgaagtactagacagaacatcaagaacaggtcgcgcgagatcttgcaattccttaaacaaaggaaaatacctttcctaccatccgtaccgaaaacaacaactagtcttcacagatcatcaagactatagatcaaacataaaacaaacgaagtaactaggcagaagaacaccaagaagaacaaacaggtcgcgcgagatcttacaatttcctcggaaataaagttacgattccccgctcctcctcgtcgcagatcgatctcgaaccttcagggagaagaaaaagatctccccctccggaaaatcggcagcgctcctctccctctctctcctctcggtttctctcgaccacgagacggggaagagaaacaaagtgtatgggaataccaaaacgaaaccaaccaaaagatgaggctgagaaggggaggccttcccttcgccgtgtatttatagtggggtggtggtggaggccgcgggggaggaggtctcgcgtgcaaaggcgtggttcactggacccgcgccgccatgtggggcccacctcgcgtgccgattccaccgccgtgggggcagggggaacccggggtgggctgtggaccgcgtgcacggagttttcctttttttttttcttcttttcttctcttgccttccaggctggctgggctggcgggctgattctggacggctccctctctcggtgggtatgacaggtggggcccgcacgaggtgctgggcgggacgcgtggacaggggcgcgtggaaacgctcgcgacctcgcgttcgctggatgcgtcgacgagtcgtgggggaaaagaattgatgcttttttttttctttttttgcgcggctatttcggaggagtccgtagtataaaacgtgttgctggatgacgtgcttatcttttttttagagagagagagagggagagagaattttttttttgttagagctatatgacgtgcttatcttcatccatatcttttttatggtgctgctgcgtcatttgaaaaaaaaaatatgcgtttgctttctttttatttaatttatatcgatttgagtcatcgaataaaaagacgaaaaagcaagtttcctggaacgacccagctttcggccggtctcgaaacttgcgttgcacggatcatgccgtcagtaagtaacggaggcattaggtaacatcggcttgacatcgtgaacacgctttctaaactgttaaatgtgctgctgcgtcatttgaaaaaaaaaatcatgcgtttgctttctttttatttaatttatatcgatttgagccatcgaagaaaaagacgaaaaagcaagtttcctagaacgacccagctttcggccggtctcgaaacttgcgttgcacggatcatgccgtcagtaagtaacggaggcgttaggtaacatcggcttgacatcgtgaacacgctttctaaactgttaaatggaatcatttctatccaaattttctataataaagtggctttacaaaatcatattaacttatttgaattttctattttttattaatatttaattaatcatgtgctaattagtcatcagttcgaaactatggtttgaaaccgcacgcgacctaacaaggaataagttcattttgagcttctttggcacagctccagctcatgcgcatctctcctaaaactcagttaaacagtttcagctccacctaaaatggtagtgtaactggggtggagctgggtggagcgctatcacaaaatgaactagagaggtggaggtgggtttaggctgctccacaactccacagcaaacttaactccttaagctaaatttaggaattggagttttgccaaacaggccctttaggtcccttatgttgacattgtaaacagcaataccaaaagttttgaacccccccccccaccaacttgtaaaatcggttaaattaggccctccgacggtatagatggctggtttcgctgatatgacaaattgatccgatccacttgtgctgactaggcgtttgcatgggaaaaaaaaacaaaaatgatcccacatatcatgctcactcttctctcatcctctcccccgcccccaattttctccccatctactgcaagcaagcaagttttaagcagtttacaggttttgttatagcttgtaggcttcaccaacaccgcacacgacgagtgtcatggtcagtttggtcccgaggacgacacgcacgatcaaggggatgccgacgcatgccgcagtggcagcgcaagcggtcaaacccagacacgtcacgagggtggggggagaaggtggaggtggatgcgttgtgatcggcgaaaaggggatggagcacgacggtagactgcgaggtggcatggccgaggatgacgaggacgcatccgttctcacgggaataggaggagtgcatcatggcacgacacggaagtcgtaggcaatttggttctagagtatggcggcctgccatgctttgcgtggtagtgggctcgcgttgttcctgccatggactccctcatcgcgagcagatagaaagaagagtttgtgtgtcgttattgaggcggcgatcgcgataccagcatccaggctcgattggcttggcggcgtgatccttctagctgccgtttgccagagatggagagaaaaaggcgagagaggagggggaagagtgagaatgacatgtggggctcatttttcctcatgtaagcgtttagttagcacaagtgggtcgggtcaacccacctgaaagtgcatctaggacccctcatttattttggtgttaatgacaacacaattagagggtaactaatgctttttgttgagatgtatgcaaggatgaaaaaggagtggatgtcaacacaataagtattgcggcatcttttgtggtaattgtcttctaatccatgtatatcttgtgttcttgagtattaggatgtcgtactattaagagggatgccacatgcatataattggtagaacactagtgctcaaaatcatttatttgaagtattcctgttttatgtctgtcggactatccgatgttgatcagactatccgatgctcagactatccgaaatttcacagaactttgctcactgtcttgggtctaagtgttggctaaaaaatatcggactatccgatataaggtcggactatccaatacgtcggactatctgaaatttctcagaacttcactctctgttttgaattgctttttattccttttgagtgagttttaaatcagactatccgatgtgatcggagtatccgatgatccagagactccgaaattcaatggaacttgagtctctgtgagaggatgaaattcttggttcaaaaataacggaatatccgatatgacatcggactatccgatcgatcggattgtccaaaattctccagaatttcgttctctgtctctggcctgcttggggggtcaaaaacatcggactatccgatgtcacttcggactttccaaggtgggatgaaaagattctctcccaacggccacattttgagggcttctataaataccccccacctaacccttttctagggttacccaactcatttcattctcattcactttgggttgagcttggtgctaaggtgctttggatctttgagctctttctccctctctcaaatccctcattgttctttgtgtggtggatcttggtggttgtggatttggggtttgagggcctagtgtgtgtttcactcgatcttgagcactagggttgaccaagagttgtgtggtgtttgttactcttggatgttgaggactcctagacggctaggtgtcactcccgagccaccgatctacgtgtggttggccgggagaagtttgtgaaggccggatctcgcctccacaaggaaagagataccccttagtggaaggaggagtgcttagtgcaacctcttgaggaaagggttagcaaagacccggctcttagtgagctcctcaacggagagtagaatcccctcaaggatttgaactccgggaacaactcggtgaatttcattgttggtgatatctcttctcccattatttagctttgcttttgtgccgctatagatctagtcgctgtttgcgccatactcttgtttgtgcactagatcttcttgtagtgttcttttagtggatcagacagtctgatccaacatcagactatctgatattttcggatagtctgactgttgatcagactttccgaccctaactcagttttagtttccgcataaagttttaaattatcctattcaccccccctctagacctaattgaccctttcaattggtatcagagcataatctcctaattaggcttaaccgcttggaagcataagatgaagatgcatttgaagtctattaacccatctatttggagaatagtcgaaaaaggttatgttttgcagaatcccgaagatcccaccaaggaggacgacgagaatgagcacaagaacgctcaagccgccaatgcaatacttagtgccttgagtggaagtgagttcaaccgtgtggatggcattgagagtgccaaagtgatttgggacacgcttcagaacttgcatgaaagcacggatagtgttcgtgagtccaaggtttagatcctcaaggggcaatttgagagatttgtgatgttggatggtgagagcccaagtgacatgtatgaccggttgagcaagattgtcaatgagatcaagggacttggctccaaggacatgaccgatgaggttgtggtcaagaagatggtttgagcaatcactccaaggaactctaccttggttaccatcatttgtgagcgtccggactacaagactctcacacctcatgatttgcttggacacattcttgcccatgacatgcttgtgcaagactccaaggaggtcatccaatacatcaaccaaagctcaacgacaagcatcaagaagtaagacttggcattgaaggcaaaggaagaagaagaagatagccacaagagcaagagcaaggaggagatcgatgatgaagaaatggctctcttcgtcaagaagtttggcaagttcatgaggcgaagcggcttcttcaagggaaattcttccaagcatcactccaacaagtcaagtggaagacattctgcaagagtgtgctacgtgtgcaaagagcccgggcacttcattgcggattgccctcacctcaaggatggttcccacatcaaggaagataagaagaagggtgagaagaaggatgagaagaaggagaagtataagcatagcaagcgggaacattatggccaagctcaccttgggatgattttcggctccgactccgagtcaagctcaagttatgaagaaggagtcgccacattcgccgtcaagccttcatcaccgccaagactcttcgactactcaagtgatgaggatgctcccatttgcctcatggcaaaggagcctaaggtaccttctcctcccaaatcatttaatgttgatcttgttagtgatgaggaggatgaggttgaggatgaggttatggatgacaaattgttcaagtccataactaaggaatctctaccacacttgagtgagttgcttgggagaattgaggaccaatatgcaactcttgagaggcaagaggctttgctcattcatgagaaagagcgatctcatgaactcaagagtgagcttgctaaggagagagagaaaaatgaggctttggcacggctttacaagcaaaccaaagagtctcatgctaatcttgaggtggcgaacgctcaacttcaagagagagtggatggcttggacaaagcatacctctctcttgaagagaagttcgaaaccttaaagaatagtgtctctctccctagcgaaccgtcttgttccaaaattgttccaagcaatgaatcatgtgtgagatgcaaagatattgatattgaagcttgtgctactaactctatttctttgagtgctttgcaaaagcaaaatgagaagcttatgggacttcttcacaatggcctacttaagtgccatatggatagtaaggccctaaaggagtacctaggctatcaaagggacaacttcaaccatgagggtcttgggtatgttcctccaccaaaaggaaaggtggacaagagtatgatgataaagaggccccaaggttttagcaattttgttaaggcaaaaagtatccttcctaatgattctgcttcacattgttcttttgatgcatcttatgttcttaggaagaatgctagtggtcgtgttgttgctaagtatgtaggaccaagggacaaaaatttttccatcaagagagttctttgggtgcctaaggcacttgtcactaacatgagaggacccaaacaagtgtgggtacctaaaactagaaattgatctcttgtaggaatatctctccggtggaagaagttgggtgatcgatagtggatgcacaaatcacatgaccggagaagaatcaatgttttgctcccttgatcctaatggctcttcgcaagagaacatagtcttcggggacgatggaaagggaaaagtaatgggattgggtaagattgcaatctccaatgacctttccatttctaacgtcctcttggtaaagagaatgtctcttactttcgtgttttcggtagtaagtgctacattcttaataagaaggctagatcctcaaagtttgctcctaaagttgatgaggggttcttgcttgggtatgtgtcaaatgaatgcgcataccgcgttttcaacaaaacctccggtattgttgagatcgcgcgtgatgtgacatttgacgaaactaacggctctcaagtagagcaagttgactcacatgtgttaggtgaagaggaggaccctagcgaagcaatcaaaagattggctcttggagacgtgcgtcctagggagccacaacaaggggtctcttcctcaacacaagtggagccacctacatcaacccaagccgacaatccctccacttcaagcttggatcaaggtgaagaaggcgagcaagtgccactctctccgataaatctagctcacccaaaaatccaccaaagtatccaacgagatcaccccaccgacaacatcttaggagacatcaacaagggagtatccactctttgcaaatttttgtgagcattactcgtttgtatcttctattgaacctctaagggtggaagaagctcttaatgatccggattgggtgatggcgatgcaagaggagttgaacaatttcacccggaatgaagtgtggactttggtggagcgacctcggcaaaatgtgattagcacaaagtggatcttccgcaataagcaagacgaggccggggtcgtgataaggaacaaggcgaggttagtggcgcaagggttcacccaaatcgaaggattagatttcagtgaaacatttgcgccgatagctagacttgagtcaattcgcatattgcttgcttttgctactaacctcaattttaagctatatcaaatggatgtcaaaagcgccttcctcaacgggcctatcaacgagttggtatacgtggagcaaccaccgggcttcgaggatccaaaatatcccaaccacgtatacaagcttcacaaggcactctacgggcttaagcaagcccctagagcttggtatgagtgtctttgcaatttttttgtgaaaaatggctttgagatcgggaaagccgattcaactctttttactaaaaggcatgataatgatatttttgtgtaccaaatatatgtcgatgacatcatatttggttctactaacaagtcttttagtgaagagtttagtaggatgatgaccaaacgttttgagatgtccatgatgggtgaattaaagttcttcctcggccttcaaatcaagcaactaaaggaaggaaccttcatttgccaaacaaagtatttgaaggacatgctcaagaaatttggaatggagaatgcgaagcaatccacactcccatgccatcaaatggccacctcgacctcaacgagcaaggtaaagacgtcgaccaaaaggtataccgttccatcattggctcacttctttacctttgtgcatctaggcccaatattatgcttagtgtgtgcatatgtgcaagatttcaagccgctccgaaggagtgtcaccttgtggccgtgaagagaattcttagatatttagtgcacacacctaatcttggtctttggtatcctaagggagcgaggtttgatctcattggttatgccgatgcggattatgccgggtgcaaagtggataggaaaagcacatcgggttcttgcaaattcttgggtaggtcccttgtttcttggtcttccaagaagcaaaactccgtcgccctatccaccgccgaagcggaatacgtttcggcggggagttgttgtgctcaacttctttggatgaagcaaaccttgagagactatggcctaaatgtgtccaaaatcccactcttgtgtgacaatgagagcgccattaagttagccaataaccccgtccaacattcccgaaccaaacatatagatattcgccaccatttcttgagagaccattccacaagaggcgacatagatatccaacatgtgagaaccgacaaacaattggcggatatcttcaccaagtctctagatgaagctaggttttgtgagttgagaagtgagctaaacatcttggattctcggaatgtggcttgatcttttgcatgcatttgtttttcatttactagaataggtttgcttgctacatcatgacaaagtgaacattcaattcatgaataaacactagtcataatctatgtggataacttgaatctatgtgtacggggatctcattctctaatgaatcttggtccttgcacaatttgctatagattcgtacattccctctctcgagggtgcctagtttttctttcttttgctgcatttgtccaagtaatagtctagccatcgagttcatcctatcaaaatgttgttgaaaaattcttccttgagccatcctttattgtctctgccacaaaggatgtcggactgtctgacatcaagtcagactatccgaccataatcggacagtccgatttcaaatcggactattcgacgtggggccaagggcaaggggacttaacctccctaggggtaactctttcttaccccttcagtcatttgtctcagtcgtttctctctccacccctcttctccactccaaaccctagttctaggccaccaaaaatcttcgtttcggagtctccgattgctattccttcgctttagggtggtttccctccctcaactccttccaaatcactggttccccagtgattctcttggtggttcttgaggtatttccttgtttttcctcgatctccctcatgatgtattatttcaagatttccttcggcgaatcttcttgttttagtgtctagatctagtacctacaagatcctttgattctattggatattcttgtgtgaatcgagatttgttggtctagggcaaaaggtcgtcggattgtctgatatgccgtcggatagtccgatgtacatcggatagtccgacgtcaaatcagactatccgaccttcttttggcccagtccaaatttctccttgcttcacatttaagtattcttcttccacttcttcttaatctttatcctctgttctaaatcagtgtatcctcatgatcaggggtcagttcaagaatcaactttactctcgccgtgggtcaatgagttctcaaggtcgctctccctcttccaaggctcgtcatgctatacggcgtatgtccgaatcccgcaaagatgccattgacgcgcaagctcaagcctctgaccaagcagctcaagtggctaatgtggagtgtggtgctcctcttcctcttcgccgcagccgagtcagtggagaaggatcaagtgcacctgctagcaaagtaaggagaggcaatcctacggattcttctgagccgggtcacggtagtggttctcatgcaccatcctttgaggaagagattcagttagaagaggacattgccgctcagcaagctgctcaggaagaagggcctttctttatcactgctccctctagagatcctaattatcatcgaagagtcgtaaggtggaaccgcaagtggactgaagtggagaaagagtgtaagaaagatccctacaaatttcaacagttgtccactgatcctcggttttggaacctttttcagcaggattactatgagatagtgattgcacctaagaagggggctattcttatgcagtgggttgattggaagtatatggaggagttgcatgatccaattattgatgaagtcattgaagcttgtgctcggcaaaacttgaaggaactcatgggcttgcaatacccatggtgcaaggaaatcatcgcacaattctatgccacagtttactttgagcccaacaaagaaaagactattcattggatgatagatggcatcatatactcagtgtcatatgccaagtttgctgccattttggggtttccggctccaatcgtgtcaagattcatgatgagaagcccatggacacaaattctcttcacttcttgtaccaagatgtggactatgagttaggcaccatcaaaggtctccttcccttctatgcctatctcaataagctcttgcgcaaaactcttaatcccaaggaaggtgatgctagcaacgtccttgcctatacaagaaatttgctttacaagatgaaggctcacccacagctctttgacgcctttgacttcatctttgaagaaatccggcttatctctatgatgcctaagcgaggacttagctatgggccttacattacgaagatgattgagattgtgtccaagaagaagtttcacaaggaggtggcacataccggttaccaagtccgtcccatcaaggctgctgttgtgccggctggacgaaccactcgtgcttcttctcgtgccggtcactccgctaccgtcaccaagccggactccaactcgtccttgaggttcttcaagtccatcttcaacttatgcaagaccatctcagttcggcaagccaaggaacgcagagcaaggaagaaggacactcgacggctcaagaacctccttcgcaacgcccatttgccgtgttctcccgatggttctgaggttgaggacagtggggaggatgtgattgaggacccttttgcagctgaggcaagctcctctcatgcggatcgtggcaaggctcctatggaggaagaagaagaggagaaggaaggtaatctatctcctttcgtgatggctagtcgaatcttgggcttttgtgtcttgttatgtgcaattatctattatccatgctcaaatgtgtgaaatatcttgtcattggcatatgcatgaggttatattgtcatttctaatctagtgcatagattgagggggagctctcctatttcatttctagcatatctttagggggagctccaccaaaatcctaatcttttattacttctaagtgtgttgtcatcaatcaccaaaaaggggagattgaaagtgcatctaggacccctcatttattttggtgttaatgacaacacaattagagggtaactaatgctttttgttgagatgtatgcaaggatgaaaaaggagtggatgtcaacacaataagtattgcggcatcttttgtggtaattgtcttctaatccatgtatatcttgtgttcttgagtattaggatgtcatactattaagagggatgccacatgcatataattggtagaacactagtgctcaaaatcatttatttgaagtgttcctgttttatgtctgtcggactatccgatgctcagactatccgaaatttcacagaactttgctcactgtcttgggtctgagtgttggctaaaaaatatcggactatccgatataaggtcggactatccgatacgtcggactatctgaaatttctcaaaacttcactctctgttttgaattgctttttattccttttgagtgagttttaaatcagactatccgatgtgatcggagtatccgatgatccagagactccgaaattcaatggaacttgagtctctgtgagaggatg

SEQ ID NO: 7158 - DNA, 52300 bp, Oryza sativa
  unsure (1)..(52300): unsure at all n locations
ggcgccgtgcgcccgcgcgtcgcaccgggcgcacaggaacgccccgtccgcgcggcagtagagccgcgccgcctccccgccgcacgagtcgcacgcccgcgtccccaacccccacgacgacgaggagtaccccgccgccaccgctcctcccactcccaccatcgccttgtcctccaccgcctccatttcttcttcgcttcgctttgccgctcggcgcgtggtgcgtttcactcgctcgcagctcggtttctcgcggagtttggctgtgttttttgggcgttgggcacgggggattcgactattcgcggggggttttgagggggtccgtggcacgtggagggactcccggccacgagacgcgcgcgcgagtgtggtccgaccgaccgtccgacccgcgcggtcactctccctccccccgtcggctcgcgtctcgcgcgtactctcgctcacattgcccggtgtttagccgagcagcggagagctgacggctccgcattggccgagccggcaaatcgccgtcgcagcagcagagggtcgccatctcgcgctgcttgcaaaacggcactgccagtactactgcattttcagcgcttatccgagtatacctttacgctcttgcattcgttttgatcgcgatgtgtatgagacccatagtttaaccaacggtttttaggcggcacggaatcggatcaaatcacttgctacgcaacatggccaccatgaacccatctctctgcttttcctgctactactagcacagaagcacgcaaaaaagccaagaaagaaaaagactttgtacatcgcgatgggcacgagctctctaggactgtagtacatctagccagatgccgttcacacttgcacgtccttttcctctgcgggaagagaaggaaaaaaaaaagaaaggagagcggtggttgcgccaccattgtcgcgacgcgcgcgcctgcgacgcacggggacaacggggacagagggaggggcccacccgtccgactgtcaccgtcgcctctcgcgccaggtgtcgcgcgccggttggctggtgcgctcccggcttatcgctttgcggatgaggtgatgccatgtcagcggccacggccaagccgaggccaccgtgggtggggggagtggggacgcggcaaatctcgtgcgagatctggatccttcacgtagggcttggtgcgtgctggacgctggacacttgcggcggcagcactgagctgggctgctgcctgctgctggtggccagttggcaccgcacaccaaggctagtggacatgtgtttgcgtctcccttccattctaaaataaacagactagtataaaatatgatatatttaggtgctaaaataaataagcttagtatgaaatatgatgtattcaagggctatgaatctagagagacatgctacattactagactcgtttattttaaaatagaaggagtactagacatgttaggcatgtttggattgaggttgatttttgtcctaccaattttttttggcaacttcaatagtaacgggctgttttggtttgaggcctaaattagccataccaatatttggtaatttaaatagtgtttagtgtctatttggtttaaagccaaattggcatgagtaagaaaataagccatttcaatagtgaacttaggctattttggctttaatccaaacacaactttgccttaccaaaattagtcatgccaaaacttaacaaaatttggcattgacaaaatttgataaggtctatttaggccacaaaccaaaccaacccaacatatagatgtttggtttgctaccaatttatatccacgctgctaaaagtactatactatcaatttgttagtgtcaaaaattaccaagattttagcgctaccaaaatattgattgggcaaaattggtaacaatccaaacaaacccgtctgcaacttgcgtagagtgtatatggagtactgttatacttgtgcaacttgtaattagactttggtgtgcgtattggaatatagggtcgctacttgtttggggtctatacgaattggtgagttcagcatttccggcacttgaagtgactatgatctaatccactgcaaccaagtcctcggtaggatttggtcgtcaatggcatcttgtgtgagaggttgagcttttgaagcaacccagtgtgtgtgaggaggaagcctagccacttaaaaggcataaacaacaaaatacatgtcaataatgaaatactggggaaaagagagttttttcccctcatattattcaatggctacaaaactcgtaatctcgccctgtacattgtaaattgttaatatatttgttataggagtcttcctacagtatttttccctaaaaattactgggaaatctaccaaacgagcctcaatgacaaatacggcaagtattattgaagtttaacacttttattaggattaaaataaacattttgtgaggctcatggattttatttaagtgtcagtttcttaagcatgcacccaggggcacacacttggtggtgtccgcatgtgtcttttccgtataatcgaaaaggtcatattaatgaagtttggctcttttatatgggctgttagacaattggctacattttattgttctataatagactatcttattcaacattcttaagaaatatcctaaagggaatgtttacatgaaggccacaaattgccacacccaaatgttaggcgtgtcatagtttactgggttagttagttactacttatatttggttggttgttgttgcgatcgtggagagtcacactttgttaattcacacattcggatcacatgtgtactcaatttctaggcaaacattgttaaacctgtactacagttaataaggtgtctacctcactttgtatggcatcatcttacttctggcaaagttaggcgtcagcctaattggcttggagtagccttgcatgcatctcaacagtcaagagtctgcttctcaactgttagatttaattgggtaattgatccatttaaatcaattaaatcaaataaattccaagcctcattatgctaggaattcatgtgtattcattctcttatgggatatcaatgggatgaggagttttgagaattaatccatttgattagggaattggtaacttatatcaattactcctatttgatggatggttgatggttgtatagtggaggatggttcatggctagttgatgacaattaattgctctattcctcttcctattccattggtaacctacatcaattactcctaattgatggttggttgatggttgtgtagtggaggatggttcatggctaattgatgagaattagttactatattcctcttcctattccatgatttttactcttcatcttccattcctcatataaaatgagaatggatttgatctcctaaaagagaagagagacacactttcatccattttcaacgctgttgctgctacagtaatcccatcccgacgagtgtgtgcacacgcgttgggagagtaggcctccgaaaccacgcgttgctgcgacgtttgtacggacgggcgtgcgatcaggtttttgggagcgcaaggcgcgactactcactgttcgtcaacatctacttcaccttcaccaatatgtcaaacactggagacaacggcaacactggatacaaggagaaggaggctcccgtcaacaccaacggaggcaatactgcctcaaactccagcggatgaccattcttagggtataaccttcttacattatttcaattagaagttttactgttaatattcatcgcaatgtcaacattgtgttattatatgattgttgatggttattctacattaagcatgctcatgttgattacattcaccactatcaccaaatcaaatcccattgtaaatatcatgtttattatcttgttattttggattaaaatatgccgaattatgaccaaattttcaacatcaactgagctcacatatctatgatccccacgattgttgcagtctcaaaacacaaagattacatgtgcccatgaaacaccaaccgaggtctacctctattttagcaaactgattgatcacatgtacaagaagttggcaaaagggaatccaaagcatttcacagctgctggacgcttggcactcatttcttcaatttaataatttccatgcagaacctggggggcaaagcaaaaggtaaaaaacctgaacatttctccatgattatacgtgggattcttctcagcatcccaaaatcgaaaccaattttgtggtgcttggtacacacggtttgggacttctttgagccacaaggttgaggcttaattcagagctgcccacagtttctccgtttcggtttattcagcggccatcccaaaaaggaacggtttcagttcatcacacactactcgacagccgacagtcactctcggagaagaaaggccgtgaacatgttggatagtactacttcgactaattgaccatttgctgctgccatgagaggaggacaaatcaaacggacagagtgtgacaagtcactctaaagataacagaattctaagtactagctttgctactgtatttgggcaacatggaaagggatattccacatcgttttcggcctcgagagggaaatgcggccgtttccggtagaaaatccggataagattacaccgcagcttgcagatcgcaacgggagagagaggagaggagaagaggagagaacccctgcacgcaagtgcggaggaggacgaggagaatggcgtctctatcggatcgccgacgccgacgcgtcgacgttggacagccaagtgagaaagtttaagatcttaaaaagcagttggttggtttacgagaatttaaaaaaactggaagaattaacttctggattttaacttattttgtgtattttgtaattacaacttttcaaaaaattagatgaagaactagactgtttgagagagtttgattctcaaagaagctacggctacgactgcctgtaactcccaaaacaagtcctcatctcgacctgaagccatggaccgcgaggctgagcctagtatggagattgggtccggcccaacttagaaaggttagcccaatcggtgattgggcctcgtataatgtagcggaggatagtgtttgggcctttgggcggggcccagcagatgctcctcgaaaggttcggccactctccgtccgtcttcctcgtcggcacgctgcacagtacgcgcgctgctcctaaacccaaaccctaaagccgccgattcctctcctctcctctccacaccagctcgatcgcgatcggggtcatggccgccgccaccgcggcgccgtcgatcgacgaggccaaggcgaagagcgttctccgccaggtgtccgatcccgccttcttgttgtttgttcacggcggatttctcccccttttggcgattttgtttgagcatttatttttgggggggaggtttgagcttttgatttggtttggttgtcgcaggtggagttctacttcagcgacagcaacctcccgcgcgataagttcctgagggagacggtcgagcagcgcgaagatggatgtaaatgatctctcgcgcagtacattttccacgcggattgcttttctccggcgcgatgattgagtgctgaacttagcgtcttttttttttcttctcattttgttggaaatgtgcagtggtaagcttggctttgatatgctctttcgcgcggatgaagtcgcacctcgggctggacgccgccgtgaagcccgaaactgtgccagaggagacagtgctcgcagtagcagaggtgctacgtcgttcccagatgcttcgtatctcggaggatggtgattcctctctttcctcttaattccagttattcgtgattcactagcaacgagcacaaattgctggcaattgaatttcaaaaggagttggtaaataccagtgaaacatgtgaagtgtacatttttagataacgatgtaaagtgtacatatactctgctttgtgacctgctattcaatgttgtcaataaacttttgttttccttctttagtaatgataaatatgccatgttctcaaatacagtgttagtttgggaactagagctggtctacttttatgtgagttaagtttctctagtaaattggtttcttttttatcattgctgatttgctgtatttttcaaatgcaggaaaaatggttggtcgagctagtgagctgttgaaggcagatgaaatcatcaagcaagtggactcaaggacagttgctgcgtcaccattgccttacaatgtaaagctggaagatgtccaatctttctttgcgcaatatgcaaaggtgtgtccaagtactgaacacttatagtgcacaacaagcttgcagttagtttgaaatgaaattgaaatgtaatgcaaagagaaaaggtggcatggctaggctgcataaattcgattcaaagttcaacagaacaaaggaagttttttttctcgtgaacctttttcataattaggattttgagtatcatgaacataattaccagttatgcatgctggctatctggagcttttccagtgttatgattacatgtgcaatactatactgcaaatatcaatgaattaacattttcttggtgtacttgtgtctgaattgtaggtaaatagtgtcaggctaccacgccatatctcaaacaaaaaacacttctgtggcactgccttagttgaattttcagaagaggatgaagcgaaaattgttttggagaataatttgttctttgcaggggcaaatctggaaataaaactaaagtaagccactaacatatcctttttgcatgataatcatacatgtggaatgtgcagataaaatgcttgctttagtactatcaccataaatttctatgttaattccaatatattcccctctagctgtactgccataccggtaagttgttagttatcaaacctcatttcattgccaacattgctttcttttctattaagtgcaatttgaatgaaatgtgcgaaataagctgcattaattttgtacttcttttgtttagtttggtgtcagatcatgcaagcatttccctctagcaagttccttgtcttgcatgtttacctcttttagtgatacttgaattaatgatgcctttcacatatttgcgttcattctgttgctgtatgtgacattatgtaacttataattcgttgcctgaatcatgaaggaaggaatttgatgctgaaacagaatctaaaaaagaagcatatgaaaaggcacatcctaagaaggacgagcagaatgaagggtgacatttttacaggctgtctgttcaattacttttccttcctttagagttcaaatcaagaccattttcctggaatttgtgttgcagctatcctaaaggcctaattgtggccttcaaattgaagagaatcacggttgatggtggggtgcaacaaaactgtgcagacaatgatactgccactgaagaagaaactccaaagtccatgaagaaaacatcaactggggaatctgaagagaggactaccgtgaacagtgatatggaggaacagaagtcatcagacgacatgactgaagcgaaagaagtgaatgctggggaagctacagaatctggtgacaagtgcacagttgatgccttgctagaaagtgaaaagaagggtgataatgaaacatcgatcaaagatgacagaggcctctctggcaaagcgaatagtccaatctcaagggaagatctaaaagaagcgttcaaaaaatttggaacagttcgggtattttaatccacaccactttctagctttagtttttcttggtataaacaccagtaacagttctgtttaacattatggaatgaaaattatgaaacatatagcattcttctagattcaaatatggtccacagagagctcagattttaactcatgggtcatatggcattatctttgtactttcatttgtccttaaagatctggtgggatattaagcatgacgagttgtaaaattattaagatcaattaactatggaatgggaaatgcctgaaaatgttcttgatacacaccataaaatcgtggtaatagactaatagctagtcctaattgtaaattcatatttgtaaaagtttatttatggtccttggaggagcacagttatgaggtagtggtatgacataatgttaattatctatatctttggtacctggcatggctgtggtggtgaactgttcatattgtatgtcactatgtcacaaattcacatgacactttttaattccgttttttactttcattgcacatgtttttcttcctgaagtatgtggacttcagtatcggggatgaatcgggataccttcgtttcgaggattctaaggcagctgaaaaagcccgcatgtctgctgtattagctgatgaaggtggcttgatagttaaagaccacattgttaccttggagcctgtgactggtaattgacaatttgacatgtgtttattagagtttttttaataccattactgcttgcattgtatcatgattaataaatgtagaatatccattatagaaaatttttagttccatttaatgatacttaggtggaatcgactcctattattgtttgacgctgtaaattaattcctcaaatctggatgcaattaaattggtttgtggggtcttactttttttgtttttgcaggtgaagctgagaaggattattggaatacaatacgtggcattcaagggaaatacaaggacaataggagttacaaaggaaggtattcaatgaattaacagtttaattttatttgtttatgtcctgtttggtactacgtacaatattatctctagaagtaattgcagacaattatcaggaaaggcacactacagcattcagtaattttgtggcaaattagaccgaaataactttgtgtgccttttgagaatgttatgactttttcatttgcaattttcgagctagatgacctgcgctaattgcaatttatttgtgcattgcagtattgtggttaccacaaatatgctccttaattccttgtatatatatgtcgaatagatacttccttgcacgaaaattgatcatctcgtatgcccatgtttaatgttctctgcagaatataatgtgtctttgccccttgtcatatatatgttattgctctttttctaggactggaaagagctacagaggaggaaagcagttcaatgggaagcgaggccgacattctgattcctccgaaaagggtgcgaataaaacacagaaggtcgaagctgctgcttaggctaattttaacgtcttcactcgaccgagaagtaacatgctacgcttactatcggtggtcttgtatatttattatatcagagaccatttattaccatattttgtgactgttattgtccattttttatgctaaccttgttccaaggtatacttccgtaatgattagcctttagtaacggctttgccgtttacttttgaatggctttggaggatataaccttgtatagctccaaacatgcaaacccggagctgtttcctgcagcggagcagagcagctgtcctgacaatcttcagatatcttcaccgtcctggattgattacaaaacgattatttcatcattctaattacacaaaaaaaaggtttagaaatatggctgatttcaccgttctgggatttatactttggggcctcagctcatgatcacgagcattttcgtgtaaggtttgcttttaggcttttagcttccagagaagatgnnnnnnnnnnnnnnnnnnnnaccttcaaaaaaaaattgtagtagtactctggatacataatgatctcttaaggaataataccttggaaattattgttgctaaggtccaactgcccaagcagtggaaggtctccaaagctggatggtgtgtagccaccaagattattgtggctaaggtccacataagtgaggtttcgaagcttttccatactgaatggtatactgccatggggatatattgttgtaaccaatgttcaagtcccgtaactgttgaagacttccgaaactagttggtatgtgaccttcaaagctgttctttgccagagataacagtgacaagtatgaaagatagccaatagaggatgtattggcccaacgaagttgttctgttggagatgcaggaattctagatagttagctttccaaattccaatccattcttcaattctaccagtaagattgtttctacttagctgcacatcagcgaggccccgaaagtttcctatactaggaggaactacgccggcgaggtggtttccgtccaaccatagttgttcaagactcaagagtgatataagttaccaatcgagcttggtatatccgcctctaggggtgtgtttggaaaatgggttaggagaggtgggattgagaaatcaaaatgaatgaagggataggataaaatatggtgaaatgaatggatggctaagattgaaacttaccctttgaagggtgggaaatcatatcccaaacccatttttcaaacattgcctagctgatcatgatttaggcggagcattctcagattggtacaatttccgaatgcccgcccgaattttcaactttcatcgttacttgcttcaggattgttatccccaagatctagtttggatagatttgaaagcataccaaaatgactaggaacctggccgttgaaattgttaaagcatctccaacagcctctctattccactctccaagttaaattttagccattctagaaaaaaaacgtgctccaacaacctctctaaccgaatggctaagccatctggctggccaaaacctttcctccgctagccaaatttggccagccaaaagtgactagccaaccgtgggtcccacacattcctcctccccatctcctctctgcctcctccatcgcatcgtttgccgtcctccgcgctgtcgacagtcgcgcccgccgagcctcctgagccagacgacggtgccggcgtcgcgcctccgaggcacgacgacctgccgcagcagtacgccggcgatcccttgccgccaccgctgcagcagcagcagcagcagcaggaaggctccccctcgcagcacgacgactggcacttgcagcacgacagctgccccttgcagcatgacgacggcagctcaggcactgccagagcaacgccaggcagccgacgcacggcgtcgtgcaggaggagcacttggggcagcagccgccgcagctgctacagcacggcgtgcaggatgaacacgagcaccccgtgccgcagctgcagcccaaaattgaggtgaataaacagcccaaaatcttggaacaagtcaacgatctgcacgaaattcgccgttgttgcttgcctacctttccattctccattcgcaatttttgcagtgaccaacaattccaaatcgatcggaatctgatcatatccaccctagccaaccaaacgcaacaaaaatagcagagaatgagcgagatgccgccgcacaccgtgtacttgccgttcccggcacaggggcacatcacgccgatgatgaagccgccgccggctcctagtccatgcgcccctcacctcgaccagcaggggtgagagctgctgggttgatggggattggggaagaggaaacatgtagaggaagagaggggaatacgtgtgggacccactgtcaaattggagaagataaatagagatgctgttagagtaaaaaacaaatttaactctctaactttttggcaaactagctaaatgagcatttggagagtgagatttggccatgctgttggaaatgctcttagatgacaaatctatcttctttatcccgaactcccgatgcgttgcaaaaaggaaattttgatacccctttctatgttatgttaaaaataccaaaataatttaaaaaggatcaaaatacccattacaaaccaacggtttgatttgaatatactatactggtaccaccagtagtggaaagtaccgtaaaatcccccttaaagaaaggtcgagttcctcgagaaacatgaggttgccaaggaaggggctgattgtgccggacaggaacaggtactgtaggtccagctgatccacgactcgcccagggcgcttcttccggccgcatctaacgccagcccaccagcatacaggggtgcgtgcctcccacgatctgcacaccgtcgtggagcaatggacgctgccaactccgtaagacagcagcagcaaaaacgccacaagtgtagcctccttgctgtgatgcagatgcagacgatggttggccttggcacagcaggcaaggccggcctccatgaccatctgccagatgtaaagcacgaacattaacatatatttcatcgcggaaaacggaggaaaacacagtaggatcgatcgatcacctcgctgctgtttaatttggcgtttattccggcagcgaccagcggcagctagtgatcgagttggaagctcactcgcacgctcgtaggcttcgcagctgctgcaaagaggcgtagctcggtgtagccaccatcaggtatataggttctgtttggggagctttagattctaagaaacagctgtttggtagccagcttctgagaatctggaaaagctgtgaaatctagcttcttagttcatttctcagaatctgtaactacatattctcagaaactgtggactgtttggagcagcttccccaaaagagggccataaacagcttcatcgccgcactgtgacggtgtccacgtgcttcttcaccggcgacggcgaccgctgaccccagcttgacttgctgtcacgccttacagcattaggcgttggctatgacaatcttgctttaactacgaagccatcacgctttcagtggaacaagagacggccaacttgcaaattaacggactgaagaactgatgagccaccgaacctttccctccaacaagatacgaccaacttgcaaattaagaggcatttgaattactgtgtatctaggtttgccagatttcaaataaatttatccaatttgtaccacccaaattgctaccatcctcagatgataaagactgttaatatcatccgtgacagcacatgcagttgggcaatgtagatactgaatgactgtggaaaggtcgccgattgaatttgggagacccgcgtagcagattacttatagctagtgactgtatattatactctatctgtagaaagctacagttcgttaacggatcaaagaatctccaccttctgctttctttaatagaggttggcactctgtaggaaattgtacagaagggaacaaacttggccgctaatccaccattgctgtgaggacctttgacctccaaaacttcttttccaagaagatagtctaagagttgcaaggaccttgacgcccaagacttctttttcaaaaagatagtctaagagtaggatcaagatttaggttgtgttggccactgggaaccctttctcctcagcacgcaaaacagagcagcgaattaacacacaattaattaaatattagctaaaaacttgaaaaatagattaatatgaattttaaaacaactttcctatagattttttttaaaaaaacacacactgtttagcaatttgaaaacgcgcacgtgaaaaatgagaaagcagaaattgaaaagtgtagtatagaacgttgagtattagtacatgttggtgcggttaacaacgagcaagagccagaacaaggaatttatctatgttttaagagatttacaaaaataaactattgttttaaaagttttgcaaaaatatacttctcctgtcctatcaatctattatagggcagggtgtataaatcgccctacggtagagcaggctatgagcacgtcatatagtgggaggggcacgccatggcaattttatagccccacacgacagcgcgagaaagggtcacttgtaaaattaccacgacgcaccccatgcatcaccaaactattgctaatgtcacaaaactaaatcatcctacgggaggttgagaagggtccgcctacaaaattgccatagcacacccctcccaccttatggtacgtcacatagcccgcgtctacctaggacgatgtatatgccccaccctacgatagggctggaggtgtatatttttttacaaaactttaaaacggtaatttatttttaaaaatattttaattaatccggttaattttttcgtccgtcattaaaggatgggcccacgcgattttcgccggtaatgcgaatcgcgacgcgtgacggcgattttgacgctccacaaataaaaagagaaactgaaaaaaaagagagaaagctagcaagcagcccaactaaagcagcagcaggccggcccaacaaaaagcaaacgaagcctagcagtcagcccacatagcaaagcagcagcccagtacagtactgtgcgatactgtagcaaccgggaataagttcacttgaggtcccttaatttatcgccgaatatgaaatccatccctaaataaaaatgccaggtaacctcatcctttaacttacaataccttgtcaatttcgatccctcggcagtatcgtggccagttttaactaacatggcaagtgggccccacacgggtcacatgtcagtgcacaaataataccacattttgcctagcttgggcagcactagcttaaatagaaggcttgcctgaggctactacaccaaaaaaaaaggttggatccacgtctaccaagaatcatataaaaataacgagcaattttattaatttaaaaataaaaaatcacatgtattttttttaaaaaaacatgtgatcaccaacaaaatgaattatttatgacaaaataaattatttttagaaaatagaaaacaatcacatgtcttttttttaaaaaaatgtaatcaccaacagaatgaatcgtgtttacatccaatttttttctattcattgtatgatttccgtctaattttttgagtgaaaacgattatgcgattggagtgcaatgaggttgatctgatagatagcgagaaacatttcttatattattgctactctttacaatatgtaaaaaaaaggtgtttatcaatatcaagtaccaaaaaataaccatgtattgcaaccaactcataataatacatgacaaaagtaaatactttttgggtttcaaactttagtctataatacataattttattttaaagtggtaataatacttttcctataatcattcatgtcaatggatttagatcaacaaataattatgtcatgttagcatcttacttacaccggaaagattcgatttgctcctacacacccattactattgtttttgggactatctagagaactgtcgaaagttttttatggagaaaactttcaaatctaactataatataattacaatataatttcactatagctataatgtaactcatatataagtattaaaataatatatgtataatatagttacagtgcagtagttacaatgtagttataactaaaatgtaactcatttaacttttccaaaacatgcagcagatcaagtggctagcacgcatggcttccaggatggggaccctgtgttcgagcctctgcaagcacacgtgtacagatttttttttccaaatctcgcgcggatcgcatggctagaaaatcatctcgcgcggatcgtacagccagaaaatcgaatcgcacagctagaaaatcatctcgcgcggatcgtacggccagaaaatcgaaagtttttagcctccaaaactgtcgacagctagccagcaaaaccattgttttttttatgtttcacccaatgcaacgcatgggcattttgctagtaaataaataattcccagaacaaggctcccattagaaatttgaaatgtgggcatgtgggccgcggacttgagaggccgtattaacttgggctcttggattacaaatcatcccgtattgtaaaggagagatcgttggcccatattgttaaggagagatttgtctccgagccaattccagccggaaattctccctcctcatagcctcgcgcagtcgcgctagctgacggccacggcgccggcgccgaagctcgcgtgtgctacttgtttccgtaattccgtctcgcacccgctcgcgctcactgtcacatgccgttgccttcggtacgcaactgtgactcccaccctcgctaatctaatctgagttgttacttgtcagtgctccggcttgtccttgatttgtttgctgttgctgtcatcttccgtgcagtgcaggctccgtatgcggcattggtcgctccagcgtaattgtcgatggggcctcaccgaggagctcaagtttagagtggtaagtgtttttgttttttttttcagatctctgacgatttttattctattcacgtatttctctttgtgaatttcagtatcagggatggttcaggatgtcgttggtttgagggttctaatgcagctgaaaatgtccctgtatcttctttactagctgatgaatgtggcttgtctagatagtaatggctacatattgttatcacctattatattggagctagggtttgaaatttcgtttcgaaagttccgaaattttgctccccaccggaaagttcacatctcgcctgaaattttaggttttttttttttgcaaaagtttctgaatttggtcaaaaatttattcaaattctttcaaaatcagtcaaaatttcaaataattttggccaaaatttttcaaaatttccgaaatttcggtcccctagtagaaaaaccaatttcaaatcagactgaaatttcggatccctccgatacgatattattttggcccaatttttttattttcttgaattttggtaatatttgttcaaaagtttataaaattcaccatatcggcacccccatacaaataccgaaaacgaaagattgaaccctaccggtaattatatatttccttgtttgccattgatttattaaggttttattataccattttttgcttgcattagtatcatcatctcatgattgataaattaatagcatccgttctataaaacttagagttcaattcaacaaatttagtcgaacttttaaaattctaaccattaattttatcagattgttaattattgcttttctagggccataaaggtggaaatagttcaatggaagcaaggtcgacattctggttcctctgagaagggtttgaataagaagtagaaggttaacatgcttccgaggctaaaatttttcggcttcactcgatcaagaagtaacatactatgctctctctgtatgagagacagtttattatcataatgtgttctttccgttcttttttgtgtggaccttgttctgacatatggtgatcctttagtaatggctttaccattttgtttttaatgtggttctggaagatgtaaaaccctgtatagctccaaacatgcatcctgggtcctcgttttcttcagcattactgaagttctagaagtacaataggcttacgcaaacggcaagtaagaaatttttgtttaggtgtctttcaatattgggttaaatttcacgaattaaaagttaacaaatgtggatcaaattcaccattctgaccttgatgtacagtatacagctcacagtcacatgcattcccttgtatgaggtttgcttttaactaacagggagatgagccgcgggaaatttattgaaccttcaaaacaaccttgacatatatgcatattttttttcgcgaacgcacaaaagattgcacgtcaatatattagaggaatagagtttttgttacacaccgcaattggccagaccggcctatgccagggaaggggaaaaacaaagtcaaaaaaacaaggaagagaaaaaagaaaaagaaaaactcgaacgctactccaaacaacgagagggggcagagccacgctacactcccaacaagtccccaaaggaagtgatgaaccttgagttcctctcgacactcaaggctattgttggcccgatctttcggtgagttgtgataactacgatttgggagaaacgttgacgatccgactacaaccgtacgagacgttgtgttgcgccttagcgatcgatacacctctccgtgggttgttgatcttgccggtgcagatcaaccctattcctgcaagcaaatcgaagaaacaagcaagaacaagataaaagcaatctgatattgcaaatagaaatttaatacaaatgataagttggggtttcgaatacaagcagacggacggtctagccgatacgcgcgctgcaagcgaagtagcaatggctaaactttcatctaaacaaaacccaagaaaccctgaaggggtaactagctatatataggggtgggaggacgacctaggggtgcctagggtcgtgctccaccagcttggggcgcaccccacatgggcctcacctgggccagggtcccaaatgaggttacaagcccataggcccattacaggtgtcacagcaccttgtttcttcagttgctaccgactgagatggaatttggcaatgaggcttgatgcattggaaagaggactccgagagctttccatcaagtactcacgggctgaaaacggaggtcgtatggagcttcggcggccgtttgaagtcagcagtgtagcaggtggccgaattggattttggcacttggaggactcgaacttggtatcttgttgttcatccatgatgtgagcaacggatgtatccgtagtagccatggtcacatcatcctccccttcttcacggaaaaccgtcctcggtttttccatatggtgttcttcatatagtccattcaaaataacctgtttcatccaatcaaaactagagaaactcgaaatagtgtgattagcaataacatgtttctctaaatccaaacaaatgaaaactctatgcaccaaatatattcctctatcattatatttgccaaagatatgaaaaatagcattagttagacatggcaaatcagacttagcaaataatttctccttcaaattatcgagctcacaaaaatcatcaaactgaacatagcccaaagtatttaaagaagatagcaatttacgttcctcaacttcattaacaatatgaacagcatgcttaaaatcagcacacaaagaaacactaggaatagcatgttcattcactagttgtggcatggatataagtgaagcattatcacacaactcttctttatcacaaggaacagcgagtaaatcaacttgtgacaaaggaattccagcatttggttccactaacggttgctctacttttgcatgaaaagtggacaaatttacttcgttaacaatgcactcaccttgattaatttcagtaccatttactttaccttggatgtcctctttagatgatggaggtgtctcgaacttgagtgtgaacaatggaattggtggctctttcatgtctctctcctcctttttgtgattacgcacttcctgcaaatagttagtaattggaggcaaagacatagcgtgtttctttttcatatcctcctctattttactttcagcattgcaagcaagttgtaacaaatgagaaagagatgtatatctttgacaatcaagcatgtcctgaatttctttgttaagcccacataaaaacctcaattctttagcttcttcgcattcatctaaaccacaatgtaataaacaagcttgcatatcatgatagtatgaagtaacagttctggtatcttgttttaaacattgtagtttgttgaacaaaatgtcagcataatacatgggaacataaacatctctgaaatatcgtttcaggtctttccaagattgtggtattttgttatgcctacaaagatgtttccaatcattagaagcatgtttaattaaaacactagaggcacacataaccttttgtttctccgataagacatgcttttgaaattcactatcaaccgctagctcccaattaatgtaagcacgaggatcatagtttccctcgaaataaggcagtgcagatttgatcttacctagaacatcatcacttacctcataatggtcatgttgatccctcctcatgtctcgacgaagatgtcgatgttgagcacagctatccccaattatcttgcatatccctgccattgttagtagaaaacaagaaacatacacaaaaatatgcgcgttcctattaactactaggtagtggcagctcaaaaatcgcacacactcaagcttttaaccaaactcttacaagatcttaccaatgcaagtggaatggtgacatataccgactcaaccaagcaccccaatgaaggttggatgtatcgatgccttggcaaacacttgcggtaggctgtaatcaaatatgtggagctctgggtagggttaaatatgtagcaaaggaatagcaaatgctcaaatcagataatgcaaagttgaataattgttcaaagtcaagtaccgtgctggtcctaggctagaacgtactagagacaaacgataccacaagatagcactaggaacaactcatgcacaactctgatatatgaagtttagctcaaacataacagtattttctcttttctttctttcttctttcttctttctttttttttccttttcttttctgtttttttttgtgtggctttttttttctctttttttttgcacctttctgcctttttttttctcacttttttcttgatttttttaaacaaaaactgactcaaggaccttaatgtaagattacagggactcaaacataaatataaaatttacagggactcaaatataaaagtctaaacccaaaattaaaattatacaaaaaatggaatgctgaatttatgccggttccgtttttccaaacagatctcgaaaccgacaccaaacaaaaattcgccaaggtgtttgacacaactcggaaccgtggaattgagggagggggtcggactcggccaaaggggcgagtgggactcggcaaggaggtggagtggatggcagccgaatttggtgtatgggataaaaaggaaactgatttttaaccaatccaatctactatatctttccaaaacaaacttgactacttccaaaatcagatatggtaattcaccttcctcctctcgtgcacgacacaggcacggccaaaacaaacacacacaaggatcggcaaactctagatgcaactcaagaactccaaaactaaccgacagaaacttctgaaaactacaaaaatagaaccttggcaacgagccgattccgttttcgtaggtcccgacaacaacagagacacggtggcagcgacgactgtggtacaaaacgtgaccagaactcgaaactctaaacgaactagacgctaagaccagcaacacgacatgacgatgcaacacaaaattcaacaaagcaaaaactgaaaagaacaatgcaatggcacaatatggctaggtaaatgatacgaatttttttgtatggctattttctggttataggaagataaaaactcaccgagcaacgaaagctctgataccacctgatgaaccctgagttcctctcgacactcaaggctattgttggctcgatctttcggtgagttgtgataactacgatttgggagaaacgttgacgatccgactacaaccgtacgagacgttgtgttgcgccttagcgatcgatacacctctccgtgggttgttgatcttgccggtgcagatcaaccctattcctgcaagcaaatcgaagaaacaagcaagaacaagataaaagcaatctgatattgcaaataggaatttaatacaaatgataagttggggtttcgaatacaagcagacggacggtctagccgacacgcgcgctgcaagcgaagtagcaatggctaaactttcatctaaacaaaacccaagaaaccctgaaggggtaactagctatatataggggtgggaggatgacctaggggtgcctagggtcgtgctccaccagcttggggcgcaccccacatgggccccacctgggccggggtcccaaatgaggttacaagcccataggcccattacaggtgtcacagcaccttgtttcttcagttgctgccgactgagatggaatttggcaatgaggcttgatgcattggaaagaggactccgagagctttccatcaagtactcacgggctgaaaacggaggtcgtatggagcttcggcggtcgtttgaagtcagcagtgtagcaggtggccgaattggattttggcacttggaggactcgaacttgatatcttattgttcatccatgatgtgagcaacggatgtatccgtagtagccatggtcacatcaggaagcaacgcccgctaacgaccacaaccggccctccgacaggatggactctaggaccactgagaccgaagagagcacagagtcaaacaccctggaattacgttccttccatagctgccacgagacataccggtctcttaaggtatgataccttggaaattattgtcactaaggtctaaatgcttgagcttttgaagctttataaaactggatggtatgttaccatcaagattgttgtgactaaggtctagttgaacgaggtttcgaagctttcccacattgtacggtatactaccatgaagattgttgtaactaaagttgagacgatctagctgccgaagatttcctaagttggctggtatttgaccatctaagctattctttcccaaagaaaattgtatcaagttagtaagatcaccgatggatgatggtattgacccggtgaaattgttctcctggagatatagaagttctagattcctcagttttcctacccattcttcgattgtgccaataagattgtttttacttagccacaaactagttaggccatgaaggttccctatactcggtggaaccactcctacaaaatggtttacacccaaattcagatattgcagattggtggataggttaccaatcgagcttggtatatctccttttatttgattacgagctaggttgagtgcttgaagaagggtacaatttgcaaatgcgtgtaaccatttttcattgtcacttgcttcgagatggttacccgctagatacaaatcggacagatttgcaagctcactgagataactaggaacctggccatagaaattgttgtttgtcaagtctatcaaccatagccccgaagcgttgataagggaagttggtatatgaccttcaaacatattcctcgctaaggaaaggaattggagattagggagcacatcgccaatgttgggtggcagtgcttctttccctagcatgttatcactcaaccataaagtctgtagagaagacagattgaacagttcatgtggaagtcggcctgatatgttgttcataaaaatgttcaatgacaacaaatctgacaatttcccaagctcacggggaatgcttccctcgagatggtttatttgaagagagagatagtttaggccggtaatgttgccaagggtgggagggatggttcctgtgaatgaattattggaaagacataagctcgagaggttcgttagaaggcccaatttggtgggaatttcaccaacaagagaattcgaggagagatccaacacccttagtctcgaacagtttgcaagcccctctggaatagtatcacgcagtgagttatgcctaagatccaggactttcagtctgtggagatggttcagcggaggcaatttgccggagaaatggtttgaagagaagttgagtgccttgagaaacgtgaggttcccaagggaggagctgattgtgccggacagggagagtttgaagagattcagcgccgtgacgcgcccagggtgcctccggctgcagctaacgccggtccactggcagaaggggacgcttgcgttccacgagctcatcgcttgcgttggatcttccgttatatgcttcttgaaatccatcagggagagcagatcagctgtgttgttcagagttgcttcacaacggatgctgccagctccgtaagacagcagcaacagcagcaaaaacgccagaaatgcagccatattcagaggatgattttggtttcaaaagatccagaggatggttggcctcagcgccttccttatctgccaaacgtaaagcgtgaacatttcagcacaaaagtacaatacgatagcagtaatttaacactagagatgtatttccagcaggagcagacgatcgatgagacgactttgcgatgaatggttaacatgcgcgataaattgcataaataaatatcgagagatcagaatgcacctcgcccggcgtgtttgcttccgccttgttcagtgcagaggttggaaactcgcttgctcgtaggctcgtagctaacgcggcgaaaggtacgcatgcacctggcacaccctatccggtataaaaacagcttgaacgggcgggcgtacctcagcttcgcttgatatcatgccttaggctgtgtttggatgccccctttcccaacccctctccctcgttttccgcgtacacgtttttcaaactgctaaacggtgtgttttttgcaaaaagtttttatacgaaagttacataaaaaatcaaattaatccattttttgaaaaaaaaaattccaaatgggaacggcttctagcgaacacactcttagcaggtacgatagcagactatataagtcaaccgtaagcacatatcaagaagataaataagaagagataagaatagcgagctataaatttatagtcagctgtagcacatactacaaatgtaatatgtgtatgacaggtgaaaccaggtactacttgtgtaatactctctccgtcccaaaaattaagaaattttagagttggatacggttattaaaaaagtaggtagaagtaaacggtgaagggttgtgattgaatgagtagtggaggtaggtgagaaaaatgaatggtgggagagttgtgattggttggaaagagaatgttggtggagaagttgttatattttgggataaattctaagggctaaaatttgttatattttaggacagagagagtatatattttaggtaacgaattagctattaaattgactatagatgctttggagctactagtaggctatactgttaaacttgctttattacattgcaagcaatgaatttcagttcttcaaacttttatttccttttgctttttaggcaataaaccacggccgcaccgcacttctggtggaaccatcacagattcacaggtgttcaaagaagagctgacacaacttgcaacagactgcttgaaaacaaaaggtaacggaggaacttccgatgctatttaaggtgaattgaaatcatttggtacttaagaaaaattgaatgcactggataattaaaccaccaagaacataaacgatattttcataattattatttacacgtaaacttcagagtaaatttcaaaaaactaaaagatatagtgaacaaactatcacagaactatagatctaagatgatatattagaaaactgtagatttaacatcaaatttatcgtaaaactaccaatttaaggtggagtattgtaaaattaaagatttagtaatagagttatcataaagagtaattttaccatccaacatttagtaccttaagttatcataaatttttttagtacctcaagatactttttagtgtaaaatttggtatctctcaaataaaatttagtccctcaaggtagttagtaccaaaattttgtgtgcaaaatatggtacctcgaggtaccaaatgttggatggtaaaatcgctctatcacaaaattacatattttgcgttaatttaatcacaaaacttggaggcctataactcaaacataatgggcatgttcggctgcacttaactttactgttgtgtagccaacacaaacagtacgttgtgtctgcagctgcagcagcaacggctgcgtatagtggctgtaccagctagctgaacagacccaatgttagtgctaagaatttaaacgctaaaatatgtagttttgttatagttttatttttaaatatgtagttttgtgatatttagccataaatatatagttttataatatatcatcttaaatgtgtagttttggataattggttaacctctgtagttttgtgaaatttgctctaaactttatatattatatttatccattatgttattagaaactttatatattattcactatgagggcttgcaaactttcatactggccaaagcggaggaaaaatgatctttttttccatcaaatacatcatcatttagtagtttgataaacatgctaacggataacgagaaagttgctaaaactaacggcataaaacaacggggcctaaagcaacttttaatatagctaagagcagtttcatgaaaacgtcaactagttttagataatttataaacatgcataataggtttgcctattcatatggttcaaatatctatctccactactgtaataatactacaagaataggttttgtttgtccatcgacgcgcaaagtttcggtccacacttcatgtaaaaaacaccctttctggatgaacatctggttcattctttctctaagattccattacaacgcacaagcactgtataatttgttaattacttcttccgtttcatattataaaactttctagcattacctacatttatataaatgttaataaatgtgtctagattcattaacatctatataaatatgagcaatactataaagccatataatatgaaacggagcgagtaacatacaatattctttttctcctcataggcttgcctttatctcatactaataacatactcgtacgttgttaaagtgatgaaggatgataactctgctttttagtactccctgttctatattttagtatttccattcttcgtatagattcactaatatatatgtgatatacatatgaaacacatatataaatccatacataaatttatttaaatctcaaaacattttataatccaaaactgatatagtggtatagaaaaactacacggcattccctcttaaatactaaggctgtgttcggtactttgctttcccaactccccctctgaaatacgaaagttgctttaaaaaatcatattgatctataggtttttcgttttccgtgcatgggatatgggttttcaacacccgcccccgaacacagcctaagagactaatgtcacgccatttcttaagtactagttaagccactgaattgtctagatttgtcaggtttccaataaatcatccaagtggtacaacccactgtcattatcctccgatagaaagctgttaatattatccagtcgacagcatgtacagatttaaggaacgaaagttccctgatgtagagataccgaatgattgtggagaggtcgccgattgaattcgggataaaaccgcgtagcagattattactccctaatgtataacgccattaactttttaacaaacgttcgacatttcgtcttattcaaaaaatttatgtaattataatttattttattgtgacttgatttatcatcaaatgttctttaaacatgacataagtatttttatatttgcataaaaaatttgaataagacgagtagtcaaacattggttaaaaagtcaacggcgtcatacattaaaatatggatggagtgctagctagcgacaatatttgcagaaagctagctttgtctgccagtagcttcaagtttgttttcaactccgcatctatccagtcaatatgacctaggtttggaacctttgagcaactccaacagattgattatcccactcttcaaaccaaacaatataaaacataataaaaaaataaggtctcactggccatttaaatgactaagccatctcactggccaaatacccaggtgggctggtcaaatctagccagccggtttagctggccaaaccatagtatcgaagcagtgctagtgagaattttctttaaaaagataataatagtattttaataaaagaatttgtaaaagtggagatggaccgtcagaaatcataaatttagtatcatatcgaccaaccaaagtttgatatggcacatatcgaagaactacggtttgatatgtgacctctcggtatgtggttgttcgataggttgataatttgattaaaaaaataaagaatacatgtcctaagcttgtttggccggataaaataaataaatgtgcatgacgcgaccaatcgaacttgcgaagttcgatatgtcctcctcaccgaattaaggaaaaaaagaagagtgtgcatgtatgatggccaatcgaactacgatagttcgatatatcctagctactgttcagagtaggattgattgcttttatgtttttttaatcatgccaacatcacctgtcgaaccaccacagtttgaattatggttgttcgacatgtgctaaatttgttatttcatccaacaggaatttatttttatatctttttattaaaaagctattatttttgaaaaaaaaaatcagctagtgacagcactttctaagtagctacctcgctcccaccgcctcctccccatcaacagttcctccatctctccgtatccaatcttatcattgctgccaccgtcttcctcatcttgaggaagacagccccgttgtcaccctggttgtcgactcgaaggcaggacaacgagaaggaggacggcaagccggagcctcctcccgcgctcctatgttgcctcgtccccatcttcgtcgccaccatctcttgcatcatcccctacccctatcgttggaatcaaatggagatgctggcaccaacaccgccaccagcctcccctgcatcacttgtcgccaccagtgaagaaggaggcctccaacaccgctgtacaccttggcggcagtatcccttgcgccgtcatcaccgtcacccccacccacgagccttgcctcaagcagccgctgaccgttgccaccacctccctatccggtgcaacaacgtagttgccacccggccccaccggcgccaccatagtcatcaacatatgtgaccctaggccaccatcaccccaccccttcctcctcgtcgtcatccagcttccaccatctcacctctcttctcaccctcttacacggtcgatcagttgcggcggtgacggcttgggcgacaacaggacagttggttgcggcggcggcttgggcagaggaggcggaggtggggaaagaacagcaatgtcctactagtggacaaccgaaagcggaagagaattttggagggaggaaagtatatacacactgacatgtgggaccgattgttagattgaagagtgtaaatagagaagctattagagtaaaaataaaattgtttctctattcggtatgtaagctgtggctaaataaatatttggagaatcagatttggataagctgttgaataggagtatgctcttaccagcataccgaaagacgtataggaatttctcccaaaaaattgttgttatccaaatctaaccttcctagtactgaaacattgcctagggaagctgccttcaaacatgttgtaactcagcaaaattaaagcacatctgcaagaccaggactactactcacaccaactgctgagataaaatgtttacgcacacgccctgggtgattcgggctggcggtggtgtggacgcttgtgttccagcggctcaatgctccaccctactggatcactggtgatgcatcgtggatctcaactcgatcgatcccattatcccaacctcttcatgtcttccactatcttttcgagggaatcacttagccacttcgctggatgatggtgaagtggggagaggacgggagggagaagggaaagcccttctcgcaccgcacggcacgacggccttttgctgcctgctttaattcgcttttgctgttgcctctagcttagcttagcttggccgccaatcgtctcggtgaaaagagagcttgaccgctgccattgtagcggagaccaccttgcatcggtgccaggatgatgaaccattgtagggtgtgtttggctcacggttacgtatggatgggatatgaccaaacatattttattcgatatggcgatccaattttttttgtttggtttgtatggataggatgatcaaatttcttgtttggttggagggatatagcttggatgggaaaagctaaaagttagtgggacccggcccatttgtcatatatatatttttatcaaaatattatcatccgatatcttattttaaagatttaatatagcggcccgcacagattgcgcggctagcattattatattttctctcatataatagcatatatatgttttctcaacgtattatttaaatatattgaaatgacaatataattttaaattttgtactaactttacgaaactactaatgtgtaatattcatattgtattttatatacgtgttagttactcattatttttaatatcaaattttagttatttgtaaattatattcctatatgaactctagactcgtctttcaatatttctttttttttaattccaaattttcgttatctttatttctatataggctctaggctctcttcaaatattattttttttaattctgaatttttattatttctaattgtatttctatatagattctaaactcatcttttaatattctttaatttttaatttcgaatttcagttacttctaaattgtattcctgtattgactttagattcttcttcccatgtttttttaaatttcaaattttagttatttgtaaattgtatttttatacgaactctaaactctacttttaattttattatgtttattccaaattttagttagttttaaattccaatatggactctatactctacttctaatattccttatttttaattttgaatttctattatttcttaattgtatttcgatatggactttagtctcctcttccaatattccttattttgtaattctgaatttcaactatttctaaagtctatatatatatatatatatatatatatatatatatatatatatatatatatatatatatatatatatatatatatatatgacacctatttgctactatcgggagtagttactccctccgcttattggatcgggttagtggaataacccataatccgataatatttgcacaaaatattagcttgtagttagttcaaataatttctaaatcatcggttgcatgcaaaccaattttaaaaaccggtagaacgtcagctaaaaaaatggcagaacataactgttttgaaaatatcgttggcagaacataatgtgaatcgggaaaggagcagaacatggaaaaaaaaaacgcggacagaagatattctgctcatatgaaaaaaaatttaagcggacagaagatatcctgctcatccaattaggagcagaatagaactggaaagagagcagaagatcgagcagaaattctgtttgaaaggacgcagaacatcagctgtttggcggcacatgaaattgttgatgttctgctcttttcaaattgattttctgctactagccagcagaagattatgtatgcgcatcaactaaaaaattggcagagcatcaactaaaaaaaatggcagaaactaatctgcatcagagaagtatgcatgcgcatgcagcagaagctaatctcccgttccttaaactatggatatgtaatagaatagcttctggtccttcaaacgatttaatctactactagagcaaggcccgtgcagaaacgagagcagaacattcctgcttcttctgcgcttgtagcagaacatggatcgtagtttctgcttgtgcttgtatttgggtttagagatgtagcagatcatggcacacggcagaactgggagcagaacatcacttctttttttgggtttagagatggacatgcactgatttggagcagagcatgatctgctatctgatttctgaggagcagaacatgttgcagatttggtagagatgtagcagaacatggcgtacagcagcagaactgggagcagaacatgacttcttaatttcttatcgcctaattacatttacaccagcatgatagtttctggtgaaaacagaactagagccaccaccacctgatacatttgcacctgctgcaggactgcaaagttgctgcaaatgcaaaacataaagaaagcgaattaggagcagaaacgatcaagaaaggaatcgagatcaggaaaagaatccaaaagatgaaaaaaataacagatgaatatgataacaaaccttggaactggaatcctccatgccagggctttcaccgttatctgcaacacagccgccggcgaggctacaaatctgacttcagttgggttatgaaccctccaaacgcagagaacaattttagatcgataatgttctgctcttccttaacgacggaaaaaatatcctgctttctcactttggataaacaaacacaagtttcaaatttcatatctacaacaaactcgggaggcttcgttcaattgttggatctactgtagaagataaacgaccttctgttgaccaccgagaaaaataaaagctggagggagtattcgattcattagacccggtaacagtcattggcattagtagcgatcgaattgagggcgcatagggagggagtagctactcccggtagtagtatataattttcctactaccgggagtagttaccggaaatgctagctagcgattgatcgctaggggtagctagcagcgatcagattagattttctcccctccacctggttttcttttttggcaccgcattactttcctattttaataaatttatgcacctaaagtttatacaccttaagtttacacatctaaagtttagagattcaaagtttataaattaaaagtttatatatccgatttaaatttaaatttgaattcaaatatttttatatatatagtatttctatacatctaaagtttatagacccaaagtttataactcaaaagtttatatacccgattcaaatttgaatttgaaatatatccgattcaaatttgaatttgaattcaaatatcctatttaaatttaaatttgaattcaaatattttttttatatatagtatttctatacatctaaagtttatacacctaaagtttatacacctaaattttatagacctaaagtttatatatccgattcaaatttgaatttgaattcaaatatttttcatatatagtatttctatacatctaaagtttatacacctaaagtttatagacataaagtttatagacctaaagtttatatacccgattcaaatttgaatttgaattcaaatattttctatatatagtatttctatatatctaaagtttatacacctaaagtttatagacccaaagtttataagtcaaaagtttacatacccgattcaaatttgaatttgaattcaaatattagtttatagacccaaagtttataagtcaaatattaaatttacatatttatggtgtagtaggaagagaaaaaggggaggaggaaggggggagaggagggagcattggagtaaggggagggccgggagagggagagcgatcacccgcctattaggtgtccccagtagttactcctatcccttagcggatcgggttagtggaataacagaccgagctgtttaattaagtaattaactaaatgatttattagttcagataagtgctaaatcatcggctgcatgcaaatcaacattcggatggagtttcttcctcacgcgtgctcgccttggcagaatatgctctgcttctgataggcaaaagatatatagcccgccaattgaaaaaaatggcagaacatcaggaaaaaaaatggcagaacatcatcgggaaaataaatgttggcacaacaaatactaaaattttctctatgtaacggcagtacatattatgcctattgattactaattgtagtttattatgtgtacgtacttaaataaaacgtatttcatattttgcatatctgaatttctgctcgggatagtttctgcttgtataaatgtacaacacacagccgaggtaagggatgaaactcttctgcacagaatttacggcagaacagaatttgtgcagcagaaagctataatcccgctcctgaatcaatggatagtaggataacagaatatcttctgctctttcacaaactgattccattcactattagacatacgactaggaagaaacaatggcagaacatcttttcctccccaacccataattcgtgacttctaatctgttgtgtccataagtccattcaggtcatttacaatttgtaagaacgtagaatatagagcaaggaatacaaagtgcagaataccttctgcctgttaaactgaatctcatcgtctatatgaagcttataaaacttgaaaatgagcagaaacaggaaaggaggcaggcagtatgtgagtatgtgacccgggaaaggagcagaacatcgattagaaagggagcagaaaaataatttgaacagaagcagaacatcttctgctcctccaacaaaatcatcactaagcagaagacgttaagaaggcagaaaattttctgctcgttgtagttttactcattgctagttttgcggccagtcgttgcacgcatggttatgaacggcatgtgcagcacacaaggagaacaacatcagttaggaaggaagcagaacatcgttttcgaaatagatcagaacatcaatcggcttaatataacaatctgcaacgctaacaaaaatatgcagaatataacaaaaagcaaaaactcttctcgacagaaactcgtcaagaccttctgctcggtttttaaatgcacatgcatgtgtaagaaaaaaaaaacctagattaaaacggagcagaaggttggtacgttcgatttctgctccgtacgttcgtttgtgtgctgccgatagtcaagccataatctagtatttagttatttatttgttaattgtttaattcaataaaccattacgtggactggttggttaatggatccccttcattaaatttgtttggagctccatggtgcgcgggctccatgattcaaattgcgtatatactcaattcaaatgagtatgaaatttttttaaatgtttaggtgttaacattaactactttactaactagttcaaaacaagtttgaactaaatttaaacatgtttttgttagattttgattctaggtatatagcatctaaacatataattagttaggtatgtaatattggattgtaaaataaagttaaatttgagttgttttgttgctaggtatatgtatgaatagaaaacttataactaggtatatactcacaatttgaaaattttgaaaaatttggacgaatttgtgtatttcataccatggtgcccgggcaattattatttagagtagttaaatatcatgcaaacataacatatcatttgcattttgttgtaattttagaactcaatatgcaagccatatcaaatcattatctccacatctttttcacattattcaaacatatatatatatatatatatatatatctattattttcataatgtataacatgtatttacccacctattctacaacaaaacgttgggtatcaatcagttgatttaagcctatagggcaataaattgagaacaagagaatgggaaaagacattaaaaaaagagagagaatgtaaaagactagagtgcccttgagacaccaagacacacgttgacacgtacccttgggcctaaagagagatagtacagcgataactgataagtgggcataaaaggtatatgaacgtactggtcacgcactaatggcatgttaagcatagaaacctttgagactgttataactaaggtccaagcgactgagttgacgaaggtttgccagactggatggtattttgccaccaaaattattgtggctaaggtccagctgcctgagcttaggaaggtttcccaagctgcgaggtactttgccactgagattattgtgactgaggtccaacaggacgagctgttgaagatttgccacgctagatggtacttcaccatggaggtagttgttgccgaggttcagccatacgagctgttgaagatctccaaacttggatggtatatcaccttgaagattgttgttactgagattaaagctcactagccgctgaagatttcccaagctgggtggcatcttgccttttagattattgtaactaaggtccagctgtgtgagttgttgaagatttcccatgttggacggtatgtgtcctgatagattgtttccgtccaaaagcaggtactgaaggttgacagacaggttcgaaagcttaccgagagagctaggaatttgcccagagaaattgttctctgacagatatatcaaatgtagctgtgaaatgttgccaagggatcctggtatgttaccttgaaacatgttaacacccaataagagccattggagattaggaagggcatagccaatgtttgacggcaacgatttccccagaaaattcatctccaagaatagcattcgaagagaagagagattataaagggcgcgtggaatttcacctgatatgatatttacactcaggtccaacgacgacaatttcgacaacttcccgagctcagaaggaatgtgccccgagagataattacgagaaagcacgagatccgacagctcagagaggagtcctatgccgaggggaatctggccttgaaataagtttatgctcaaatctagctgcgtcaaactggaacagtttgtaagcgtgtccggaatgatcccgtccaaaatattgttactcaggttgaggacttgcaattttcggagactgttcaggcgaggtatctgcccagagaagcgattaccagaaaggtcaagcaggtgaaggtaactcagattcccgagagaagcggcggcgagtcgaccggtcaagttctggccggcgagctcgagcgccgtgacgcgatgctcccggcggccgcatttcacgccattccaccggcagaaaggggtggttttgttccaggagctcaggacgcccgccggatcgtcgccgatggcatccttgaactcgagcagcgcgagcatgtcggagtcgtttccatggaccgccacgacgcagtggatgttgccggctgagtagcagaggagtactaacgccgcaaacaaagctacgagcatggcgagctacctgcacagtggtaaagcaagaaatacttagtacaggataaagcttttaaaaagctaccagtagcagctatattaaaaaggttatgaggatatcagcaccggcctgcacggctgcagttggtctcggttggaatctgactgtggatatgatctccgaacctctcgtgctacattttcgaaggaatcgtcgtcgcttcgtcagttgatttttctcgggctggcaccgtcgcgcacggcatggcggtctttctcgccgccttcatggcttgaccgccattgcagcggagacgaccttgaccccacaaaattttgagaaaatctcctgtaccctcgaaaattcgtttaatccccttacgtgcccataaattttatcccgttccccttgtgtgcccataaatcttgtcccgttccttatatacccctaagttcttactttgatcttctctatatccatttcgttaaatgtttttgaaattgactatattatctctctcttatacttatgtgctagtttagtgataaaaacacaattcttatatgaaaaagatctatttgtaaaaaaacaaagggaatataattatttgacaataaattttaaaaacaaatctaaaattttaaataaatttaaattaacttttatgaaactggtacactgttttcatcaaaatttgaatctaataaataaataattttggttcataatttctagctaaaactcatatggatttgtaaaaaaatgttcaacaatttaaattttcttttacatattttacaaaaaaaataattatgccccatttgattttatcatgaattacaattttttcacattgtgaattatggagtagatagcatgtaagtatgggaaatgggcgacatgatcattttagaaaaatctaacagtcaactaacggaatagggatagaagagatcaaaataaaaactcaagggcatatagagttttgagacaaaatttaggggtatagaagagattatgaaacttttcaggggtatgtagggaattttcaccaaaattttccctagcttcttccaaaattcatttctaaaccgaattaccagatataagaagtccctcaatttacaaaatcagatcacccgatgtcctaggcagtattgtgaccgattttaggtgtcttggcaagctgagtcactacgagacccatgtggaccccatatgtcattagctatcactttctttctctcccctctcccttctcttctccttgtctgtccagaacttgatccagcgtcgggccttcccggttgctaggttgcacagtccaggctcctgtgggtgtgggtggtggacgacgacgtgggagacggcaccggtgaggccatcgacgcggagagctagtgttggaggagtgcgcagtggagcggctccgctatgaaggcgtggaggaggaacatcatgatgttcgcaccgtcgacggtgacgtcggatcactacactgggtacccaaaagtactggaggactatagtgattcaaactggatatctgatactaataagataaaggccacaagtggatatgtattcacacttggatatggcgctgttttctggaagtcttgaaagcagacgatcttaacgaggtcaacaatgaaagtagaactcacagctttagatactgcaacagttgaggccgagtggcttcgttagatcctgatggacttgtcggtggttgaaaaactagtaccagcaatcctgatgaactgtgataatcaaacagtaattattaaagtaaacaattcgaaggacaacatgaagtcatccaggcatgtacaaagaaaactgaagtttgtcagaaagcagaaaaactccagagtgatagcattggactatgtcaagacagctaaaaatctagcagatcagttcactaagggactatcacgtaatgcgatagacagtgcatcgagggagatgggtttgagacccacttgagttgcccaatagtggtaacctgtcctttgtgattggagatcccgtgaattaggatggagaaagaaactattgggtgactgagaggagagaccctgaaatgggctcatctctatgatgtacttctctcctattctgtatggaaggatggtatatacctcaatgtgatttgagtggcttttcgtaaagcagagatacctacagaacatcttagaaggaacatacctatataagtctaactgctagtcacagtctatgagatctagttgatctttatatactcatgaaaaggcttggaatatgatttatatgctccaaacaaaggggatgtaaacggcagcctagtaccagttaagagttcgagtgaaacctgatcgcacaaaactgacaattcaatgtatagtccattgttcagttgtgatctggtgtagctcttttcctaggtggaagtttaacttaacagtctccaccgaaacaatggtataacaaataggttcagttttaagaacatttcttgtgagccatgaaatttggtggggattattagaataaatgggctaggcccaatttaattcaattaaaatctcaagagcccacaagtaatgttagagacaatactgccgccttgaaaatttaggtggaagaatacggtgatattagagacaaataatacatatatattagagacaaataatacgtacgtagagagattaaaagaaagatgaataagaaatagtgtatactcatctgagtgtggatatgtgattcagaatttcatgtataaactaaaaacagtacacaccaccatccaggagatctggtggtagcggtaggccgccacggctgccttggcttgacatatatgaaatcaaatcacagctgatggtgaaattaaataacaaagctgctaagatcgagacgttttaatccttgcggcatcaactggagactgacggtgaaactaaataacaaagctgctaagatcgagacgttttaatccttgcggccggcatcaactggagaaagggagtagatcagcgcatcgctaaacacctagatctatactcattctgtcgagcggaaagggagtagatcagcgcatcgctaaatacctagacctatactcgttctgtcgagcggagccagacgatgccgtttcgtggtcctgcgacgccggcagggcagaagacagcaggccgatgtggatcacgccgtcgcttccgactcgctgtggacgccaaatcaacgatgtatcctgccctcatcgcatcgctgccaacccctccgaatatcgagctctccactgataactgatttatcgatcatccaatgagctggtatttatcgatccggttttccgattaccacgggttaattgagattacggattttttttcttgttaaaaatgaaaacgggtgactaaaatagatttttgctggcagccgacagtgccgccagcgaactaaaagccagtgaaaataatacattttcactaccggtcagccagccgccagggaaaatcgagtttaactggcgacatgttaagacaaccactagcaaaaataccatcttcgccagcggcaagttaaagatgaccgccagtgaaaacattttttagggttaaaaaaaattaaaaatcagcgccgctagtcgccacggccgcatgcactgcccattgacgaaccccaccacggcggctctcttgccactgttggtcgccgccgtcgaccctgaagaggggaggttcccctgtgccacccactatagatctagagaggagatgagctagacttccctgcgccacctcactctcccgagctcggctgttgccaccggatcagtcacccgcaggagtccccaccgctggtccgtatcctgcccgagtcgccacggccaccccatcccctttgccgccgccaatcgtcactgctgagcccggagagacgatactcccctttgtcaccccactccggaaatggagaggggaggagctaggctcccctacgccaccccactctgccgagcccgtccgccaccaccagatctgttactcacgcgcgggagttgctgccgccggtcaccgccaccacccctcctctttgctgccaccgaagccgctgctgctggacccgccgccggttgggagggatcggaggaggagaggagtaaggcggtggtgcgccggtgaggaaggagaagaggagaggtgtcgatctgaggagaggagaatgtggagtggatctgaggatttttgctgtgcgtggttttttaatgcactgtgactgattttttttatgaggcggtggattttaaaggcggtgctctttagtgaccgccagcgctggcagtcgcttaagagatccgcttgtaaaaatatcttaagtggccgccaacgaaaatcgatttttgctggcggttggtgtccgcaatccctcttaagtatctttacaagcgtgcatttattaaatccgccagtacaaataaaagggtggtgctatgaaaaatggtttctattgtagtgacggtaacaaaatacataggaaacttgattgaatactcgatcaatccatgacaatatatatcaggataacacattgacacagcgacgcccggttctttttcattaagatacatattttacctcggtttccattagcacactttttaaacagctaaatggcatgtttcgtgtgaatattttctatataaaagttgctataaaatatcaaataaattcaatttccaaatttgcaataattaaaacttaattaatcatatgctaatagctttttgtttttcatgccttacttaatattcattttcattagtatcaaacaccactcgagtccctcgcaaaccacagccctgctcaatcagttcccccgcatgtccacttacaacgcccacgttaagtggcctaggagatccgtgcggcacacctcactggtgatggtgctgctagcacgactgccatggggcatgcgatagcggcggcgtgtgagaaggataaccaagcgaaatactgcaatctgcagttgcgatggctaggggtgggcagaaaaagaccgaaccgaaaagaccgagaccgagaccgagaaattcggtcatcaattcggtcctaggtagtgaaagactgaattttgttcggtcaattcggttagtctcctcgggtaaccgaatagaccgaattatcaaaaattatctaaaaacaacctacaatccactatgtttaataggattaaactctaattttcacatccctacttcttctaggcatgcaacctaataagagtctttactcataaagtgcttacgaattttttttgtgatttttgtgttgaaaatttccattatttctttgcatatatgaaaatgttgttgaatttcggtcaggaccgagaccgaatttgttggtcttgatattttttcactgaaattcggtctttatttttcaaagaccgaaaagatcgaaagatcaaagaccgagaccgaaattttcggttagaccgaatgcccacccgtagcgatggcggtcaagttctacatggtcgaagttgtctcgacataagttatcgtacactcttgtcactcgcactcctcctgcacaatttgagcttcaatttatcgatgtctttgtggtgaaatcccgtggttctatctaatgattttatttgaatggattagggtccaatttactgacaaattaaagttttttcaccttcatgcttaagttgggaatttcagaatggtccagactgggctaccccgtccctctacacttatcgcacagatatgaccgaaaaaggactatgggagggacaattgggacaaacatcctaaggcccggtttagttctttttttttttttccaaaaacgttacattgaatcttgggacacatgcatgaagcattaaatattaataaaagaaaaaaactaattgcacagtttgcatggaaatcacgagacgaatctttttagactaattagttcatgattagctataagtactacagtaacccacatgtactaatgacggattaattaggctcaaaagattcgtctcgcggtttccaggcgagttatgaaattagtttttttattcgtgcccgaaaaccccttctgaaatcgggtcaaacgtccgatgtgacacccaaaaattttcttttcgcaaactaaacaacgcctaaatttgttaagcggctaaatatttagtactccgtagtttctaattaatccgttgcaacggacattttttcttcctcttaaagctacgggcatatttctggtcctcttaaagcaatggtcgtattttcgtcctaaaaaaaagaaagtaaaaaccttttcctctctctctctcctctcctcctcacgccgcgaacgcggatgcggccaccacctggccctgcgccggcgcggcggcggcggcggcggcggagtcctcccctcctctccctcttcccgctgtggggttcctgcaatctgcatttggtcagcaatggcggttctagccgctaggtgaggatctattcctaaatcctaaccctcccaccatgttcgtgaaagggtttttgggaaatgagcgtttaggatggtcgaattagagtactcgatttgactctggtagaaaaccctagaaagtttgcttccaaatttgctcttattttttcttgtgtgtgtgcgtgtgtgcatgtggcagaggaaatttaggaggttggatgtacccagatttggtattttctggtgctttacctacatcggtgccaaagttgtaatccaattttgaggccttcaggtgttgtggtatgctaggagcttaataaggtatctccatgtaacaggaatcatctatatgtggaatcatttgcatactgctctagcttttatgcgtcgatttaggttctgtggactagatttgaatatttgatagagtaatgtttctcttcttaaaattgtgggttcttcattgacttgattctctgccatgttagctactatttttaagtggatcagtgtgctggcctcatttgatgctctcaaagtgaatggataatacatcatatagtactaaagtcatgggcattggattggttgaagaaaataggattgtttctatgtcagagtacaaggttgcatcaattgtggtgctgtagtaatatcgagtagaaggggcttcgatagccatcatcagtgatgtgcttccaaaatggatatttcataatcttgaattctaaattgaaaattggaagtaccttatcgaaatgttaattggtcatgtcatcatagttccacaatgtttcttattatccttcttgtgcctgtgatgagactttgttctgttcattaatgtcggtggcagtgcaattgagggttgtgaaccctcttcaaagctttctgacgattctttctttgaaggaggggatgcaatattgacatctgaggatatagtttgaagaggtgactatccttcgctttaccactcagttcgatatggaaattccagctacaaaatcgatggtcttgctcctggagactatttctttgatctgcatttgctgagataatgaacacttacgggccagaaggaattagagcatttgatgtccttgtgctagaagaaaatgcaaacacagtattcatgaggctcttaattttgtatcacaatttattgtcaggtttagctaaacaatttgacttttgattgatgcacagattttgtctgaatttgatgtgtatgcagtggttggaggtaacagaccccttcatatgcgtgatattagggtaacagttgagagtgacggtgcctttgtcataaacttcaaaggagtaaggggaagtcccatggtttgtgccatttgtattcgaaaaacggtagcaatagcaggtaagacacaatatattagattcaacttactccttcaaggtctaattttcagataagatgtttctgtatgctcaccactgttttacattcctgacagaacaagtccttgatagacaagctgatcaactgagaagtgtttcccaaaagtacgaatatgccaataaattatgggcagctgccatatctaacttggaaaataaaatcaaggtaaaagcagatttactgaattgataaatacatgaggtgctatgttttactaattatatcactttttaattttcaggtcatgaaacaagagcaaacattgctatctcttgaagcaagatggccatgcaaacgctgttcctgaaccgagtaagatggtaggagctgttcaagcattaggttatatccatcagttgcattattgtaaaggttttagagtatttgatgaaaaagtttgtaagcatttttttttgctgcagttgtgcagtgtgaagatcttaaactgaagtactatgaagagatggccaagagaaagaaacttcataatattgtcgaggagaccaaaggtgcctcttctgatcttctcctctgtattatgatgctttcacttagtactatggatgttggtcgtcatgtactaccgactgtttcccatgtgcttgcattgtgctaatagatatttccagtgatgaacccagaacaaaaaaataccaagagtccaatacatacgaattatgtaactatttaccggtatactagttaacatggcgtaatttagctagaatttaataatttacccagggtcccaaaggatccctggaaacataacataggcacactgctggatacttctacgctttactccgtagtttttttcatattgcagtgtggttttgttttatagttttgctcgggcttaattgaaacataattagtcagcttgctcaactccatgttcgtccctaggtgcaggactgcagggagctgttgtaccgtccaactccacaaatatgggctgcttgcatggtcctcctgtgctggcaagggcatcggctggtactgcaggcttggccgctgcaaggggtgctggcgccgtcggcagggcccagctgttcctgctcccaagggacgaccatgactgttgcagccatagtggtggccacgctttgcaaggcagtgaatgtgaattaacgacatggtcagccacaaagcaggtctgcttggggattgccagattagcaaggtcaatttcattggtaacttcttgcagcccctcctctacatcgtcaatataatattttcagcaaaaatcaggaaaaatctggttgaaggatataatattttcagcaattgttgctaagcgcagtgatgtcttcaattggactacttgatcttttcttcacttctcgttttcttttggtaatggtagatttcagtattgcatgtcatggtactttagtgggagggaggaaagctctgcaagttatgaatcttagtatgtaggatggtatgagacgttagctaaaatcagtaatgttacagttcaagtagttttggattttatgccttagatcaaaatatgtcgctgccttctgaagcattttatttgatttgataaaatatgtcgctgccttctgaagcattttatttgatttgatgacaaacctattctgaaattttctttttcatttaatgactaacctgttctaatgctgtcttctaagacattttaatctgaacacacccacataatgcaagaacaggtcatttcggtcatttgtctaaatttataaatttgctttaacttcctttttcgttcacaaatttgttgctttgcaatcaatataaattcagacaaattttcaagctgttaatatatcaatgaccgctacatatcctatagcaactgattaaagcttctaataatggaaatatttactaaaatattttccttttctcagcattggaaattgttctggctgccacaccattaagtgcggtgagactgaatcttggagataaattaccgaagaactgaactctaattgtgagtgcctttgtactttctgttcttttaaccctggtggatcttgtttgtaactgggttttaaattcaatcacctttaacttgactcctgattgcgaaagaagtacatatgcagcgcaattccggtgaccaaggttcagattaactcatgtaaagcaagtctctaaaagtcatataaactgctctgatcgttttctttcttttttttaaaaaaaactcaggtttgcacttttggttgcatgtcaggctaattttgtccacagctctagtaattttgctcgtattgctcattggtctatgttttgtaatcctgtgagatttgtaaaacatagtctgaaatacaatgtcaagtaaatgatgctagccaaatttacacagttaaattttggctgtttcaataaatcttttacttgttaccggcatcattggcaaattgatggatgattacattataatatagattatttacagtagtggacagttcatctcgttatcgcacctacagaatttgtttgatataatgaaatgaacaaggatgtgaactacagttggtacactgattgctaagagaaatgcttgtaacaacatctatagtatttaggattctcagtaaatacctgaccacaacctgtactgactataattctcaacctgtggtggcctcaccgatctgttccacctggagaaatgcttgtaacaacatgtataatatttaggattctcagtaaatatctgaccacaacctgtactgactataattttcaacctgtggctgcctcgctgatctgttccacccggccctgaaggtgcaggtccgtcacctggtgcacttcgtcattggatcttcctcctcaactccgtcatgtgcagatccagcgcacggtgcgccaccgttgtgaatgtcaaaccggttcagcttgcgatcatccatcggcttcctcgacgtcgtccttgaaagcgaccctgtgcaggtttgccgaatgcactcccggtatcctctccctcctgtgccattatgtgcaatttttgtgctgcatttcgtgctgaatccgtgcaaagaaaaaggcttaatagttatcattcaattccattttttgaatggttttcagtttttcacatggattatgctctgctctctttcatttatgaaagatgcttatctcaatttacactaatctcttttactcggtgtatgcatatatttattctagcctgctagatgtatattgctagcgttcagaaagtatccacggaatgctattattcatctaaatataattgttcatatgtttttaggagctactggtttatctcatgaaatggcccgaataacacttgacgtgtaaaaagatcagaatgtgttataaattatcgttttttcatttcaccaaagtgtttttttggattacccacaaagagttattttttttatttcacatttctactatatgtatcataaagtttctcttttcttttctgtgcctaataggaaaacgttgattcgctgaaaacttcagcaaaggagcacttgaagaataagtgatcgctgtcttcgtcttgatgcaagcatatttcgtattttaccgtttgcaccatgttcttcacaagcaaatttgtcattgttggtagtcgatttttgaagataagccaggcacaagttgttgaactcagaggggggctgaattcttctacacaaattcccagattggacaaggggcagaagcagaagtattgatctgatcatatagagccttccatgtgagagcttgagtgcaaccagcagccggactgtattgtcgtatatcttctttgtcatcgaggtgcactgcattggtgacatcaggtcatgggaggtgagaaacaagttttggcgtgtgacactacgctggtcataggaaataaaacacaatatgagaagatcatacaacggcctgcttttccagtttgcagaaactgtgatggttttaggatttcttgttcttttgtgaagtttaagggttgaggagacagcaaggaagaggtagagtattttgagattggacttcatttaacgatttttttcctttcacctttgtctgttcctttatttaactttatttctttgcagtggcgagatgagactgtgtactagagatgcctactttgttgatatcttgagacagtgcaggtagatccaaatgctcacttcactaattcaatatatgtaaattatgcaaattactggcttatttaatttaagtttgattgctatgcatgtatatcctatagaaatccatttctttatattctattttaaggaacggtacactttctatagatattatttttaggaatcagaacaatatataatcattttatttgtttggtttgcattatcaaacggcaccatagccttagcatgggtattttattaggtagaaaagcaattctttcaaaacaaatatgacagttcttggtgaaactagcaggctgtaccttccaagagcaaaatacactaaaatgacagttcgttgagctttgcaaatcgtagttgtagccaacaacaaactttagtaaaatgcgcatttctaatctctgatatatagtttagttaaaaaaaaaactatctatgataatatgagctaatagcatttccaagacaaagtcaaatatttaagagtaatggaatctatttgctccgctctgcatttaattgaagtagagatttcttaatctggttggctatttgctcaggtgaaagcaaatatttgaatgatattatgtggaacatatggcaggttttggcacttgacaaacactttattgacccacgttgtttattaaatcccacacaagaagtaatgagagggcattataccattaacagatgctgtgcccattattccaagcgtaagttttattttatactggtgaaaatctggttttcattattttcttcgtaaatgccttgtgtgtaattcttgtacatattctccctttactgttattaatatatttgattcgtatgattctgtcctgtgttttattaaaaaaactaggatatcccctaaaaaatgctattagctgttacaatcttatcatgagcaagttatggtctgcacaaccagtaagtgattgctaatttcatgttaaaatgatggcatagagtagaatgaattgtacatttgtttacaagttaaaatttttgggttatttattcttgtatttgttaatacaatgatgtcctgttgccttgcttctataacatggcaataataggttgggatactcaatattgctaatggcaactatggctcagatttacctttaaaaaaataataggaaactactaaattaattttaatttatctttgtaatgaatgattttttgggattgtgtttttctgtccgtgtgtgtgttggggaggggggatgtgaatctgtgtctgtggttaggggcatgcgaatttggaaatttcaatacactgggaatgacaaattaatttgcattcttcatgtatgtggtatttctttcaagtacaatagtacattgatgatatatattcagatatttgcaaatttcttactgtaaaattccgttatcagcttatacctagcagaaccaatttattaaagggtaccaagataagttttttttttctagaaaggaagacaaatggaaaacctgctacaattaccaatttagaagctttaaaatacaaagggcaacaaacattctcctcctctctgcttgatacttttttggtattctaaactttgagtaacatcccttgattattttgaataacatttcttgatttgttaatcgatgcatttatatggattatacatgttcagtttgtaacctacaattgttttttgttcagaatttgatgttaagttttgtgtgttcgatgcttttgcttgtattttaaagctttaattctgcatttctgattggattttgagactctactttggtacttatgaagttccttttcattgaaatatgtttcttgcatggcaattaatttggtattgagtgttttttacctttgcccaacaaatactacttgtttcttactggatacttctatttggactaaacagattcagttctatatgcctacttttattaaagttgatgtttcttttttaatcatttgttgcttcacacttctatcagcattctaaagctttaatttggtatttctaatttattatccaaaaattacgatttgttttgtcattacttggtatcatccttgatacttttattgggattcagaaaatttagatttggtttttttaaatctggtactcagaaatatgatattctagttcacgcgtgacccttttaatttgtaattcgttttcccccaaaaaacactgaattggtttcttcctggacacttgtatttggattataaatgtttaccttattacttttttttttggctttttacaagctggtgcttccttttatccataaatacattctctagattttggactgaagctctatttgaactcttatgctttagcttggtacttttggttggatttttagagtttggtgttcctttgtcacgttcattttgcatcgatacttcaaatatcctttttggagtttccaattttttcgcttgtcacgtttcgtcttccttaattttgtttgaactttgatttctggtttatgataacaaaatgttcttgtgcattgaagacaaccgttttattttgttcttacgttaagtttgagcttaaaattgagttgtatagttgggtctccatgtttatcgaaaacaaataactttattgagagctggacccatgcattttgttgcaccttgaaggttttataaaaaatcatggtttccttgtatgaaatgtttctaattttctcccttgacgcttcattttccatcctttcatttaaaccttatgcttttcgttggatttctttattttcgaaagttctcttgtattaatgcttttgacatgctatttggactttaaaactttattttggtttctcgagtgatgttcgttttttcacccttgaatttcaacttggtactatctttttggaacttctctttggactttagaactttattttagttctgaaatctcaatttcttaagttttgtatgtatttatgtttactagttcgtgaaaagattgaacattgttttctagtttgtaaaaacaaaatattcttttgcattgaggactaattgatttattttgctcttataattgagttg

SEQ ID NO: 7159 - DNA, 784 bp, Oryza sativa
cttagctttgtaatattccccttggtgatggcagaagtggccaatgtgggaacaaagtcgtccatcaataacaatgaagacaccagtcggcggcgacgaaggcggtcgacggtgaaagcgaagatgcccactaacggcggcataataggccagccgtgtaagcggaaacaccagtcgacggcaacgaaggtgagccaacggtgaagatgtagacatccaacaacggcggcataataggccagccgtgtaggcggaggcaccactcggcggcgacggaggcaggccggcggtgaagtcgtagacgcccaacagcggcggcataataggccagccgtgtaggcggaggcaccactcggcggcgacggaggcaggccggcggtgaagtcgtagacgcccaacagcggcggcataataggccagccgtgtaggcggaggcaccactcggcggcgacggaggcaggccggcggtgaagtcgtagacgcccaacagcggcggcataataggccagccgtgtaggcggaggcaccaatcggcggcgacggaggcaggccggcggtgaagtcgtagacgcccaacagcggcggcataataggccagccgtgtaggcggaggcaccactcggcggcgacggaggcaggccggcggtgaagtcgtagacgcccaacagcggcggcataataggccagccgtgtaggcggaggcaccactcggcggcgacggaggcaggccggcggtgaagtcgtaaacgcccaacagcggcggcataataggccagccgtgtag

SEQ ID NO: 7160 - DNA, 2631 bp, Oryza sativa
aaaaatctttttttattttttcattttggaaattattattttttaattcaaatcttaattaattatcatttggtattctggatggattgttatttcaatattctgaatttcagttatttctaaattgcatttctacttgaactcttattttttttctctgattgatgttagaatttctagcctccacaatgaacatggtactttgaattctttcaaaaccattttaataatataataaatttaatgagatcaaggatgtgcctgtgcctttggttttcctctcttttaagcgtgtgttagaggtacattcgagatgtgtgagcatggtgttgtatacttgtgtgtgcatctgccatataattgaaaaaaaaaatcacttgtagtactttacactcacactatctatatcaatatatgagtttatatggtcatctcttatatattgaaaaagagtttacatcattattgcacacgtagccatcagcttgcgccagataaataaatccctgatatataacacttaatcatttcagccgcaactcgcagcttaatctcagttaaataatcacaacggcaaaatgtgtcatgatgccggtgcatatgccctacaaaaagaatcaaagagttgggctttcggtttttaggagggggatggctagctacatgcatatttacattctgctacagcctttgtgatagctgatcgatggagagatgcatgtgacctatctttggttgcttacaacaacttgagatgttacctttctaattagctaatcattagcagttaatgatgcgcatcttgattaacttcttgatagaccactttggcctatatcagggtcctcaaaaaccatactcctgcacagaattaattgcaaattgctggaccactattggtcgttcccatccacaagaacctggctcaccgtacatacatttttccctcttagaagaaagacggaaccacataaaaaaagacatgactacacagctagtggtagctggttctatatctatgagagactctatccacctatatttcaaataaaattttctcttaaactactcatccgatctacgatccgattacaccgttgtgttcgtaataattaaatctttataacaagatctcacatgattatattttgatgaaaaatcataaattacttttatgatatgtctaaattacttttagatttcactaagttacttcttagacatataaaagtaaattcagcaaagcctaaaggtaatttacatatattatagaagtaacttagaacaaaagaaagtaactttaatgcatgcatttttcattggacatgactacacacctagtcgtagctggtttatactccatctagtgtctcctttcaatttgaaaaatgcaatagtatgtatcttatgtgtgttgaagttatcattgaacttacttttaaaatttgttaaacctatgtgtgttgatctgtactgattaaataaagttttctatataaattcatattttatccctacaatgaatttacttctaatgtcgtgacaaagttacttccgttttattttaatttacttttataatatatataaattacttttagactttattaaatttacttttatatgtctaagaagtaatttagtcaaatctaaaagtaacttttatatatatatatatatatatatatatatatatatatatgataaaagtaacttacgtatataataaaaataatttacaaatataaatattttttcatcgtaatataatcatgtaagattttgttgtgaagatttaattgtaacgaacacaatggtgtaattggattatagatcggataagtaatttgagagaaaattttatttgaagagaaaaaaggcatacatgtctatctcagtccttcctactacgtgggtgtgtcagcctctctgcagtcaaatactagtggagaaagcgataacgtaagccgaaaataaatagataatgagatcggacggtcggaggtgcgtcgcacgattagactaaaacgagagcgcgcactgtttagattttacgtaacaaaaagaggttaaggctaaactcaagatctcgctagttgctagccgtccatttcgtaacactccaaccgaaagctttagctgatctgattagcagtagtgtcgaaacatgatttcggcaataataaaagggggtagcgtacgagacctaaaagtggatggatgcggagacaaaggatttagacaggttcaggccctctcaatgagaggtaataccctactcctgtttggggatttgaatccgccgagtgtgtattgatctgacgatcaggttgtctcatcataccccctagagggcctcctgcccaccttatataggatggggggcaggattacaagatagaaaccttaaccaatacggtatcggtttcctaaatctactttacaatattatcaaaccaggactttaggccgttccgtaatatacaaggaaacgtaatacccgagtcatgatctattacatattccatagatataagttatcccctatgactagtcggataaccatgccgtatgggtatggggtacccataatctccacagtagcccctgagaccttcacagtcggaaaga

SEQ ID NO: 7161 - DNA, 7584 bp, Oryza sativa
tgaaaattcacacagcaaaatagctataaagaagcttgtatgttgtgaataaagaaatttccaaagtattgggcatacgccatgcgcacactgctttaacagatgtgcttaagtccctagaagacacatggttccaccacacctggaaatatatggcatatgtggtataaaatccgagtaaataaactcataaaggatttaccaaccgcctgaaaaatgaccacaatatataatcagcctaagccataatattggtcaataaaaatgcacacttacgtggcaaaaagcaatgatattgtatccaatcaattgcttaaaaacccaaacagcaccatgactatataaaaaagccagcggggcagctatataaagctttactgtttgacaccttttaagatgcattgtaccaactcctaaaaagttgagtaactgcggtataaaaggattttaaggtattgggcacttgatcacgcgcactttggcctaagcaaaaagtgcctaagtccctaaaagaacgtgacaggccacacctgaaaatatgggctgcagacatattaggcctaggccaaaaaatatgccttcgacaccctttaaaggatgacgcatgtaacatggtcccgaataacaaatcttttggtaatataaaccaagtgtagttaatatgaatagcttctgatctgaatgattatcccttatgggatactccaaaataggtgtaacaattgaatcccgactggcgcaagtattcggttgatagcccttacggggaataataattggtccagtctttgagcatagaaaatagactcatgactatgaatccatgtggaatgtatccggaacaagtccaaattggaaatataatcctcacgcttgagttgataagcccctgagcatatagcttgtccttctgtcgtagtcacaatcgtccattgatggtagctgacgcagttggcatatagacaagacgaccaatatagagataatattgcccaccagaggtggcaacaatactggtggtagtgaagatagtgataccaatctaaagtaatgaagtcgcatagccatggaggcgaagaaaccagtcggcggcagacagataactaacaatgaagatgaaggaacccagcgataaaattgtgtagccatggcagcaaaataatcagtcggtgacagacgaggtagatcaaaggtgatgacaaaatccaccaatcatgaagatgaagaaaatagttgacgacgacaaacgcaaccgacatgatgaagaagacgatgtcggtgatccagccaatagcagtgtagcaaccaatgataatgacaaagacgctcatcagcatttgcatagtagtcaaccgtgaaggtgaaataataagtcggcgaaaacataatcatccattagcaacagcggagatgtcagggccgatgaagcagaggtgctggtgatgatgtcagtgacaataatccatcaaattaatgttatggctgtcgtagatgcttcacttgaaggagagttgatgaagtagaatgtctgttccgaagcaaagatgaagataatgactcctggagttgactcattggcttatataaaatttgtcaaattttgagccttatatttgtgtagcccccgactctttggttagttgggaaacaactgaacatagagtcgagaattatagcttcttgtcgtcgagtagtcattgcttgattgaagatatgtgttgaagatgtccaagtagaaatcctgaatattggagagccacttgttgtagtaaaataacacggcatcgcatgccgagatgtcgagattcacaacaacgtcatggttggtgatgtagcaaaacttgtgaagtagcagcaatagagtttgctggttccgaagataataaagatgaagtcgctccaccatgatgacaaagttgtgttgccgtgatgaagtgaacacgagtcgtcggcaacagaagcaaactggtagtgaagacgcgcagttgtgaaaataaaagcactagtcggcgacggaagacgatgatgttcatcagtagtggtaggctgtataaaccagatgtagagacgagggcactagttagcagcagacgagacgaccggcgatgaagatggtaaggccaatcaacactggcagaatcatgcagccatggaagtgaagaaaccagtcggcagtcatggcaaacgtaggcagcttgtgttgaagatactgatgcctattagtagtgacagcgatgtagccagccgtgaagaagatagcatcagttggcgttataacaggccatccgtgcaagcggtgacaccagtcagcggcggatgcggcggccggccggtgaagacgtagacgcccaacaacggcagcataataggccagccgtgcaggcggaagcaccagtcggcggcggacgaggcggccggtcggtgaagacgtagacgcccaacaacggcggcataaaggccagccgtgcaggcggaaacaccagtcggcggcggcgaaggcaagccggtcggtgaagacgtagacgcccaacaacggcggcataaaagccagccgtgcaggcgaggacatcggtcggcggcgacgaaggcaagccggtcggtgaagacgtaggcgcccaacaacggcggcataataggccagccgcgcaggcgaggacaccagtcggcggcgacgaaggcaagccggtcggtgaagacgtagacgcccaactacggcggcataaaggccagccgtgcaagcggaaacaccagtcggcggcggcgaaggcaagccggtcggtgaagacgtagacgcccaacaacggcggcataataggccagccgtgcaggcggaaacaccagtcggcggcggtcgaggcgagccggtggtgatgttctgactgatccattcctggagcgtaagagataagcttaaagccatgaatcccttttatgcatatctggatttggatcctgcagaacaaacatataggatgagtagtatctgatataaatataatactcgagaaaaaatcaagtattttaaaatatttataaatatgtatttctcctcttgtcaattttgatttccccgagcagatgactcattacgtttaaacactctgcccgactagtcatagccaccaagcactgggagtcggcctaagcacttcccaaacatgcatatgagtgacatgagttcgtcattaatggaacaaagtttcacggatcggagtttactactcgggtacttttgcaattattaagagcagaaaataaattatctttctctatgcttttgatttattccgaataatacttagcaccttgcgttactcggtccatccaacgagcccccgggtgctaggaatcggcccaaaggcaaccatccattggcaaaccaaacggaaagcataggaagatagaactccataactcgataggtatttttgtactcagattatgtcgcaagcaatcaagataaatattataaaaaatatgatataacatctgtagcccccgactcactactcaatggaagaccaattggtgtagtgaggcagaggaaaaggaaaaatatcatataaagaataaaataaatgatgacttagctttgtaatattccccttggtgatggcagaagtggccaatgtgggaacaaagtcgtccatcaataacaatgaagacaccagtcggcggcgacgaaggcggtcgacggtgaaagcgaagatgcccactaacggcggcataataggccagccgtgtaagcggaaacaccagtcgacggcaacgaaggtgagccaacggtgaagatgtagacatccaacaacggcggcataataggccagccgtgtaggcggaggcaccactcggcggcgacggaggcaggccggcggtgaagtcgtagacgcccaacagcggcggcataataggccagccgtgtaggcggaggcaccactcggcggcgacggaggcaggccggcggtgaagtcgtagacgcccaacagcggcggcataataggccagccgtgtaggcggaggcaccactcggcggcgacggaggcaggccggcggtgaagtcgtagacacccaacagcggcggcataataggccagccgtgtaggcggaggcaccactcggcggcgacggaggcaggccggcggtgaagtcgtagacgcccaacagcggcggcataataggccagccgtgtaggcggaggcaccactcggcggcgacggaggcaggccggcggtgaagtcgtagacgcccaacagcggcggcctgttggtgaagacatagacgcccatgtacggtggtgtgaccaaccaaccgtataggcgaaaaccaatgaacggcagatgaggcggcgttaaggcgagttgcccattagtcgcgctagagtcggccggatcgatctcttgcaatgaatccatcgcatatgcaaaaagaaagcaaacatatagatctctgttagtgaacaggaaaatatagatgcttatcatatactagaaaacatctatttaatgtatagcatgataaaaaattttaatccacgcgtgttgattggatcaacacatcgggcatgctttccagggagctgtaatttcctggcctgagctttcctgtgcatggagtaggtatgcatggcgagagcacatatatatccatattaaatcacatgcacgtagcagctggtcaaagcctggaagcatcagcatgtcgcatggttcccgtgaagacgtggccggcttacgacttggactcatgatgagtagacggagcgctttgtcttgcacggcagcagcttgttaggtagttagcgtccatcagagcaactcagccgccagtagtatatgcggacgtgcaaaagaagaattagaaaaacaatatcaatctgtgattagaaactaatctaacagagattaaattaaaaggatgaacccagatcatgcatgtcgatcggtcgacatgtgcatgtggattactcctggtggctggcgatctcgtgcgcgagccgtgagcactgccgttccacgttgctcccatgtcgggttacaccgccaccggcatctgcacacggtgcatggaggaacacgaggtattgggccgacacaccgggatgacagccattggtcttgatctcagtcggcatgcaaaaacaagagaaagtaataggagattaatctgtagctagaaatcaatttaactagtgaaacgataaaattatccaatgaagttggagattgaatcgatgaaatcgctgagattaatcccttcggctgaattgaatccaagacgaaaaagacatgcttcacgaatccggcgatgccgaagattggttccatcacacttgtcgacgaggaactcgacgcacccctacctggcgccccaactgtcgaaacatgatttcggcaataataaaagggggtagcgtacgagacctaaaagtggatggatgcggagacaaaggatttagacaggttcaggccctctcaatgagaggtaataccctactcctgtttggggatttgaatccgccgagtgtgtattgatctgacgatcaggttgtctcatcataccccctagagggcctcctgcccaccttatataggatggggggcaggattacaagatagaaaccttaaccaatacggtatcggtttcctaaatctactttacaatattatcaaaccaggactttaggccgttccgtaatatacaaggaaacgtaatacccgagtcatgatctattacatattccatagatataagttatcccctatgactagtcggataaccatgccgtatgggtatggggtacccataatctccacaagtagcacgaatgtgaaggacagtaattcgctccagttccatatgtattaatttcctgtcgttttaaacattaccttatttactcactagtgattatttaaggtgtctatttactaaggccatttactaaggccattcccaacccaaacactagacatagttttcataaactccacatcatcaagaaactagtactagacactacttttctaatgtgaacaccactatccatacttaaatttaatgctacttatctcacatgatattttggatgttgtgtagaaactatatctcatgcaagacatggtttccttctctttccttatttattcacttgccacattatttttcatcctaagtggcagtctatttaatgctatgaacactatcctagtcattgagttgtgaatggcctaagtagtagtctctccgtattttaatgtacgatgctgttgactttttaccaatatttaaccattcatttgtttcaaaaaatttatgtaattattatttattttattgtgacttgatttattattaaatgttatttaagcatgacataaatatttttatatttgcataaaatttttaaataagaagaatggtcaaatgttggtaaaaaaattaacgacgtcatacattaaaatacggagggagtacattttaagcataggagagatgtcgttggagaaacaacaacttttcattaactatataagagtaaactcatccaaaatgtttatactccctcaattccaaaatataaggtacaaatactactttttaaagttgtttcgtaatataagacgtgcatgcatgcatataattaattagcatgttctctcctctaaattattattattttaaattgtacactcacaagatttttaattctattggttgcatgtattgtactagttagggtggttcatgacaatgatgtgatattaattatttcttggttttggattatgggtggttatgccttatattatactcctttcatctacttttgatagccatatttcatcttggcacaatgacgaagaataagtaattctacttatcatccatttaaacatgctactagtttttttagaattacacagtacaacgcaggcgctcataacacacgcacactcacccctatgaacgcacgcacgcaaaccttacccctatgagtatattcgaagactgaggcagcaaatcctgaagattgacgaagtcaccgcaggcgcctcgctgtcgacgggtatgtcacctaccactgaaagcacaatgccgttaaatcttgaaaaattcgctcctatggggagtctaacccaggacataaggtgctattgatgctcttgtaaccactaggttacaagcctttttcgctaaacatgctactagttattcctcgtaaacaaacgattcattaatatttatatttctcgatgcccatgtagccaatcttgtgtagaagaatgaagagtcacacattaaatccaataaagtcattaagaggatatgtggccggattgaaatatatctattaaaagtaaattatttagttttagaaatacgtttatcaaaaatagatggagggagtattaatctctccaactacagagcattttcattattcatcctagtaaaatgcttcaacgacaaaggaaattaatataggactggagggagggagtacaatacgaactaaaccaaattaagctaaaccccatttaacttcttgatggaacaagctaaccaaagcacagtcacatcccc

SEQ ID NO: 7162 - DNA, 32027 bp, Oryza sativa
agaaagatagcattctatcggagctcctaactctccaaaaggaagtcgtatacttgtcatcatcttctttgatgaaagagaaggagtctatccgaaaggaacttgacagaacaaaaacaaagttaaaagagaccgagaacaaacttaaaaattccattcaagagaagataaaacttgaggtttgtttgttgaaattagtattattaatatgcgtggtacttcaagtttgttaattattttatatgtgtaaacaagaaaaccctacattattcgctaataaccagttctttttactgatgaactatcaatatgtatttcccctagagtgaaaaggctgaggcccagagagaaataaagaagctacagagccaaaggactcttcttgaacgtgatttacggaaacgtgattcgtttactgttgacaaaagacatgaacagagtgtgaagtcgaaggagcttgccggtatctatgatcaagctgtccagattcaggttacaatcatcccttgtattacttttcagtcaatttgttgtgtaggaaactgatctaattgactaattcagggtactggcataatattgttacaacttgcaataataactctaataaatcacaacagtcactcgacaataatattggccaatatgctcccaatcacagaccataccattatgcgattccactgttccagaatatgtgttttagactgtggtggtttgaagctaccaagtgctaatgtggattcaatatttctagtacagggctagtggttcataaaatatgccatctctctggtttctggtttatgatggtttatcacttcgttggtctcacaacttggcaacctgcaatcatggaaaaaaatctatttattgttccgcatagcttttattgcatgttttataacccaaatctcttttgttgacatccagaatgttcaccatttcagtattgatgtggacttatagtcaacaaagtacaaacactcaagagcatccattttttttgtctatttcagtattacatatagtaaatttgaaacagaaggtcatttcctgatatcagttagggaacagtgacaaagatgccatgttgagtgaggaagaagaaatttcagtcatactgtctattcacatatcatcccagcataacactagagagttttacatctgtaggatgacctaactagctatgctatgcatgtagtgatggctcttttatccttttcaggaggactacggaaagcttgagatgcatgcttttgatatggaggctgaaattgcttcgttacaagaagctttagttactaccattgcagaaaaggaagaagcattatctagagtggagcttctcacatcagcagtggaagatcttgaaagtaggttgaattcagcagaatcagagactagttccttgcttgaggagactgctgtcttggtatacttgatttgtcttatgcatattttggaagatttgtttcccatctatttgtctaatcctaaatgttttgacaccatgaaattttgttgtgtttctctttgatgcagactaggaagttagatgcatctgaatctatctctaaaaaacttgaggcttctattagttctttatcaagggaaaaagaagacatgggaattgtatagctctgtgcttatgtcaaattgattgatgttagctgaaagttgaaacttattgcacttctgtctgctgtaaaatacaggaacttactgatgttcttctggaaatggagtctgaaagatcaacgtggactgccaaggagaaagcttatcttgaagccaaacaaaaactgaatatctgcaataagaacaattgcaaattatcagaagatttgattaaggtaacaacaatagagttcccattgatcattgcacatctcccgtgtgcccagtccattttatgtatgcagtcactagtcatgctatgtggttttatcaacaactcaatattgtttagttctggatcatgctatatcaatttgtgtcaatactgtttagatttggatcatgctatgaatatcaatgtgtcatatgtactgctgcacttacctgttgtggttgtttgctatgatattttttatttaaatatttattgcacatttcttttcttgcctagcaacattagtggggaagaaagcatgtttggtttccttgtttggttcttttctggacaagggtttccttcttttaagggagacaaaatttagctcgcctctttagcatgaatttgctttcctaccagcaacttagaaaggttagttgcgtcttgttaaagaactagacatgccctagttgccttgtattgagttgatttacataatgtagttcttctaatgttgtcttgccctagacgactagtttcattttcctaatgtttttctttttttgttcaaagtaatagtcaagcaacctccacattcaatgttttttcaccaatattttgaagaactttggtatctctgttactgatattgcaatatactgctaggtgagacaagaattggcgtgttgcagagaacagtacagtattcttgaggctaaaatgattttctccaagaatgacacaaatgaggagaaatactggttagtcttgtagtaattccatcaatctgacatattgtgcttcagtgttgtatgatcgggacaacaagtaatacaacaaccatgtaggagcatgccttaagctacttttaatatttcttttgcaatactttctagtcctgagcctgaagtttaaaatattcttttaaaggagttactctgaaaatatacaaaatgaacaaactggagtggttgtgccttatctaacaagcacatatcttcgatgtgctaaaaggacagttataataaacataaaaatgtttgacggggtgaaccaatagctgtttgtgagcaataggaacagataggtgaaattgtcctagtaggaaataaatacatcacggcctctcttggcgacccgggaagcgaagctcgtctccccagcatgccttgccggccttgccgccacctgcagtgatggtcggcggcggcagcgcctccctccttcctcccatttccttcctctttcctttctccttcttcctctctctttttcccttcctccttttctctagatctgaggtgacccgggggacgtcgttcctgagcttggccctccccacgtccggcaccggtggcctcccatcccggaccgcggtggcggtgaaggctgcacggggcacggcatgatctggccatgctaggtccagatccagcgcatctctggcgggttccgcgcgtctccctggcacgagaggctggagttgcggcggcggccgacggcggtggtgaaggcagcaagggggacggttggatctggcccctccaggtccagatttgggtgtgtcctagtcggggttgggcgaggccggacccctcgtggcggcggcgtcgacgggtgggtggcctgtgtggcgccgatgagctccgcagctcagtggagctccgccggtccgggtgaggtggcagagcaggttgtcaacagcgcttgtccggttgttgtgcaggtgttgcggtgtgcaggtggcatttggtggcatttggtggcttccgttgcggacactatgtttggatgggactccgaggtgaaagccttgctcggcttgccgatgctagcaacggcgacgccatcgggcatcgttcaccttgttgaaggcgttgctattggagccctcgttcaactccacatcaagggatttctccggttaaaaccttagattcgttaggatcaggcgatatcgccgttctgtcggtgttttcttcttgaaggcttcgttttatgagtttttcccttgttggactgctgttattaggttcttgggttcagtatgtcaatgccggggttttcgctggttttccataaattaaccgtgccgttgtaaggttttagggtccggttttccttataaactggatcaactctcttcttctatagtgtaatgtaggagctcccttccgttacctcgaaaaaagaaaacaaatacatcgccatctgttgtttaatatgccgtaggctcaaatgttcggctagctgatttactactgacactagaaagtttgtgcagcagggagacttttgaagaatcagaacgacttctgaagaaagaaagaaacattgacaccggtgtgaatgaaaatgtaagtcttcagtctattccttttgccctccattgtgaaaagtcttcttataacatgagtaaatcaaatggaagaattttcaccctaaatcatatagtcacaagtcatgaccaattactatacatgcgtgagaaaccatcacgtgggaagctacaatgtttcgaactttcgatgttggacattctttgttttcctagtgaaaaaacaattgagcagtaacttatcttgcagtttttctctcattttgttttgagcaggaacttcaccaacaactattgtcgattacagaagaacgtgacaagttactttctgagattaaatatatgaattcagtcatcaatgaatcagaggttttaaaagagaatcatagtaaaaaggcatgttaggtttattgttgacctgctgcacttaatctctgtgagtgagtggttttctcatgtgctttttgattatttgtgcagttaatacaggccaaagctactatagatgagttgagttctaggatatctatcgtggaagccaaaatgaaaaatgtaagcattaatgtacttgtcatttactgttaatggaagtatattattactgtagctgctgtttaaaatatttcatcttcgaatgcagagttactggttaccattatcaaacttaggaatagatgaatgttttgtgagtagggttccatgtgcagcctctcataagagcatgtgcatttgttatcaacaaatatttctacctgatttcattcatttttttagacaaggaatgtcacaaagttttccataacatgggggagtacgacttcaaaaccaaaactgtataaaataaaaagtccaggagtttcaattgaactccagaacagatgccaaaattgcttctgttgcacagtcgaagtattttttttcaaattaccaatggaccaccacaggaactacaatttttttagataatggattttcattaatccggcctctgtattcatgaaggatatacacagccaaaacatacacgagttcttaaactctaaacctcgcacaagggaaaacacaaaagacacaaaaaaagaaaagctactagaagacagcttcaatcttcaacgagaacataatctttctgtcacagcgtgagagggagaaggggagaactggaactggtccttgctgcctttcgccaaaccatctccgcctctgtgtattatgaacgtctataaccaaagtctgtttccgagcttcagcatggaactacttgtctagtaatctaatttaactttcctttctatggttgcttggaattgcaaaccccagttgaaacttgctgtgccccttttaggctgctggttctaagccttgacctaaacatttgcaaaattgactgcatatgttctgttgctattttgacggactattgtaatttatgttcgtcctgcattttgaaaacatggaagcttgacataatacaataaaagtttgccaaataactggaaaacaccagattcaatgaaccgatgggatctagtttattgttgggaagcctgggataagggtggtctgccagcaaagcttgtggatgcatcaggcatgtagtagataagcacagatacatacagtataactcaatcagtgtactgcaaactataaatcccaagggccaaggcatcctcaagaacctggatagccataatttctatattaagagaaaatgttaggcacttaaaaggcactgcatttcctgaagaaataactactgttgagcagtgactctatcattcctgctttgttaattatccaagtgatagctttgcatagaggaaaatcattttccaatttgaatgtatcttatttcagttttccatgtcatttaattttgaaaagcaattcaacgatggccctagttgttcctctttagagaacaagccaccttactaattactcactgacaacttgcacttttctgtatccagtaattccgtaacatgctttcttttgcaggatgcttcggcttataacaaagagaacacaaagcttaggatgcagattcggtggatgcaaccagaacttgatgcacaccgtggaaggcttaaagaagcaataaatgagatgaagctgatggacacaaagtatctggaagcatccaccaagctgaagaaggacctttctttctactgtcgtgaggttctgaggttgaaagaacagcttaaagaatcacaagttaaagcatcttgaccctgaaatctttctgctgagtaattcttgtgtggagaaactcgtggtagtactaaccatatgacaaacaattggtattgcctcaatgccacttcatacaacttttgtatactgctagtgtatttgtttcaggtaggtgtatagtgctacaattccctgtagatcattacttcctaatgcacctgactcaaattataaagcagtggaccgtctagaacttttaacagcctttctcgcactgcgagtctgtgatatagggtgagttattcatattgtgacatatagatactggtttttcgtttggttctggtctgtagcaagtatatacctactacagtacttacgagtatagtggtgaagtgtggacgcatgattgattgcgcatgatgccggtgatgcagagcagtgtaagctgcttgtgccgctcgccgtctccatctgaaacgtggtctcgtcgctctcgcgggtgcaggcgtgcagccggtgccggagatgacgcgacaccaatgaaaatcacgtgagaagagaagctcatcggatcggaacatctagtgacgacgccaagcgatggcccagaaacacacggcctgccgacgccggtgcaatcgggacgggccgtggcttttgtgctcggacgttgggcctcccctgaggggacattggccatgttgggccgaattgacactagattttcagcctaggcggcgggaggagtcgcagcgcagggctgagttcgaagtagattgacgctgaacctctgattcttcttttgcacattttttttttctcgggaaaaagtaattcgaagctgatagctcgcggcggcggcggcggcggcttcgcgggcgatggcctgggaaggaggcagcggcggctcgggaggaggaggagcgcgcgacatggacgcgctgcagggcgtgcgctctatcgtgctgaagccctcggagtccctcgacgaggggcggttcacgaggatcgccggcgccgacttcaacgacgccggactcgggctctccgggatgctcgcgtcgctcgccaccactggattccaggcctctaacctcggcgacgccgttgacgtcgtcaaccagatggtaacgttactactcccttgctgccttttttagtacaattcatgatagagatgaggcagattgggggatactgtagcttgaaattgttgtggttctggatctgtggagcttctgatgaagtgcattttggactagatagggcgtattgctgtgttgttggtgtactcggagagtaggaggtgaagccatagctatgcctgctgtaaaataaaatgggaaccttgcagctattgttcatcctaaagctaacactctactgttggttttctcgataattcctgtgagacgaaaccgttattagtagattggaatggagtagatgtataaaaaaaaatgctacacactttttttatttacatcgtgaatttattggacaaattcaaactgtatatatttgagttttctcttgtataacctggaggtaatccagatgaaaaaaaaatatctctgttataatcttacatgtgtgttccttaatttttttccccatcttcatgcttgtactgatttttctacatgcctaagaggttactaattcctatatttcctaaccctttcttttctgtacttcaatacattgaagttagaatggaggctgtcccatgagaagccacgtgaggactgtgatgaacctgagcttgaccctacatatagagaatctgtgaagtgcaaaatattcctgggattcacctcaaaccttgtctcttctggcattcgggatgttgtccgttttctagttcagcatcacatggtgaatactccacttttttaatttccttttattaactggtttgttagacacgttttggcatgcttttggtaacatactagcattattaaaaggattgagatctcatccctatgatgtagctaattccctatggaaaaaaaaatgtgttatttaggttgatgttattgttacgactgctggtggtatagaggaggatctcatcaaatgtcttgctcctacttacagaggggatttttctttacctggaacgctgctgcggtcaaagggattgaatcggattggaaatctattggttcctaatgataactactgcaagtttgagaactggatcatgccaatttttttaccagatgttacaagagcaatccagggaggtactataacatttttcttctggctgaagcccagtagcttgcaacaaggtgtttgattctatatgacgcacatgtgcttatggctcattagctataaagtggaggcatcatgtagggggcagtaatatgaaaaggcctaacttatagtgcttagaaatccactaatgtaatggtacagaaaggttgtcattatttgaaccagtcttcattagctccgtttcaagttggcctctgtgaatttacgtagtaatggtacatgaataaatccataatccaaatagcactgaaatatgaggttaccaggtatagtttctgtacaactggtcacttgccaagaatcaataaggaaaaggttccacactggtagatatgttttgtaagctttactgctatgcccttgatgtccaactattcaattatcagatatgcgtctttctttcagaagcaactcttccaactacttttgtgcttctctctcttctgttcatgaagcgcaatcagttttacttacctgcagaatgtttggacaccatcgaaggtcattggccgtcttggcaaagaaataaacgatgaaagttcctacctttattgggcatataaggtaacatatttattaactcacctgcatatccttgcaaagtgcaagtgggagaacaaaccatcaatcctgttcataaagcccctgcatctttatcttgagtacactacacaatgatatactaggtagtcttgttgaattttttttcagagttcccttaaaaacaaacaaataaactatattattatttgagttatttttgtatgtattaatgttttctaaatgtggaaactcctcataatagtgccatatgtacatcttttcccctaggaactagtgtgccaccatccttaaagttgtgcttactgatgttaatctaatgtacttggtgtccatatttgaagctttattttgacttttagagttatagttgagtggatttgatcaagatacttgttcttttcctcttgatgttacaatagcatggtattttcatgttccttggtttaaaattcatatggccaagtgcaatgttatgatctgtaactcaaagactgaaaacgagacagtactgactctccaaatcttgatcagaacaatattcctgtatactgcccagcattgactgatggatcacttggagacatgctattctgtcatgcagttcgcaatcctggcctaattattgacattgtacaaggcaagttgtgtgcttggttttcttgcttttgctatcacttttgtttttctcatattatgcttgaaaaacttggcagatataagattgatgaatggggaagccattcatgcaaccccaaggaagaccgggattatagttcttggtggaggtctaccgaagcatcatatatgcaacgccaatatgtttcgcaatggtgcagattttgcagtctatatcaacacagctcaagaatttgatggcagtgattctggagcacagcctgatgaagcagtttcatggggaaagataaagggttcagccaaacctgtcaaggtatgtttctgtaacttgaacaattttcacatgtctttttaatgttttacatacatctaggcagtcaaaagtgtctatcaaagatcatgctgcacgtaaaaatgcctttgttgatttcacctgagatgaagtatgtcaatgatcttggactagattctaatcctaaccatcataacttacctttatttatgtgtatagcttttgctctgtgtaataccacatgtgatgcattaaagccttgaagcatgcagccatttacttttgtttaatgatttatgcgatcatggttgacatgattttgttttgcctgctatagaagatatatgtaagaaattatgacacggcatgatctatgtaagaaattgtgacacgaaaagatcatatgaatgcacttttatttaattcaatacactacgactggttattactgtaaagccgtatcttaataccgcggctcttggaaatgcaggtgcactgtgatgctacgatcgctttcccgttactcgtggctgcaacattcgcacgcaagctgcatgatacgaaacaaacctactaaattttctgggtgctgtgggctaaatcggtccttgtcgaactcctcacgttgggtgttagactgcacgctttttgcaaatgatgcagtggcaaggtcttgttggtaccaactcacgaacagtaccgcccttcccaatcatatttgttccttgtacacttcatgttaaacatcaggtagcagctttgtttttgccccctttggcaattttgcgtgctgcagtggaggcttacattgtacaataactgcaaattgtgaccgatcgggtgattttgagttctggttagtgcgatacaataagtgatattttctctattgtttgcaagtgcatttgagttagttatcggtttgcgcctagatctctcttcctcttcctctatctgggacggaaattgcaatgcatatgacccaattgtctaacccacgtacaactgaatttgatcaatagttgtaaacggttgcagtgtgtataaacatgctctcttttggttgatctatgatagcatgtttttagttgtacaactcatatgggcctctggtttctggatatccccagttggccatagtgctgtactgctgtccaaataaggcaggccaaatcgttgccggcccaggcacggctgtagcaggctggctaatgggccgggccgtgtctgggcggccacaacggcagggcgttccaaaacaagcatggcaccggcacgactcggcactgtctcgtaaaacaaacgagggtacaactaagtacagaatctttggaactggagctagctagcacgcatgggcccctaatgatcaagcgacagtgacccaaggaagcagtagcctccattccaaagcctgtgcaaggcaacatcacaaagctgatcacctccacaatgatcggcgacggcatgcagccgcagggcaagtaaccgagaaaatttgtcggtcgtcgattccctcacgcgagcgtgaaaatggatggccatgattcgcgcaatcacgcccgctaagctgatcccgtctccaagatactctcgaaagacagattttctcgagtgaaataatacgcaatcatagacaccaagacatccccacgctagctaactatagcaggttgtcccgtgtccaccctagtaccccgtctcaaattatagcgcagccccgttttaacaaaaatcaaactcggtagctattaactaataattatattaattatatctacactaagtatgttgtatcactagattaatactttaaagtactttcaaattactttcatgtgatactaattttatatttgttaaaatactagttaaagtatgttattaaaaaccgtgtaaaaaaatatagagcttataattgggggacagagtgagtacgttattactgtcccacactgggagatcggtctcatcttagccgtccgtggccgatgaacggtctggatttcatgccgggagcaacagaaatttaaggtaattgaatttttagataatggaatatagtatcccggcctaatttaaggtaatcgatgatgatgaataataggttagcgtgagagtagagatttcatgggagaggggaagtgtgtgtggtgtggccgcatgattgctcgtgatgccggcgatgcaacgcactgcggggctgcagctagcctcctcctcgtctccatctgaaacaaactcatcatcaggagcatatcatcaatccggtggagacgatgatcatgactgacgagtggccgcgcgtcgttcgagctgagctcgccgtgaccggccggcggggcccccatgtggccgccgtggtttcgctttactccggcaatcattgggcgagccgagagatcgatgatgcccctcttctcacgcttttttttggcttgggttctttatcgtgttccggttcccgagaggcagaaacggccagggacgacgatgaccacgagcagtgctgtagcttcgttcgagtggctggcgccaggtcggtgtccgtgatccgtctgtctcagctagcttctcgtccactgttccacgcaaaaagctccccaaacagcatgcgtgagatgcgtacagtggcacgtacagagtaccactactagatacggatgtacagagagaaccagcaaacgattgatcgacaaatagatcacacatagatcgagcagagagcacgggtgaaaaaacacaacggctgcacagccggttggctaccagggtttacgattctgagttgatcttccgtttcgtgctatggagtaacgacggttttcgtgaaatccgtcggaaagccggtagatttcgaataaactagctgggtggtccgcgcaattgcgcggctaacacccatataaaattatatatttttagtatgattctatttaaaatttattaaatagttatctcgttgtcttaagattttgaaagaccaaaccttatcatcctcgtgtttctaatttcgtagtttttaaaagacacatcagttgctaccccttacttctgttatattattttttattagcttgctcgatctaccattgtttctatttattctccttagaacctttatctaaaaacttatattttttagagtttattgtcctgttgggcttcttttttataatttttagaagtctcgtcaaatgctgctattatactcctctacaaccgtccactgtatcttccctttactgtcattgttattttaaaaatcgaacataattattgtttagcttcatttttttactttctagaagttttgccaaaacgttagtaactttgtcactgtactcctctacagctcgcccgctgccgcccttctttaatgtcattgagattttaaaatcaaatatgattatcgttggggatttttttttactttttagaagcatgaacctttaaaaattgaacattatagtttttagagttttattgtctcgttgggtttcatgttttttataatttttagaaatcccgtcaaacgctgccactttactcctccagaagacccaccaaccatcggcggccctaccattatactcctatgcgacccgtccgctgcgtctcatttttactgtaattgagattttaaaaatcaaatatgattatcattagggtttattttttttactttttagaagtccccgccaaccgtcttgactgattgcttcacgacctgcccgtcgtccttccttttaatcgtcattagaattctatttggtcatttattaatagttttagatgtctcatcaaccgccacctctctgctccactataggcctgttacttaattaatctcgtcatatgttttagatggtcttttctttcatttgtcttattttttatcactagttttagttatttataaattgtattcatagttgaaatcattttttctttttctaatttcagaatttattttatttattattatgttcttttgatatttttatttttaatttttaatttcagttgtttcaaaattatattcctactttaactctccttttaatttgcctaatttcggattttattttatttttattctgaattttacttaatctattattgggttcttatatgtactctcatttcaatatttcttatattaaattccgaatttaagttaattttaaattgtatttctacttgaactcttattttcttttcttttttctaatttggattttttaattttttttattctgaattttaattaatctcgtattggattattgtatggactcttctttcaatattccttatttctaattccgaattttagctatttataaattgtattcctactcgaaatcttctttttttttctttttctaattttgaaatttatttttttattattctgaattttaattaatcatgtattgggttataaaaatattcgataaattttatttatttttatcacaaattttagttatttataaattgtattcctaattgaaatcttaatttttttttctaatttcagaattttttttaaaaaaattagttaatactgtattgtgttcttttaatgtttttattttttattttcaatttcagttgtttcaaaattgtattcctacttaaactctattttaatttttctaattttggatattattttattttttattctaaattttaattaatctcgtattgggttcttatgtggattcttctttcaatattgcttatttttaatttcgaatgttatctaattttaaattgtattcctatttgaactcttcttttattttcttttgctaatttctgatttatttttttattctgaattttaattaatctcgtatttggttcttatatggactcttcttttaatattccttatttttaatttctaatttcagctaattttaaattgtattcctacttggactctcattttcttttctaattttggattttatttttttttattttgaattttgattaatctcgtattgggttcttatatggaaatttctttcaatattgcttatttttaattccgaatttcagctatttttaaattgtatttctacttggactctccttccttttctaatttttgattttattttagtattattctgaattttaattaatcacgtattgggttcctatatgaactcctcttttcatattgcttgtttttaattctaaattttagctatttttagattgtacttttacttggactctctttttcttttttttctttttctccgattattatgggaatttctagcctccacagcgaacgtggtgcctcctttcaaggatgttttaataatataatagatttcataaaccaaaatttaaatataaattcctcgagtttaccaataagctcgcgaaaacctgttggcttaggcgagattccaagcgaaatcatcaaaatttcaatcggtaactagaaaaaaggtaaacttattttttttcctttttttaattcattattcttttctttcctgctgtaaattttagtaaatacatggaatatatcaattttttcgaaaatgtatatcccaataggttaaatgaatatcatactatttataagattttatttgattttttttcttttttatcaattcaaatttgaatttggattaaactcatcgaaatctcagacggcttctactttcgagcatcgtcaaaaccttaaagtttcgcagaattcgatcgaccggttttcgtcggaattgtgaactctccccgacacgcatgcacgcagtacgtatatagcaggagtacgttgtgcactggtgcagctcgtcattgtccggaagggcatgagccgatgagcgatcgatcgatggcgacggcgagcacggcgggatcggaggagcacaaactaacacacggcgaatcgccagggagatatcatatcgttcgtcaggtcggctagatcctccacacacgcgcacgtgttggcacagtggcacggacgctcacctcccacccactgatcaacccacacacccatcgatcgtgtccatttttccgcgcatccgcgcgcgcgcgtcggtcgctgacacacgcgcggcactccgaggggtcgtcgacgccgacacggacgggatgacgggtccccggctcgcgagttgcccgcctaatgcatccagcgtacagtgttgttgtaccagcgcgcgcgctaggcgaggcgatcgatcaaaagtcgtccaaacagcggttgcctttgtccgcgtcgttgaggccagacgtccagcgcctaggccaccgatccaccgtggtctattcatccgtacgtgcatcatgcatatggggggtacgtagtacgtagctgcacgtacgctttatcacgggctatagaattacaaaagtgtggcatgctttgtaaggtcgctctccagctccatttttcgcaagctggtcaatcacgctcaagcgaacaagcctctggctggctggctcctttcaaagtgtgcccaaatgattgatctctctctgcctgcacggctgcatcccaacccctggccctggctagccggagcccggtttgttcgagtgatcaggtcagagagctcatcggaattcagaagtcagattgccatccatcctgctgcatgcggccgtggggcccacacatcgcgtgggcctcggcaaaccagcagcagctactctcccggccctcggccccaaagctttgccccgggtgaatcacgaggggtggcgcataaggccatcaccaatacctcggcccgtgttccctagcaccattcgttagcctttccgtctccgcgcccccccctgcgatagaacacgtctctctgctagggaatatatccctcgctcgcttttgcagggaacacagccgaaggggcgtgttgggcgcgagggtgtaacttgtggacaccgttcctaccgaaaaatttcctcttccaccctcgcccctctcactcatcgccctcacggccaccggcgacggaagagagagggagggagagaggccaacggcggcggcgagggtggggggggggagaggtaagagtcggcggcgagagggagagggagacgagcggcggagacgatgccaacgacgaccgggatacgatgttggcggcgaccacggatccacgcgccgctcaccgagccatcggcgcgctgggccggagtaggaggcggggccatggctccccgtgtccagatctcgctctgccacgtcctcctcgctccgctcgccacggccaccgtgtcccgccgtgcggagggagagagaggagggcatcggtggcgggagaaagcggcaacagcggcttgagagggagaggagggaggcggcgacggttgctggggagggcgaggagggaggcgcggcggtggtagagagaggatgagggagagagccgtggcgcgtgagagagggagagagaggggagcgatgagagagagggaggagttgccgagggtagatgaggaaatttaacgcgatgaccttttggtaggggtacctatagattttgaggaacccatctagctatggcctccattgtgagacgattgtctatataagtgttttcagttagtgagaacactcaatggatatcttacattgtagatgctctaatacgcatgaataacaaggtcacatagggcttacagcagggctcaatgcacggcacggcacggcacgccatggctggaccgtgggtggctgattgggtggtggtgatggctcaccaaagaaatatttatcactcttacatattcaattaaaatttttaccattaaactaatatattatagatatatgagaactcatataacataaacacgtgagaactcacgcgtcacgaattatgagttataaatttttaattattatattttaaaagtgataaatagttaaataccttgtagagtggagaaaaaaaaaagagatcaaaactcccagctaaaacaagatgcggatgaggagacaccgagagagccagacaggcccctgggacctgggtggatgggtgaagatgatctcatctcacacgatgctactcactacacgcagttcacgcgtccaggccccgaccggccattaatggtgctggcttctacgtgaaggaagcaactcccacgcctcacgaggccgagccagccagacactgcatcaccgattcaccggtgcgcgtgccgtcgaatccgaggaggaaagacaaaaccggtgaatgcgtgcgtgctttagagcaatgtgaatagtatagtccgctggtggctaagagcacccgcaatggtaaagtaaggtgctatctataaaacatgtacacctcaacaatagactagattaatagtaaaccacttcaatggtatgtctacatgggtatctatagctctctaatccattgcctcgtttttctctatagactatctccatgttagtagatagctttgctctctctcttcatttaatctcttctaagtaggaaaatatgctgacatggatctcttgtagagagcttatagataaccactgtgggtgccctaatagaacatggctaaagctaactactggtacaatagattgtctattagctgtctgtatcttataattaaataattaattataacatgcacatatcaatgcatgtgattagcaatgaattgtatccgtgtagctatttgtgttgtgagatgaactttgttcaccaaacaccaagatcatttcacagatcataccaaacaagttatatgttgtataaaaattactacatacaaaacaaacactagtgtttcgtggccaagaaacgctcacgaggaaggattatattccctgttctttttcccctccaatcttatggccaaaaaaacaaaaaggacatgacgctattgctgcatcacgtacgagtatcactccagatgacagctgatgaccagcgttaatcttttccccgatgcagctttgaaagggaggagccaatgcaaatcaaaagaagattcttcgtcgtttcagcattacagcctcatttcaacggttataaataacagtatatatctcgatcgtactctcgcgacttgttatcctgatcagatcttgaagatcggtaaggcgatcgatcgacctgatcagcaagtggattgttagcaggagtggtggtacaagcaggccggcacatcctgcggcaggatactgatataggacgccaagttgccacttgatatctcgaacttatgagacaagggttgacatgctcatgttgacattacagatcatgcatgaggcatctgctactaggtgagagtaagcacattggagtgtggaagggaccaacatgtgtgctatgtcttcggcttgtccggacctcatgcatgtgtattgccatagtttgagctaattttgcacgaaagaaaaataaatcttaagaggaaattcatatagaatacgcacaagtgtgtacggacacctgcaggtggtagagttactccctccgttcgttctaaagtactccctccgttttttaatagatgacgccgttgactttttctaacatatttgaccattcgccttattcaaaaattttatgcaaatgtataagatataaatcacacttaaagtactatgagtgataaaataactcataacaaaataaattataattacgtaaatttttttgaataagacgaatggtcaaacatgtgagaaaaagtcaacgacgtcatctattaaagaaaagagggagtgtactccctccgtccttaaaaaaaagcaatcttagatgaggatttgacctcacctaggacaatgaatctggacaacctcatgtccaaattcgttatactaagtgatgttaaatcactaactaggttgttttttttaggacagagggagtaacgcataaccatcactaacgtaaatatcaagaaaaataatttaatcacctcctcgattaaatcatctcaatgcatataagcagtgtgattgatgttaatttgaaggtagaagatttaaaacaaatcaaaatttagaggagaaagagatctgtctagttaatgtatgtcggtatacacgttttatattatgagattcgaagaaaaaattggttgtcttatattttacgacggaaaaagtatgaggtagttaactcctaaacaatactccctccataaaaaaaaatcaacttctactgtttaaattttgtctaaaaaaatcaacttgtaccatcttatctactcccaactagtaaaatgagaatttttatcacttcaatactctttacctatctatcactcttactgtttttttaataaccaagagtattttagtcattcttcatcttcactaattttttttgttggaatgctagaagtggattttttttatcggagtacgttacaacagcgtacatccgaaacaattaggagcaggctgggcacgcgtatggttaaaattgttaaatttaacaaaacctcgatatcagcaaaatccatgattaaattgtcagggcaccatgacttaagcatgaccagtgcattgtgatattggcaccataaattttctagagctgccccaagaaatatgtaatcaaagaattggcgccgttcacccggaatatttagcctgacagcaggtgatcacgttgacatgtttaggctgtgtggtttgatcatggtcggtgcttaattaggttaatacaaacgatagtacgtactgcatgcagacgtgcagacgtgattcccggagaacgatgctcacgcgcaggagccaggaccaaaccgaccgtctgccggtgagatgcgtatatcgtacaaataattacatatggcaacgtgcttggtaggctatcgcttaaccatcctgttcatgacttacactggtggagaaatccttcgtagtcccggttcgtaacctccctttagtcccggtttccaaaccgggactaccaatccgggactaaagatcgctatctttagtcccgggtaaaataaccgggactaaagatctatctttagtcccggttgatagccccaaccgggactaaagatggctcagccgtcccggttggtgttatcaaccgggactaaagatcgagctgacctttttttttttgcatgaccctgttgctgcatggtttatatatatataaaccatgcatatatatatatatatatatatatatatgtttcagtacatatatgcatatataatatatgcatatatatatatatattatattatatttatacatgtttcaatacatatgtacatgcataatatatatgtatttatacatatatatgttatgcaaatgcatatatatatatatatatatatatatatatatatatatatatatatatatatatatatatgaccaaaatatatttacattatagaaaatgtgtacacatgcatatagaaatatatgtagtcatgtattaattacaatccattatatgtcctagctagctacgatttcgacgtagtagtagtcgctagctcagaagctaaggacctatgaattgtgtttccgtcgtagtagaattcacccttgggatcaaggatttgttcgttgatgaatcccatgagttgttcttgaaccgccgcgataaattccttgtgcgtggttaggttatcccttatgcgaataaactatatgaatgtatgaaattgattagtaattaaacaagaaatcgatacgtaatgaaattttgaatttatttgtacgtacattgagctctcttgtggtgatgatttggtctgcaaggcagtggcaatactcgcacacgtaatagccgcacaagttagttcccttcttttgctttgcgcactacaaataaatgacaaacaacgagagatctaattaatatacacttgtatgtatttgaatcggagaaatataaatgtagagcatgtgtactcacaggaaatttgaacttccgcctaagtctttctctccatttgccgcggaccaaatgacggaaccgataccaaatcctacatggagtttaaagctatgattcgtagtagcaattaacataacaagattttcttaattaacagaggaacttatgacggtacctgtctataagtttgaaaaccttgtcaaacgtagactcttttttatccattgagtcatatacgttgacggtgcaggccgacaggtcgaagagtaaaagcacccagtggaatctgcaatgtgcgtgggatgcattacatatgaaacacttagcaagtttgtacgggaatgaaatttggtataggaagacagtaaaattaaactaactctgtgttgtacggcaacagtatgaacgtcttgtaatgctgcaccttcaggagatggacgagattgtcctctgtggcttgcggatattggtcgagcattgtgacgtttactttccgagggtcgatgaatccagtatcgaaaaccccccgccgtcgggccctttgaatctccattctacaacgataaaagggagtatattattttctatagtctacttatatacaaggacctaattaattaaaggagacgtagtaagaaatctaactgaacgatatacttacaaaatccagcaactcataatagagacgtcgagggcgtccagctggtatagttcgtagattcccttgaaattgatccagagaatgtcatctccttgcaagaagtctgtgtccctgatcctcgctctgatcatctctctaccggtggcgcttatctctatgtacagctgatggaacttgtacatttgtgtgggtagggactgcagcagctcaggcttgacaagcggtttaccgagttcgtacatgtatttcacttccgccttttcgattggtgcgactcctagcaattgatccgtagttagaccggtgtcagtaataaattcttctatcgtcatttctttaccggtcaccaacggctcgatctcctggtttggttgctctccaagctgagggactggtttggactttctagaagatgctttcttcagcgttcgctcatagtccgatagcttaatggcctccttggcaggtgcagacatacccctgaagaagttcatgacactcgggtctataggaatcttcttttctggacttcgaggcttgaattgtctcttgacttctgatgccacgtaagcgtcaagctcctcttgcgtgcaatcgtaccccgagtccttgttcttggcggcgtcaactttcgccttcttcgtagcccttgtgtgggcaggtggtggagcttggggggcccttgactttgaaggtgacggaagaggagcttgcggaggagtcggtgtaggagcccgcggaggagtcggtgtgggagcccgaggaggagtcggtgcaggagcctgaggtggagacggtgctggagcatgaggaggagacggtgcaggatgctgaggaggagatggcggagccggaggagatggtgcacgagacgccgcttgtcgcccagggaggatgatgtaccacctgcgccatagaataatggcatggcttgtgtctcgtagatgcgtctcaccatctcctccaggataatccagctcgaggtcctcgtatgcgccttcaaccaactcaacttcaaccttggagtatcctgctggaatcagcctgcagtggtaagtacctgaagggtccattgggatggccatgcccgacgccaccttcatgtggtgagaggttatttattagtaattaacatatataagcagcaactagcggaatgggcaaatctaaaatatataaactacgagcttacctttattgataagttcttgaaaggaatatgcagctcacatggtgtccgctgagtgatgtcatcaacggggcaggtggattcgtcctgggtttgcatggcgtccatgctctgtgatcctacctgtcccgttgaggcgcagctgctacggtttcctgacgggctggggatcattggaccgatgtgtggccatgcgttcatcaaccttccttgccacctcctcttgcatgctgagctcgtagctcgataccctgaactcaagatttgcaatcttcgcctcggtatctctcttgctcctcatccgactcctgtacgtgtggatgtcctccttgaacccaatcttccaaggaatcacccatttccctcgtgttcgtcctggatgctctggagtctgcagggcgagtaacagctcgtccctctctctatccggtcggaacgtgccctgagaagagacttccactgcgtctgttagtcgacgcgcaacctctcgtatctgatcgccgaagaccagtgagccatcagctgggttgagcgttccatgtaccaaaacttcgatcgttccggccaattagcggtggccggttcgatacccctctcaagcaagctagcctccatctcctcccacttcggcatcgcgacgctatagccgcctgaccccaagtggtgatggtactttttcttggcggcattttctttgtttctttccatcatcgcctgcccttgttcacctgtcttatatgcaacgaactcgtcccagtgatcccttagctttgggaatgtgtcgaagttcggtgtctgccccttcaggatatatttcattaacctgcctataattgcatttcacgttcacgttcgttggctcgttcacgttcgtctgacaacgttctcgttcacgttcattcaccttgttctcgttcacgttcgttctctcgttctcattcacgttcgttggctcgttcacgttcgttcgctcgttctcgttcacgttcattcaccttgttctcgttcacgttcattcgctcgttctcattcacgttcgttggctcgttcacgttcgttcgctcgttcacattctcggtgtggcggcagcgggacggcggtgtggcggcagcggagcggtggcggagcggcgcggcggataaaacgtaataagcaaatatatgatttaaaattaataaaaattctaataatcatatatacttagcatatgaatgatattattaaatctgtaaaaactctaattaacatacgtatatacatacggcatgatttaaaattaataaaaattgtaataatcatatatacttagcataggaattatattaaattaaattgtgaaaaactctaattaacatatgtaaatgccacatgcatgatttaaaaattttaaaaattcgaatagtcatatataattagcatatgaatgatagtaaattaaattgtgaaaaactctaattaacatatgtaaatgccacatgcatgatttgaaacttttaaaaattctctagtcaattataattagcatatgaattatagtaaattaaatgttaaaaactctaattaacatatgaaattgccacctgcgtgatttaaaacttttaaaaattgtaagtatcgcatataactagcatatacatgatttaaacttgttaaaacctctaataatcgtgcgtaattaacatatgccatacatcaattgatttatatggataatcaatacatccaaaatagtttatatcgtgtacacaataattacggcaatacatcggcggtgacggttgaccacatgcactttctcctcactattgttccctccttgtgatcgctacgtgagtaaggggtgtcttcatttgataggaggatgctagggtcaatcgtcaccgtgaaaggggttgcccatccaactgatcgtaatccttgtcagtcttgtcctcaactccgacgatttttcttttgcctgggagaaccacgtgacgcttaggctcgtcaggccctctgcccttctttcctttgctagacatgttcttcacgaaaaagacttgcgttacatcattggcaaggacaaaaggttcgtccgagtatccaaccttgttaaggtcaaccgttgtcatcccactgccatcaatcattacgcctccaccagtcaacctaacccattggcaccggaacagagggaccttgagaggaccatagtcaagttcccatatgtcctcgatggcaccgtaatacgtgccagttgttccattgtgtcccatggcatcgacacgaacagcgatgttttggttcgtgctcatcatgtcttgggctctcgtgtagaatgtgtacccattgatctcatatctctggaatgtcgcgatcgacccagacggtcccctcgctaggaaggcaagttgttggttgatcgactcgttacccatgagatgttgtcgtatccacgcggggaaagtatcaatgtgatgccgtgtaatccatgcatcggacttaccgatgttcctggcgcgaactagagccaagtgctcctcgatgtaaggagctaccaatgaagattgttgcagaaccgtggaatgggctttacggaataaattattgtctaccgtcattattgctttccttccgagagttccctttccccgtagtctcccttcatggcgtgattcaggtatcccgattgggcgaagatcttcgataaattctacgcaaaattcgatgaccttctctgttccataacccttggcgatgcttgcctctggacgagcacggttacgaacatacttcttcagaacgcccatgtacctctcgaaaggaaacatgttgtgtaggtacacaggcccgagaatactgatctctttcacaaggtgacaaagcagatgcgtcattatattgaaaaatgaaggtggaaatatcaactcaaaactgacgagacattgcaccacatcattctgaagggcttctaatctatccggatcgatgaccttctgcgaaattgcgttcatgaatgcacatagctttgttattgtcgcccggacattgtctggaaggataccccttattacaactggtagcagttgtgtcatcaacacgtgacagtcatgagactttaggtttgtgaacttcttctccttcgtgcttattatttgcttgatattcgtggagtatccagacggtacctttatgctctccaagcattcaaacatactttccttctctgccttgctaagagtgtagctggctggactcaagtaatgacttcatttctcctttggttccgggtgaaggtcgccgcgttgttccatatgcttcagatcattacgtgcttccagtgtatctttcgactttccgtatacacctaggaagccaagaaggtttacgcaaaggttcttagtgaggtgcatcacgtcgattgctggcgtacgtccaagaattcccaatagggtaactcccaaaatatagagttttttttccacatcgctgcgtgaccatctttgctctctataggctggcttccaggcccctttccgaacactactttaagatctttaaccatagcaaacactcttttctcgttgcgatatttaggcttcgtacggtggtcagccttatgttcgaagtgcttgcctttcttccgtaccgggtggtttgttgcaaggaatcgacgatgacccatgtatacaaccttcctacagtgcttaagatacgtactttctgtttcatccatacagtgagtgcaagccttgtaccccttgttggactgtccggataggttgctaagtgcaggccaatcgttgatggttacgaacagcagcgatggtatgttaaactcctcctgtttgtcctggtcccacacggggacaccttccttcttccacaacagcttaagatcttcgaccagtggttttaggtacacatcgatgtcgttaacaggttgcttggggccttgaataataattggcatcattatgtacttcctcttcatgcatagccagggggggaggttgtaggtacacatcgtaacgggccaagtgctatggccgctgctcatctctctaaaaggattcatgccatccgtactcaaaccaaactgtatgtttcgtgcgtcctttccaaattctttaaattttctgtctatgtttcgccactgcgaaccatcggcggggtgtctcagcatcccgtcctgttgacgctcttcagcgtgccatcgcatcattctagcattccccttgttcctgaacaaacgccttatccgtggtattatagggaaataccacatcactttagcaggaattctcttctttgttagctgcccgtcaacttctcctggatcgtctcgtctaatcttgtatcgtagtgctttgcaaacagggcatgcttctaggttgtcatactcctcaccgcgatataggatacaatcatttggacatgcgtgaatcttctgaacttccagtcctagcgggcagactatcttcttagcctcgtacgttgtctcgggcaatttgtttccctccggaagaatgttcttgacgagtttcaataaatcgccaaatgccttgtcactaaccccattttttgccttctattgcaagaactccagagtggtatccaactttttgtgcccctgctcgcaacctgggtacaacgaagttccgtggttctctaacatcttgtccaatttatgggctcccttttcactttcgcagtcctccttggcgtcttgcaacatctgaccaagatcatccgcaacgtcgttaccatcagcatccctttcctcctcgcccgtttgatttccttcaaatccaacgtactgagcaaagtccggaatattgtcgtcttccacttcatcttcttccatttcaacaccttgctctccgtgggatgtccaacaattatagcttggcatgatccccgactcaaacaagtggaaatgaatagtcctggatgcagaatactccttctgattcttacacttattgcatggacaacaaataaaacccctttgcctgttagcttcagccactctcaaaaaatagtgcacgccgtaaataaactctttggaccgccggtcagcgtacatccattgccgatccatctacatgagtcgaaaaaaaatcgtacaaaaataattattcttacaataatgacagtcatacaataattataagataattacaaactgttttcaacagtcatacaataatgacatatctttattcatacaaaaatcataaaatattacaccaaataattcttttttactatttctaaagttttaaactaattttaatgtgttttacttcttttaattttcattttagtttgttttctagtattcaagattaactttcagtatagttttccttctcaactattttataaaaccttctttagcaaatcaacttaatttctatatattctttcttccccacacaaattttctccctcatcaacttacaactaaattttggagacaaaaaagtgtgcaaatcatagctgcaaatgtaatatgacaaaaaaaacattggaggatgaagttgcaaaccttttaggcacctccgatttgtatgttatcaccaaaataaattcactagaaattttggcatgacctcctctcttttttgaagaaattttgaagcttactcgggcagctgaaggaggcagaagacatatatataggggtgggactttagtcccggttggtgttaccaaccggggctaaagatccccgagatctttagtcccgattggttaccaaccgggactaaagttacaatctttagatcccgaggggcctgacaggccctgacagcatttgaaccggttaaaaaggcaaccaggactaaaaatcaaatatgcccgttaccctttttaaccgggactaaagatcatctttagccccggtttttattgcatccgggactattgtggaattcggccgaccgacgaaagatggtttctccaccagtgttaattagaacattaattaatttctcggttaatatcagtgacagacatagctttaaaatacaggttaatgatcgataaaattaaataacgggacttattatattgcaatagcatataaataaagtacaatcaattaattaagacgcaaaagaacatctaagatggtactgatgcaccagacaggacagtgacgcagccatgatcgtatatagaacagatgcaccgcagaggacaaagacatagccataatcacacatagaacacactcaaatcaaaccatagtaaggaggtcacaaaactagcatcgcacgaatcgtgtcaagcgagttagcggaggagatgaatagtcattacacgagcgaggtggcaagtttagtagtaaagacgaaactagtggagaaaccatctttacccggtcgaccaaaaatcacaataatcccagttgtaataaaaacctggactaaagatggtttttagtcccggtttataagcagaacgggactacacgatctttagtcccggttggtgttacgctgttagggccctccaggatctttagtcccgatttgtattatcaaccgggagtaaagatcacgatgatctttagtctcagttggtgttactaaccggtactaaatatcaaaacgcactatataatccctagtactcatcctcttttcccgtctacacaaacttctctctcttcatctctaatccttatctctttccttcctccttatttcttttctttccttatccctagtcgtgtgtggctgagtagtgcgcaggaggagggggagggcgggccggacagcggcctgcgcggcggcggccggggagatggcaacggctaagccggctggcggcttcgctttcttttctttcttttttttaagattttgtgatccattgtatggattgagatggagaatttgtgattcattgtatggattgagatgtataatttcatttttgagaatatgtgattcatcgcatggatatgtgatgtatatgatttgtgtatttgggatgttactttgatttggggatatgcatcccacccaatttgggagaaaataagttagagattaagtagtaagtagcaataaatgaaacaaaaagaaactaactgggactgccgctcccatctacaccaaccaggattaaagatcgatctttagtcctgagtatttgaaccggactaaagatagagatttttagtctcggatttgtagtgggttacgaaccggaactaaaaacgatttcttcaccagtgcgagatgacaattggtgatgatataggggtgtgggggcggcgtggaccatatatagttggccaatcgccccaccctatgccctatgggtgtgtccatccctgattaatatatgtttttcaattatacacacatgtgcacgttgcatatatatcctgtcataacttgtataacaaataccattcacgcatgcacatatatcatatgtgcatcctttcttacatgcactcaacgggtagagagatcgatactaggtaaatccataaaccttaaaaagagtcatatggtcattagtgtatatcatacattttgtaagaacattttatttttttaataatgtatagaaattcggtttctatatccgcacgtggatagacatagttaaaacaccaatgtttcataaattaattcattaattaagaggtgtataaggaagacctaaaaatatgatccataataaattattcgcttgaaaggaaccacttgagtaatagactcgtagatgcatatataattccaattatcatggttcaaatcccaattgatcactacaaatattatacacacacaagtgatttaatattcctttttaaatttgaaatttaagttagttttaaattatatttctacttgaactcttatttttctttttcttatttcagaatttattttagtttctattctaaattttaattaagctcatatatattgggttctagatggtcttttcttttaatattcattatttctattctaaattatagttattcctaaattttatttctacttgaactcttatctttgttttctatttttctaatttattatttaaaaatcaggatttaattaacctcatgttgta

SEQ ID NO: 7163 - DNA, 6726 bp, Oryza sativa
tccagaatcgtagtactaagatgtgtcacagttatctaaaagcccttatattttgcgacttagggagtagcacttatatagaatgaatgatgccgtatcgtgtataaccatgagctaagctaatgttttgtaagaaaggagaaagaaacagagaggcgtgactgcacaacacaagctttctttgatttccaagctcttatcttttccatatccatgagaccaagagctaatcccatgctacctgctggatggaacttggaacacttgcacctgatctgaatcattgagtttagacatgtggtgtcccactgctcccgttcgctttatcgtttctatcgaatgcgacgtttttattgcttttggctcccccctagatccatccatgatagcccatggttctcggatcaggatgcgagcaccggcttagtcgggatgacatgagtgaaaaaataatccttcagattagcataggtcgtctgaagaaagttcaccatctatcatctgatctgagaagaaacagaagataaggcaaatggccctgggtccatgccaagattgtgatggtaatgttaatctactgaatcagccgcagtctgtattggagacgcatgcggatcttcgcgtgatttttttggctgcaagtagggacaagttgctgtcatgatgtagtaattctgaaaggttggatgagttctaaccggcaaccgccagccgttatgaagagacaaagcgacacgatcgggagatgcttagctcgccattgttgacattttggagaaagtggagtattatatctatgattaatagtgtgtggttgtctggtgacatcactagattatagtacagtagaaaagtttcagaactgggcggctgcttgatggagcagaggaaatttggcactctgaaagataaaattttaatatcaaagtcaaacaattgatgcacgtaacaatttagcatgaatttttatatcgtatcaggatctgctgattcaaaaaattgaaaaactttggattgatgcaggtgacgttcctgaagtgtggaggcgtggccgtcggcacgggcatgcaccatgtcacgatggacggcgcgggcgcgttccagttcatccggacgtggacggggctgtcgcgtgggctcgacgccgcggccgcgtcgccgtcgccgccgtcgcacgaccgcaccctcctccgggcgcgctcgccgccgcacgtcccgttcgagcacccggtgtactccccgagctacctcaacgggctgccgcggccgttcgtgacccgcgtctactccgtcccgcccaagctcctcgccgacatcaaggccgcctgcgcccccggcgtgtccacgtacggcgcggtgaccgcgcacctgtggcgcgccatgtgcgtcgcccgggggctcccccacgacgccgagtcgcggctgcgcgtcccggccaacatccggcagcgcgtccgcccgccgctcccgtcgccctacttcggcaacgccatcgtgcgcgacctcgtcacggtgcccgtccgcgacatcctgtcgcagccgctggggttcgtggcggagcggatcaagcacgcggtggcgcgcgtggacgacgcgttcgtccgctcggtgatcgacttcctggagctggagtccgagaaggggaaccaggcggcgcgcgggcagttcatgccggagacggacctgtgggtggtgagctggctcgggatgcccatctacgacgccgacttcgggtgggggcgcccggcgttcgtggcgccggcgcagatgttcggcagcggcacggcgtacgtgacgcaggcgccggacaaggacgacggcagcggcggcggcgtgtccgtgctgttcgcgctcgaaccggagtacatccagtgctttgagaaggccttctacggcacagagtgatatgatgcggcggcggcggcggtggccggagtttagagctggaggacatcgagcgacctgggatgcatgatgacgccgaggtggtgtcgacgtctgctgactctgtgtcatgctcaatacataacataatatgcgttatttgatttgcggtagaagtatttagtgtatgctggtactgtgcaacagtgcaagtgtaatgagctgctgccttgttggttgcagctctctctacacagacactttggtctgtcttaagttcgtatgtacaaaaaaaaaatcaaatggaaatgaaaatgactatggaagcaaagaaagttcgcaagcaaacggttggttatttgtagaataagcgaaacagcatatttgcaaatgaaaaataatttgtgaacaaaacttttatatacgtgttcttagcgatttaacttttatatacgtgttcttagcaatctaaaagtaaatattgaaaaataaacttcaataaaaaaaccttaaaatcagctctaaatttaagtttaaaaatttaaattttggctaataaacattagcctaagcgaaaagataaagccctatggtgcacggctcgaaaattcgatcaaaaccggacgaacttcgtgaatttcgttgtttccggcctgggacgaaagcacaatttcgtcagggagttcgaacacttttgagattttccaaatttgagaaggacaatgaaaaatggggaaaaagtcctaaaaacaatcatgtttttgtggtacagactggcaaaaaaaataataaactgcatttgcataaaaattgggggaaatcctgaaagtagtctcttttttttttcaagaaacctcaattgacgaaaataaaaaaagaagtttgcatttgcatattgggccgagaccatgaagcatgacagaccggttaggcctatattgagcctgtatgtttctctatttgtatgctctttctctcgcacgcagtctgttggcatctgaaatttcgctcatctagcttggaatttcgataactcaaccggattttgatgcgtgccaagtggacttctaggatttgaattcaaattttctttactcaatttatccaaaaactataaattttttgaatgactttcgtgattttcgtcatatcgccagcgtccggcatccacggcgtattcagtaatgtaaacctaggtggttactacgttaaccttaaggtgatcatattaatataggatgtatgtacgtatttatacgagtaaatatgcacatgcatatataagtgtgtttgtactatggttcgaaaaagaaaaaagtgtatttaattttatcctaactatttcattgggtcacttaatctttcaaagtatgttttagcttattttaccacaaaaccattgaaaatgattcattttacccattgataaaatttctcctttttaatttgtacagtttatattttaaggtaatttttttacaaccattgataatgtcattatcaaaattttaatagtgaatcatttttaatagtgtactgtaaggtgcaaaaagactgaaaaatagttaaggaggtaggttaaatacttaaatgctttgacgaaatagttagaatatttctttttcgttactggacattgatttggccctcgtccgtgtgactggcgcacacgccgtggcgtgctcacgtctcaccctccacgcgaccacgccgcgcccacctatggcacttggcgcgccacctctggcatttggggggtgagttttgtgatacgcgccacgtgttttaggttgtgtctggttgggcttttcaatctgcttttgcttttgcaaaagccaaaaacaaatcaaagggctaaaagccacaattgcttttgctccaaagctgcttttagtgtagtataaatccaaaagtagtccctacccctgctttcattggcttttgagagaaaaaattacccacctatgccattatgaaaaaacgattcgcactttttctttctttcccgttccccttctcgccagaccgagcgcctggccattcgcagttcgacgcggcactagggtttgcgccaccgccaccgcgcgccacccatgttcccgccgccagcgtgctcccgtcgtcgcgagccgcgtctcccggcgctggcatgctccgacgcccgtctccccattgcccgcccccacgccacccaacgccgccccaggctgcccgatggccgacggctgtctccctgtcgctcgcccggtggccgtctccccgtcgcccacccgacgccgccccacgccgcgccgaagccacctctgctcgacgctgcttgaagacacccctgctcgacgccgcccgacgctgctccgatgcctttgccactgctctagccggtttgaaaggtgaggccgaatcgcccctgcccctgctcttgtgttgatgcatgtgttgtccctagaatattacagcaaattgatttttggcctgcaaattgattgaagaaaaatttatttggttcaagaatgggtgacaaggcagattggggtgatgattttataaggcatttgtttgatgtttgcaaagaagagatagaagctgggaatatacccatgggaattttcaccactaccggttggaaaaatgttgttttcaagtttgcagaaaaatcgggtgacaagcgaaccaaaaaaaacaattgaagaggaggatagttattttgagatatggcatcattgtatgaatgctctgtttatgtggaccatatcactttgatggatgaaaaactaatatattttgatgaaaaacttatacattttttctacaaattggccttttaaatacaaaatattgaacatattaggttaggtttgtacgagtaatttgcatataaacagtcctttcttatacaacttacagtttcacagctgctctaaccaaacgggcttctgcttttcccacagtttattttacacagctgcttttccacagcccacagatcacaacagcttttccaaaagccacaactctaccaaacacacccttaggctatgtgaaaatttttgccgcgttacatcagatatacagacacatatttaaagtattaaatatagtctaataataaaataaattacagaatccgtctataaaactacgagatgaatttattaagtctaattaatccgttattaaaaaaatatttactgtagcgttatattgctaaatcatgaagcaattagacttaaaagattcgtctcgcaatttatacgtaatctaactaattaattttttctgtatatatttaatactttatatatatatatatatatatatatatgtccaaatatttcactcattttatttcgtgagacagggtgaaaaaattatcagctctccgtctgcccagtgatatccgcactcgccttttctgactgctgttccctgaatgcacgtcgcatcaagtcaggagaggcattgaacaggagatagaaaagcccacaagttctcttcgagaaagagaagtattagttttggacaatttttaagttaaccttagaaatataaatcataaataacttttaaattattaagtttaaaaatataaaaattatatgaatagatttgtcttgaaaaatacttttaaaaaaatatacatatatcacttttcaataaatatttttataaaaaaagtcaaagttgtgttttgaaaaccgtatctctatccaaaacaatttcttttataagtacggagcgagtactcccgcatcatctgcagaatttttacgacggttaatttatttttcataagaacggaagtacggaacaaaacacccgcatttcacccgcatttcttaagatgatgataggtgtcgggtgaaaatctgatctgcacactagattagctactaattacacacttcgccattgtgttcggtaagactagaaattattaagaaaaataaaataaattttaccccgttaaattgagtagcttaaatcatacaagtattagttgcatacaagtataattatacaagtattaccccgttaaatggagtagatgcacagtattagttgcatacaagtataattgtacatataaaaacaaaagatcaaatttataatatgaaattcactcctaaatttaatattaatatataaagctgtatataaaattcagctcacgtaagattgcattgaaaaatcccctagtttggactttggactaacacggtagaaaacgatcatgctctttagcttatcagctgcaaccaaaatttaaattttaaatcttaattttgattattttaatcgtagttttttttcaaccattatttttataaatctcgaatcgatataaaagaaaattgaggactgctacaaaacaggatcccgttgcaacgggatagacatattaactattctcttgtacgagtatcacaggtattaggtcctaggtatcacaagtaccgggtaagaggtatcacagatatcaggtaccatgtagctggtaccaaaacaggtatcatactgtcttatagatgatatcctgttacaacatgataccgttgtttgaagaaaattacccacacattatttttctcgcaaatcatcgcttctgaagatcacacaacggaagtccggaacccacgcccaaatcaaaaagaagcggacgccccccaaaaagttcaaaactttccaaaacatcgtgtgcgcggttgcatcgccgcccacccgcctcatcgcatcacaactctcgcctaaaaggctaaaacccttcctccgtcggccgaacccgtcttgattcgccaatggagttaccccgccgcggccaatcctcccatcccgccgacgccg

SEQ ID NO: 7164 - DNA, 18650 bp, Oryza sativa
gcatatagcttgcccttctgtcgtggtcacaatcgtccattgatggtagctgacgcagttggcatatagacaagacgaccaatatagagataatattgcccaccagaggtggcaacaatactggtggtagtgaagatagtgataccaatctaaagtaatgaagtcgcatagccatggaggcgaagaaaccagtcggcggcagacagatcaactaacaatgaagatgaaggaacccagcgataaaattgtgtagccatggcagcaaaataatcagtcggtgacagacgaggtagatcaaaggtgatgacaaaatccaccaatcatgaagatgaagaaaatagttgacgacgacaaacgcaaccgacatgatgaagaagacgatgtcggtgatccagccaatagcagtgtagcaaccaatgataatgacaaagacgctcatcagcatttgcatagtaggtcaaccgtgaaggtgaaataataagtcggcgaaaacataatcatccattagcaacagcggagatgtcagggccgatgaagcagaggtgctggtgatgatgtcagtgacaataatccatcaaattaatgttatggctgtcgtagatgcttcacttggaggagagttgatgaagtagaatgtctgttccgaagcaaagatgaagataatgactcctggagttgactcattggcttatataaaatttgtcaaattttgagccttatatttgtgtagcccccgactctttggttagttgggaaacaactgaacatagagtcgagaattatagcttcttgtcgtcgagtagtcattgcttgattgaagatatgtgttgaagatgtccaagtagaaatcctgaatattggagagccacttgttgtagtaaaataacacggcatcgcatgccgagatgtcgagattcacaacaacgtcatggttggtgatgtagcaaaacttgtgaagtagcagcaatagagtttgctggttccgaagataataaagatgaagtcgctccaccatgatgacaaagttgtgttgccgtgatgaagtgaacacgagtcgtcggcaacagaagcaaactggtagtgaagacgcgcagttgtgaaaataaaagcactagtcggcgacggaagacgatgatgttcatcagtagtggtaggctgtataaaccagatgtagagacgagggcactagttagcagcagacgagacgaccggcgatgaagatggtaaggccaatcaacactggcagaatcatgcagccatggaagtgaagaaaccagtcggcagtcatggcaaacgtaggcagcttgtgttgaagatactgatgcctattagtagtgacagcgatgtagccagccgtgaagaagatagcatcagttggcgttataacaggccagccgtgcaagcggtgacaccagtcagcggcggatgcggcggccggccggtgaagacgtagacgcccaacaacggcagcataataggccagccgtgcaggcggaagcaccagtcggcggcggacgaggcggccggtcggtgaagacgtagacgcccaacaacggcggcataaaggccagccgtgcaggcggaaacaccagtcggcggcggcgaaggcaagccggtcggtgaagacgtagacgcccacaacggcggcataaaagccagccgtgcaggcgaggacatcggtcggcggcgacgaaggcaagccggtcggtgaagacgtaggcgcccaacaacggcggcataataggccagccgcgcaggcgaggacaccagtcggcggcgacgaaggcaagccggtcggtgaagacgtagacgcccaactacggcggcataaaggccagccgtgcaagcggaaacaccagtcggcggcggcgaaggcaagccggtcggtgaagacgtagacgcccaacaacggcggcataataggccagccgtgcaggcggaaacaccagtcggcggcggtcgaggcgagccggtggtgatgttctgactgatccattcctggagcgtaagagataagcttaaagccatgaatcccttttatgcatatctggatttggatcctgcagaacaaacatataggatgagtagtatctgatataaatataatactcgagaaaaaatcaagtattttaaaatatttataaatatgtatttctcctcttgtcaattttgatttccccgagcagatgactcattacgtttaaacactctgcccgactagtcatagccaccaagcactgggagtcggcctaagcacttcccaaacatgcatatgagtgacatgagttcgtcattaatggaacaaagtttcacggatcggagtttactactcgggtacttttgcaattattaagagcagaaaataaattatctttctctatgcttttgatttattccgaataatacttagcaccttgcgttactcggtccatccaacgagcccccgggtgctaggaatcggcccaaaggcaaccatccattggcaaaccaaacggaaagcataggaagatagaactccataactcgataggtatttttgtactcagattatgtcgcaagcaatcaagataaatattataaaaaatatgatataacatctgtagcccccgactcactactcaatggaagaccaattggtgtagtgaggcagaggaaaaggaaaaatatcatataaagaataaaataaatgatgacttagctttgtaatattccccttggtgatggcagaagtggccaatgtgggaacaaagtcgtccatcaataacaatgaagacaccagtcggcggcgacgaaggcggtcgacggtgaaagcgaagatgcccactaacggcggcataataggccagccgtgtaagcggaaacaccagtcgacggcaacgaaggcaagccaacggtgaagatgtagacacccaacaacggcggcataataggccagccgtgtaggcggaggcaccactcggcggcgacggaggcaggccggcggtgaagtcgtagacgcccaacagcggcggcataataggccagccgtgtaggcggaggcaccactcggcggcgacggaggcaggccggcggtgaagtcgtagacgcccaacagcggcggcctgttggtgaagacatagacgcccatgtacggtggtgtgaccaaccaaccgtataggcgaaaaccaatgaacggcagatgaggcggcgttaaggcgagttgcccattagtcgcgctagagtcggccggatcgatctcttgcaatgaatccatcgcatatgcaaaaagaaagcaaacatatagatctctgttagtgaacaggaaaatatagatgcttatcatatactagaaaacatctatttaatgtatagcatgataaaaaattttaatccacgcgtgttgattggatcaacacatcgggcatgctttccagggagctgtaatttcctggcctgagctttcctgtgcatggagtaggtatgcatggcgagagcacatatatatccatattaaatcacatgcacgtagcagctggtcaaagcctggaagcatcagcatgtcgcatggttcccgtgaagacgtggccggcttacgacttggactcatgatgagtagacggagcgctttgtcttgcacggcagcagcttgttaggtagttagcgtccatcagagcaactcagccgccagtagtatatgcggacgtgcaaaagaagaattagaaaaacaatatcaatctgtgattagaaactaatctaacagagattaaattaaaaggatgaacccagatcatgcatgtcgatcggtcgacatgtgcatgtggattactcctggtggctggcgatctcgtgcgcgagccgtgagcactgccgttccacgttgctcccatgtcgggttacaccgccaccggcatctgcacacggtgcatggaggaacacgaggtattgggccgacacaccgggatgacagccattggtcttgatctcagtcggcatgcaaaaacaagagaaagtaataggagattaatctgtagctagaaatcaatttaactagtgaaacgataaaattatccaatgaagttggagattgaatcgatgaaatcgctgagattaatcccttcggctgaattgaatccaagacgaaaaagacatgcttcacgaatccggcgatgccgaagattggttccatcacacttgtcgacgaggaactcgacgcacccctacctggcgccccaactgtcgaaacatgatttcggcaataataaaagggggtagcgtacgagacctaaaagtggatggatgcggagacaaaggatttagacaggttcaggccctctcaatgagaggtaataccctactcctgtttggggatttgaatccgccgagtgtgtattgatctgacgatcaggttgtctcatcataccccctagagggcctcctgcccaccttatataggatggggggcaggattacaagatagaaaccttaaccaatacggtatcggtttcctaaatctactttacaatattatcaaaccaggactttaggccgttccgtaatatacaaggaaacgtaatacccgagtcatgatctattacatattccatagatataagttatcccctatgactagtcggataaccatgccgtatgggtatggggtacccataatctccacaagtagcacgaatgtgaaggacagtaattcgctccagttccatatgtattaatttcctgtcgttttaaacattaccttatttactcactagtgattatttaaggtgtctatttactaaggccatttactaaggccattcccaacccaaacactagacatagttttcataaactccacatcatcaagaaactagtactagacactacttttctaatgtgaacaccactatccatacttaaatttaatgctacttatctcacatgatattttggatgttgtgtagaaactatatctcatgcaagacatggtttccttctctttccttatttattcacttgccacattatttttcatcctaagtggcagtctatttaatgctatgaacactatcctagtcattgagttgtgaatggcctaagtagtagtctctccgtattttaatgtacgatgctgttgactttttaccaatatttaaccattcatttgtttcaaaaaatttatgtaattattatttattttattgtgacttgatttattattaaatgttatttaagcatgacataaatatttttatatttgcataaaatttttaaataagaagaatggtcaaatgttggtaaaaaaattaacgacgtcatacattaaaatacggagggagtacattttaagcataggagagatgtcgttggagaaacaacaacttttcattaactatataagagtaaactcatccaaaatgtttatactccctcaattccaaaatataaggtacaaatactactttttaaagttgtttcgtaatataagacgtgcatgcatgcatataattaattagcatgttctctcctctaaattattattattttaaattgtacactcacaagatttttaattctattggttgcatgtattgtactagttagggtggttcatgacaatgatgtgatattaattatttcttggttttggattatgggtggttatgccttatattatactcctttcatctacttttgatagccatatttcatcttggcacaatgacgaagaataagtaattctacttatcatccatttaaacatgctactagtttttttagaattacacagtacaacgcaggcgctcataacacacgcacactcacccctatgaacgcacgcacgcaaaccttacccctatgagtatattcgaagactgaggcagcaaatcctgaagattgacgaagtcaccgcaggcgcctcgctgtcgacgggtatgtcacctaccactgaaagcacaatgccgttaaatcttgaaaaattcgctcctatggggagtctaacccaggacataaggtgctattgatgctcttgtaaccactaggttacaagcctttttcgctaaacatgctactagttattcctcgtaaacaaacgattcattaatatttatatttctcgatgcccatgtagccaatcttgtgtagaagaatgaagagtcacacattaaatccaataaagtcattaagaggatatgtggccggattgaaatatatctattaaaagtaaattatttagttttagaaatacgtttatcaaaaatagatggagggagtattaatctctccaactacagagcattttcattattcatcctagtaaaatgcttcaacgacaaaggaaattaatataggactggagggagggagtacaatacgaactatacaaattaagctatacccacttaactccttgatggaacaagctaaccaaagcacagtcacatccccatgttacacacacacacacacacccctcaaccaaacctccctaactcctgagtagtggcgtattaattaggcctctaattaatcgcgcctttcgcaccgtcggtttgatggcgatttgtttaattaatcactcccgccttacccacaaagttaaccgcctccccctcgtcgtcgtttgactaagattctcccccattaattaaaccaacaaaccaaagcacatcgcacatcaggattcgatcgactgacgccgcatgcggcacgcgtacacatacacagtaggagtacgtgatttccaccatcaccaaacacgcgatccgggcgcgcggtggtgaaccaccaccaccaccatcaccaccgggacaacgccccactagaaacaccgcgggatcacgagagaaaaccacgcgaaaacccaaccgcgcgcggcgcgactggtggacgcgcgcgcgtacgcacgctgcggcgcctcgcgtcacatggcttggaccgtgccacgccggtgtttcggttaaaaatttttttgagagagggcaccgccaccgcgagtagtctccgcgacgtatcgtacattcgtacgtacgttagcgcggcgcgcgcgtggttgatcggcggaaaaatcaagcggccggcagccggtttcgcggcgtcggcaacgtaaacgcgggcgggcgggcgcgaggccgacggcgggggtcggcaggggcagcagaaaggtgacggggcgagggagtattatagtggtacgacggagggggaggtcacggtggcttttgggcaaagctttttgtaacatattgttatgtggtgatcctcccaatctttttcagagcttggtcctccgaggtgtgacgtgcttagctagggggggcttatcggctaagcagatagagtttggcccatgaaaaggtggttgacactagtcacaatgtagggaagctaagctagctgttttgctaatctgcgattaatttttcttttgaaaagcgatataagcacaaacgctcacaatatacgtacacttatcgtcataaatacacacatacttcttaaccatgtgaatacctctaaaagtttgggctggcatacgttgagattgacgaaatcgtcacagatgtctcgctatcgatgggtacgcaatctagaatttaaatcgggataagggctggactagttctacaaaagaaaatataaccagttgaactacgatcaatttgcaatctatcatttttaatttgttagtttctgctgttcttctgtaggaactgtagaatagaaaaaccgctagctttccgctgctctagtgttaatctgattccaagcgaatattaacactacttgaccgattcaagatcagataaaaacagctactgttttttttaaaactgtgatgctcaacctagaggggattttaaacctgtgagagaatgtgttctcctttttttacgcaatgttcaaataattatgaaaaaaaatatgatatgactagaaatcatagatcattgtacatatatgttacatattcctcacaactatgcaagatcgaatttattttacacatggagaaggagaagttgattgaatgtgttcttgtatatttgtgaactgataatgacacaaccatcaatgttttatcttcttttttttgccactattttttccacaagaaaagatgagtgcatacacgcttgtgcttaaaataatagctccatcaatttccttgctacttaaaattcagattcactttccaaaatgtgttcttccaataaagtacttctccgtggatttttctgatctgacattctgttcaagtatttagcatatattcctttggtcctgtgaagtacacatttcatggacgtccctctcctctctgcatgtagcatgacgctgcggccttaccaacctctttgtctgccgtaactttcaatccaaaatgggatcaatttgtataaaccaagcaaaattcagagaaacatttgctcatttatctcaaacaaaccggcttttgtgctggaaacaattaacttacacctagcacacatttttgaactttcaactctaaccaatcagatttttacggaggaattcggctttcaatacaaaaggtttgagtttcccttaagatttccaggacatcacacttatttccaaagaactaagaacctactctctctgtcccaaaaaaagactaaccttagagagatgtgacaaacctttgatggatgtgacccctcatagtacaacgaatttggacatccaagatttgccttttttttttaagacggatggaataggttacataccaagccaaatgaatggtggggagctaatatttttctaaagaattccataagtaaattgctagaaggtcaatcactgaactctactactgtagtacatagtagtttttttttttaaaaaaacaagtacataggtattcgagttgtataaacaaatgtcactatacatgttgcatgtcaaacttaggataacatatgtaaacagtacaagttcagagaaaagaggagactctccatttttgtattgcaaaaacgacgtggacgagccttctagatgacaagaggagagagaaagagattagagagagagagtatggatattgtgtatacgtcattacggctgcgtttagattcaaaatttagatccaaacttcagtccttttccatcacatcaatctatcattcacacagaatttttcagtcacatcatcttcaatttaaaccaaaatctaaattttagatccaactaaacatagcctacatcgttaagtttgctaccctcaaaattctctcgagaaaaagaaagaattgtttgcttctctgaaccgcgccgcacaccgaaagcgacctgtgcagctgcgcgcaaaatcacactaccatccgttgtaaaggctggcgcaccctgaaacactactaccaaagaaaagcaccctactaaacaagtgattagcccagctaattgctggagtaagtacggtattatatataatcatagcgaaagtaatcatctcggagcatcagctaagagcatggtcatggtgtaagtactattattagtgcgttgaagtgaagaaaagaggtgcagagatcagaggaaaggcaacaagtctagagagagagagagaggagcagtatgttgacattgcaatttgctagtgagagcagaagagaaggcggcttcggcagaggagagagaaagaggagtgagaggagttaataatatcccatcattcacactccacggcatcattggcaactcctctcttccattccattcaaccacatctgtttctttaattgctgcgtttaatcactctcctcctcaccaaccgcttcgttctccgttggtgtatagttgccgcagcagcagcagcactcgccactgttctttctttctctctttctcctcctgctgctgcgttgctttcttcaggcagctagctcagctgcttgtgcgtgcatgggaaggagtaggaggaggaggctctgagagggagggaggaggaggaagaagaagaagaagatgaagttcatgaagctgggctccaagcccgacgccttccagtccgacggcgccgacgtcaggtgaggcgccgccttcgtctcctctccaatctttagcttcggtttgggtgaagaaaagtgtgatcttcgcttgcgtttctttgggtgtctgactctgataacgttgttaggatgcaaaggtggtagtcaaaatctgttcttttttttttcctttgcttgtttatgggaggcgtcgattacgaacgtgtctggttgctgttcatcatgttggtttgctaattattggattggattctttcttgggtagtggtgtaaaagaacgatttttttgaagcttttttggggagatatcttgcaatagaaatcgttcgtttgatggcttctctgtgtttatgaagttttgcgagaatgaaggtggcagctaatagaatgggagtcgtttggaaagttctcttcttgcatcagttttctagcttctcttaattaatagaatgggagtagctatgttttcttttgtcatcttgtggcttgttcatggatttggacctcacattatgcttgagtattggttacaagtcccctgttcgattgctaataccaaatttgttcgtactttgtacttttgttttcttcccaaaaatggtctcccatttgaagttgctgggtgagttgactactgattcttgggaagtgctaagctgtttatcgtttctgctctttctttttttttcttttttctttttgcaaactgtgtcctttgtactaatgtatagcatgcgtgattctctacagttttgtgaactggatccatcacataccaaagtttttccttctgatctttcgagctggcattccttgtttctcttgggattaattttctttcgtgtctatctccttgtcgtgattctatatgctagctgttaaacgtcttagtttacagtgatgggcaatcatctgattaaataaattactctcgttgtgatgcggttaatcattgggcataagctgaagccaaattgccttcctggtatccgtagcttggtagcagttgtttcttggttgtgtttgaattagattgctcaaagtcatttgtcgactaaaaagaaaggctttgtttatgcctgctatatctgagcatgtacttgtttctttttcctcctctttgtggctagggcgctaggttagtgcagaatagatctgagggttaggagaattaagcttcactctgttactattatatggtaggcaccactatgttttgttgttttgggcaacttggtaaagttagatggtttaatttattattaaggaaagaagaaaacgatggtcatctcaccatcttcctaataattgataggagttcactttcccttcagttaaagaatccacactgcaagttgcttcgttacggccggcttttgaaacaatctggtagttctgtactactgatgaatgcaataacatagtgatgagaggcataaagcagaatgtgatgttgggatcttatggcaagatgctttcgtagcaagctaacctgatgaaaacaaggcaacctgagcttaagtcatccttttgtacagataatcctcaaaagagagaaagggatggtgctaatcttaagtgaacatgataggtttttggacattagtggctaacagatgcatgcgtgtcctgattaccaactctagtggcgcctttcgcatgcttttcttaagtgaactggaataaccggaaagcgaggtgtgcaaatgtgcagtctatttaacagccacctcatgttttcgtccattgtcgatagacagtgcatgtctttggcaagacctttataccttagaataataggaatgtgttttgttgttgtcatttgtttgagagagcgactgttcatgatttatgggcagccatatgctggttggatacgcatttgatttcagaatattgatctgagactgcctttaggctcatatactagtttttttttgcaccattctatggttatccaccattgatgtgtgtaatttgaaaaaaaataactccataagaaacgttaaaactaggtaaaagctattattagaattttttaggactattattatattatctagggaaaatatatgtttgtttttgcaatattatttgcttacggtttctattttatgcatgcagatatgtgatctcagacctcgcaacagatgtcattgtgcatgtcagcgaagtcaaattttacttacataaggttgggctcctaatatttctccacaactgcactgaagttaactcaaaagtattatatcttttctttagaatagtgacaaaggtagaaacaagcactgctgctagacatgtattacaacttacatatagtatatcctgaggcttagccgcataggtgctcaaacttaggatttcattttcatactctcagtaacagagcatattcactattcagcatttatgtttcacatctgattgttgctgcgctatcgctttccaataagctgcatactgtttcatgttaaatttttcattggcagtatctcaataaatgtttggtgtgattagtatttatttgtaaatattagaactatagtgaccttgtcatattttcgtttgcatggaaagtttctagcttaaagaaagtgatctatgctgcatgaaaagctgttgaatcaagtaaataataggctgcatggaccacttctgtacttgatcagttgatctctgtgctagcaacccttttgcaagtaattactgttgtgtgagatagctatttaagtcctgctgtgactatcagattgtttcaacaacaattatttgactgaaaatactacttaaagaaacagtaccttggaataagagggatacactgactagtgcaattctccaccttttaagaaaaaacaaactccgacattttgcattgtacaaacgttatttcttataaatgtttatgttttcttgctggtgaatggtgatgattggtattcagggaaatgtcttattgacaaacataactgaaaaaatatttttgattttgattgcttgtgcagtttccccttctgtccaagagcagcaagcttcagaggttagttattaaggccaccgaggaggggactgatgaggtccacatagatggctttcctggaggagtgacagcgttcgaaatatgcgctaagttctgctatgggatggttgttaccctcagtcctcacaatgttgttgcagcaagatgtgcagcagagtaccttgaaatgactgaagatgtggacaagggaaacttgatattcaaaatcgatgtcttcataaattctagcatcctccgtagctggaaagactctatcattgttctccagagcacaaaagcactattaccttggtccgaagagctgaaggtcatcggcagatgtatagatgctattgcttcaaagacatctgtggatccagctaatgtaacctggtcatacagtcacagcaggaaaggaatgagctgtactgaaatagttgaatcaacaggaagaacatcaatagctcctaaagactggtgggttgaggacttatgcgagctcgatgttgacctctacaagagagtgatggttgctgtcaaatccaaggggagaatgtcacctgaattgataggggaagcccttaaagcatatgctgtcagatggctgccagattcttatgatgctttggtcgcggaggattacatgagaaggaaccaatgtttggtcgagactataatatggttattgccgtcagataagacatcaggttgttcttgcaggtttctcttgaaactgttgaaagttgctatattggttggagctgggcaacatgtgaaggaagaacttatgagaaggattagtttccagttgcacaaagcttcggttaaggatctcttactacctgctgcttcacccagtgatggcgcacacgatgttaagttagtccataatcttgtgcagagatttgttgcaagaacagcgatgtcccacaatggtggttttgttgagaaatctgatgacaaaatgattgagcttaactttgaacaagaatccactttggctttaggagagctggttgatggctatctatctgaagtagcttcagatccagacctttcattgtctacatttgttgaactagcaacagcggttccagaagcagctaggcctgttcatgacagcttgtactcagctgttgatgcatatctcaaggtatgttcataacacttacaaatatgtgtatagtactaccctgtttgggattgtgactcatcaataagttactcggtgctgcactcttctaaaactcaagattaatgcatttttatttttcttttgctctggcatagaagcagacttgataaatcacttgtatccaactcaacccctgtaaatgttgtatgttataacttataacggcatctgatcatttgcttctttctaatcaggagcatccaaacataagtaaagccgacaagaagaagatctgcggtctgatagatgtcaagaagctttcaacagatgcaagcatgcacgccacgcaaaacgaccgcctaccgctccggttggtggtgcaggtcctcttcttccaacagctgagggcgggttccagcaatgcgcttgctctaacggatggtggaggacacacgtgcgcaaagcctattatgaaggatcagagtgacatttgcgaaagacggataccaaggcatccaaactcgctgaacaagcaagcgaccagcctaagcgcgagagaggtcgagcaccggaagagcgagcacaggggaggaggcaggaacagcttcaaggaccagcttggcggcttccttctgcagtcaaggtccaggaggatctttgacaagatatggagcagcaaggggcagggagagaatggcaaaggttcagagacgtcaggtagctcacagagcccgccattgtcggctaagcctgcagatgtgaagccctctcccctcccacctcttaggaacaggagatattctgtttcatagggttcttgtttacttcttttaatttagctctgggttaggttgtacagaaaagataagttgatcagctggctgcacatcatttttggtttgatccttgctcagatcagtgaagagaaaggtgtgggggtaagggtgtaagcactaagtactaagcacttgttctacctgctgctttctgtatgtttatcaagttgtagcttactatagtgtcatcttgacttgagagagatttgctagggccttttattggaaatgtctatgaacaagaagcgaaaaactaatgaaaagggttcatgaggttggtgtttaacacttatcctgttgtttataccagaatacttgagattgcaactttgcaaggcatgacattgaacttaagagtaatggattgcatgttggcataagtggacttgatttttgcactggacttgtctggctactgcactatttgccatcacaaaaatcataacactacgtgacatctccaaattcagctatcactgaacactgatttagcaaaagaattggcgaccacagaagattcaatcaacggagctaaaaccacagcacatccaacagtgaagactggtgaatctggaataatatgcctcaaatcatataagataataacatggaagacaacctctcccactaggcaaatgtgcaaagctagcatgttattatcccttcgcaagttccatgccaacaagagtaaattttctcagccattcgaaggtattgagctaagtactagcacattagctttactaataaccacccctcagagcaaggacaagatggaggacagagccaccttcgatgttatagtccttcgcagtcttgtcgtcggcaagctgcttaccagcatagataagcctacaagaagaaaccaaatacttttgtcagctcagataatactagtcctagatatatagtagcagaccacctttgcaccgatgtgtgaaaaatttagaaactggtttgagcagaatatgaaatgcagttccaagaatatacacctttgctgcacgggaggaatgccttctttctcctcaacacgctccttgatcctatcgatcgtgtcggtgggctcaatgtcaatttcaatctcttttccagtgagggtcttaaccttgatcatagtgccacccctgagcctgaggaccaagtgaagagttgactccttctgaatgttgtagtcggccagtgtgcgcccatcttccagctgcttgccggcgaatatcaaacgctgttgatctggagggatcccttccttgtcctgcgacagtgaacaaaataacttgttagcttagtttccactgaccgaagtagctgctacaaactgtcactgcacttgttttttacaattgtaagacaggcatcgacaacgcagaattatggatgatattctgatcaaactggcaacaaacgatatgataggaccaatagaccaatgatacgcttctaaatctcatggaatcgatcaatcattagacaaagagtatggggaccttcactgaaagaatgaattccataaaggcagtaaggttcgcatgtctaggagaaataaaggacaacgtcataaataatgagataaaatatgagtatgccattggaccacaccatttgacatattctccactaccctaggcagcttttcaagattaccatctatctttatttcttgactattgactaataatctatatactaatacaacacacaactcaaagcatctttaattccagacaagtcaaatttcatagcaagggacgatgttattgattatttattgaattgtacagtactattcaacctgacaaacattgtgcaatcacatggaaatggagcgttcattatcaaatttgcacgaattcggcgatctcaacctcaagaggagcaactaccgtattcatcctcaatgttaatttctccccgaacatattatcctactaccgtattcatcctcaatgttaatttctccccgaacatattatcctttcgtgcttgatctaattttaggcatagctcaaaattagtgcaactaatctacaaactgtgaatggacaaaaatatacagcttcagcttctcaaaaccacttcccccaattcgaacctgaacaaaacccaactctgatggcacagtaaataactaactagggcaagaaccatcgcgcgacacgggcgcgggctagatcgatcgatcggtcgatcaagcccctcccccaagagggaaacacgaccagcgacagcgatccatccaacgccgtcgcatcattcacagctatagcctagcttggaggaatcaaacctggattttggccttgacgttgtcgatggtgtcgctgctctccacctcgagggtgatggtcttccccgtcagggtcttcacgaagatctgcatcttcttttgctgggatttgcctcctcctccttctccctctcctctctagtggcgggcggcgaggcgaggcgagagctgcgtgaggaagaagcggaggcgaacaaaaaaaaaagaaaaaaattccttccctttttttttcccctcttggctggatttttcggtggctcgggccgcgtggatttataggtagaacggacggtggtcggcgagtcgtctcgggagatcggacggtgcgggtaaactaggttttcaattacttttcacgttttttggtggctttggttattgttcggattatatccctgttttcggctcgctttcgctttaagattcacgcctggtgatcagtttctgactctgatactctaaagctttaagattcgcgctcggtgataagtagatcttgttgctaggatgatttgttttcagaggacggggtccgacaggataattggataaattgtagacagaaaaattagtcgtataaatggaacaaatatgacaaagttaataaatagcttaaagaattattgaagtaaggtttgatttagaaagttttaagagattgtaagcgtggcataataattctaactccgttctaaaatataataatctaggatacgtctcatctaggatgggaagagtaatgacaagtttaaagaaatctttctttatataactgaattcacatcgtgttacggaacctcatatgtataaatttccacaaggttagattgctgtagatatttccgaggctactatactactacctccatcccaatatacctatcatccttctctgctaatactctctatttagcaaaaatgactacttattccgtttcacattataagactttctagtattgcccatattcatatatatatatatatatatatatatatatatatatattaatgaatctagacatatatgtgcctagattcattaacacatatatgaatgcgggcaatgctagaaagtcttataacctgaaacggaggtagtataatactctctattaaatgatacttcctccgtttcacaatataagtcattctagcatttcccacattcatattgatgttaatgaatatagatagatatatatgtctagattcaataacatcaatatgaatgtaggaaatgctagaatgacttacattatgaaacggagggaatatatggttggtaggcagagagtagaatggagaaaattttgatttgatgtgattgatatgacaaatatgaactttaaagtga

SEQ ID NO: 7165 - DNA, 28291 bp, Oryza sativa
ctagtgttgttgatgttagactttgttttatgctctgcagttgattttgtttgtggtgtttttggtagttgggaacatacatcagtgttgtttgggtggttttgttctaggggtggggcattaccattatgtgctacattgttgccaccctgcttgcttccccccttgctcttctcttctccactcttctcttctcttgttgtggtggtatctttttgtgtgaataggcttgcttttgacatgtagacgcaatccaaaaccttggcagctagttgtgcattttttccgtatgttgtgtcagaatgttctcttgtgaaccacttgcaaactgtggaaatgtcatcaatgagctgcatttaaaaaaaacacaatagaaggtgggtaaaaaaatcatatatacaaaactagggattaacaaaaggaaaaaagcacataaatcattataaaaaatgtattcatcatttaagtgtggcgaggagagggattgaaaagggtgattataatctgattggtaggattcatacaataggagtgactatattggagcatacatatacaaactaggaaaaaacaatttttttaaaaaaacagagcatttggaggagcaaaaaaaattactcgtgggttaaatgatttgctatggtattgccagagagcatcgttgcatgacatgttgctattgttgccctgttgctcaatgcaacgggcccggggatcctctagcgtcatatacttaatttctccattgctttgatacgagaaaataaacagagtatgatctaagaaaaaaagaaacaaattgacacagaataaaatttttctgttgtttttacttactggtcgctttccaaaatctcctgttttgcattcatctatttttgaatactcttttatcattccgcctttccaaacagagattctaggtggtggaccaattgggatatttctaattccaaaatctttgaaatcaagataattaatctaaggaaacaacacaaaagaaaaagaataagtcaatctttagaaatattatgggtttaaaaaatgacttaagtaataaagaagagatgcatacagcaagtaagtgtccgcagccaccaagggttttgatgtttgttccttgattaactctccttttggaacttggctatgtatgtcataagccattcataaacaaactttgacaagttccactttgagctggacttgatatcactcagaggttcaaggtattttgggctggggtgagtgtctgagttggggcaaagaaaggttgatagtgcaaccaccatgaaacaacgtaggacatcatcttctgatagtttgttcacacccttgtcgctaagcaacttagtgccaaagaaggaaattaagggttttgtgctcccaaaatgctgatgaaaaaaatgttttcctgcatcattgtcattcttgatctctaaacctccatttgggataccaagtatgaagttggtggtgtttgggttgattggtatggatctcccattgacaactatatctgagcagctgacatcagtgtgactagctatccatttgacaaaagatagtggtatagcacacctttgaaagtttagaagagaaccaaaagcagaattctcaataattgacctttgctcgttgctaagcccttcaatcaaattggaaaagtatgtgatgtttagtctgcttcttggttttggggactctgcacttccagatttatcttggtcatattcaagttttgtgcgctggaagaaaaaaaatagagatgtaattatgtcttgttaacaaagaacaacataaactaattaacatactagatgtggaaaaaaaatgtttaggaaaaaaaagacagaaagtgataccttttgtttttgtctccttactggtttgtctgtcctagctcttttccttttgatcgatcctgaaaactaacagaggcaaaacaagtatgaagttaaagttattgatagctgtctgtggtagtagaaaatgatattttggaaaaaaaaaggaagaaacatatataccagatcttttaatgtgctgacgagatctttttttgttatgtatttgtcagaatcactggtttcttcctcttctgaaatagagttggcataatcagaatctgccaccttgttgtccgacttgctatttgatgaacattcatcatctgatgatgtcctgtcacttgccatactggaaaaaagaactagagaagtaagcacattaaaaggaaaaaagagagatcttgtcaaatgtcttgatattttcatgtgtaaccaatcaaaccccaaaaaaaaaaaattctcaatgtcctgataggctgctaagccacatgttaaactgtgccaaaaaaaaaagaagcagtgccaaattcaaacaataccacttgcatcttgttgctttttgagaattcgtgcaaaggttgaaatcatgtgcaaaactgcatatgcaggtataacattattaattcacaaaatttaatgtgttgcacagaaaatttgattactatctcatataagtaaatgtcaactacaacatcttggtattgtgaaaaaatgtgttaactattagcatgattatagttgcacaaaatcataattaaagttgcacgaattaataaccaaagttgcacaacattaaaaaatggcgaccgtaggaaataggaaggtgcaatttttgcatataaaagtaggacaaactggatagatatgacattatattattcgaccgcccacatttccaagctcaccagcaaaatcaaaaaacttagcagaaggaaatgtactcttcttggcctgcagcaagctcctcccccgtagatccaacgctccctgaaaacaaaatcgtagtgagttattacatctgagcatacaatcagtctgaagttgtgcttgtttataaccaaaattaggaaaaaaaatcatatagtagtcagctaaaaaagaattagttgcacgatttattaattgaaattgcatatatttataacataacttgcgcgaaatgtatagtattagttgattttgctatttggactatgctgctggggtgtagatggttgaagcggaaaaacacagtaaatgaaaaaaagagacacacttgatgtcgtgtgttcatgagaaaaaaaagatacaacatgaaaagtagtatgggttgcaaaaagcaaaaacacatgaaaagttggacaaaaaaaaactttataaaccaaacttgtagagacttaacctagaagttgcccatgtttgaaaaaaaaaggcaattactaagctatataaaaacatattaatggttgcgcatgtctagaaaagtgtcaactacaacatcttgggtgtgcaaattctaaaaaaagaaatcagtactgccaaagagatttatgaaaaatgaagaaaaaggtaactaataacaagggaactaacttctagccacaagctccaccatcccactgtcgaaccactgccaatccttctatatccaatccatccttagactactccccaagttacagccaaaaaattgcaaagagagtcactgttgattatactactactgtattagcatccgcagtttgctcaggtttttcaccagatcaggtatttcaggtttttcaccagaaaaacctgagctcgccaaacatccaaaagaaccgccgatttgttgtggcgttgatcccgagtcccgcaaaacaccaaatgaatccccttcccatcataataaaaagaaaaagaaaaggcaatgaaattactaagaaaacaagttgtctaccaaaagtcctcacttgtatgcatgttttcccaaacaacaaacgctatttatcaaagtaaatggaaatttggttaaaaaaacattagttgcacaaaattattacatgacttgcacgaaaattcaaaatggctactacaatagtcagggagtgcaactagcgtagatacataattttcagaaaaagaaataatgaaaatttaaggccatgtgctgatcgaaagcataggttttagtttgaggccatatttaaagcagtaaataagtgaatcattgatacaacataactgtacatagcatatgaagagatatgctttatactgtccatttatacagtactatcgcaaattatattatccatttattctctgtattttagtttcagattaatcctactgtttccattaatctcaccctcgtttgcgtttgccactgtcatttgctgagttgctaatgacacagaccgatgcttttgcgaattgcgattactctcctctctcagtgatctactggtaatctcaaaaagattaaacataattgataggagcagagcctggagttcatttttagggaggcttatctcagattgatcactgatggaatggaagcaaaagtggcttagtatgtcacagttgagcaggagtatgtcacagttgagcaggactaccattaaaaaaaatacacagcacacaaaacaacagatagcttttgtctacaagcagaaaacacaactcctccctgtatacagtgacactgaaatcccaaaaaattgtggtatccctgtatacagtaacctctgattaaactccctgtataatctgacaatactggggacaaatgtaagaacatttgctgggatttaatgaaatattggttagttcttgagctcgaattgctaccaaatccctaaacccctttctaaaatgccacggcacagaggtcatcactgccctacaggattaacgactaaatctagagcaaaaccatgtgtgtgcattccatgatatatcagatccaactagtgaaactgcaaaactccctaacaaatgaagttagagagaaaataattagtgccaaggtttagaaccaggcagaggcacagcccacctcccgccgactatatcatacacgatgtgcagtaaaaccctaaaaaaatttcccaaactacatcgaacaaaacatcaaagcacacacaccatgtggtttcagatccaggatgctttactcgacattgggcaaaatcaactcaaaactcaagcaatgaaacaaactccacgggattccccccccttgaaatggtagccaatccagccctaatagctcacaatccacaggatagaaatctggaccaaaggaaatcaggccgccacggcgtgaggatttgaacaaaaaagagagatgaaaaacctgcagtgcatcaactcctctcccccgcctctcttctccggcgccgtccgcggccgctcgcggtgcacagcccacctctcgccgcccccctccccttcccctccactgcctaccttggaagaatctccggcgccttccgctcgcaggactccgcctcctactcgagaaacagaaacgtcgagaagcagaagcgctctctagagagtcacgggtgtggtggatttttccagagctatttgtgggctgtgggctgtgggctgcgggctctgggcttattagcaaggaaaaggtgatggaaaagcacgacccatataaaaaaagagcctttccactagcccgatagcgcgcacaaaagttgactgatcgattaaaattttgcaggcgactacaaaatagcaaatgcgttgtttttatgtaaaagtttgaataatttgtgttactcctctcaaaacttaaagagaactgtaaagaaagtagccaacttggttggtaacatatgacaaagcctgcatagcgcataaaggaataagttcactttaggtccgatcgaatataagtcaagtttgatttgcattcttcgaccgcaaaacttggtacaagacgtgctccaacttctaaaactagggcaaatcaagttcatcggtagcatttgagagtggtttcctatatgtcatcctagttagcaaaaaataaaataaaaaagcaaaggtcatgcgggacccacttgtaagtggccaaccaccatcttcaacttttgtctactctttctctctttaatccttgtggtggcggcggcaggatctcctggaggtcgtggcgaggaaggtggacatgccagcaacagaggagctcgaggaggccacggcgacatgggagcttgatgaggccggcgagaagggtgctcgccacgctgtccccatttggccctcacctccccaatctcccccgctgtgctcgttggccggcaacaccttcacggagccaccagtggacttattatttcgtgcacaaacacatactccctctatcccataaaaaacgaatcaaatctagtatgatgtaacacatctgttactagattggtttttttatggaacggatagagtacgtgatacgccccgatatggtttagaaaagttgctcacacggcccaaagagcccatagaagttcggccttttggggccaattgggagcccaccaaggagcaatttttatgggtgggcttcgagccttccttgtccagcgtggggcggggcactcccacatccaccgcatcccaagccgacggccgcggtggcgacccgccgagtcgccgcgtgccggtgccgtgtggaccgggagcgcgccgtggcgcggttgaagggagccccaccacacccccttgagttcttgtcgcccactcagcctcccgtcgctgccggcgtggcgcccaccctaggacgcccgccacctgctcgtgcaaatgcgagagccagagccggccacagcggtgctacccgtttacgcgcattgtcgttggggggaagagtgcggtcatgattcgcgtgtgcctccagtaccgtcctgttggcaggctcacagcagagccgctgcggggctccggtctctgtcgtggagtcacggaactgctacttcgtcggatccttcatggagattcaggtaccaacctctcaaatttagctggtttacaactgaaccaaggtgaatttggtgatgattgttcaatgttcagtagatatatgtctgattatcacgtagtagtaggattgtaggagttgtttttcccttcttgaggatcttccccaaccaagtcaaatttctttgcagggaacaaatggtgcaattttcttgttccgaagaagttgacagcacagaaggaaactcacacgcttgtgcatatggatcacttccactataattctataaaggtcagaattagtatttgctaatttatcttgtaggtagttactgataaggctaggaattagctgctttggaaaggtagtggcatgctggcatgcgttctcttgttgcgtaagctcatgggaacagcatgcaactctaaatataaatagcatgcacaatcttcttaagaacaggcatatctttgatggtggaatagtgccagaaatgtgtaaactgaatatcattcttttagttaggaacacaaaagggggcaaatgaaacattctcaactctcaaagagtgccccactagatttggttaaaagggctggcatgatgtacctaacaaatcatttaagaactgtcttagacatgtaggcagatctttctagccacacagtcctgcaatatcacaatgtgctaattattctttgacactttcttgatcacctagatgtcaaaaaaaggagtgagtgtcataggtagagttttctggcccaccgctcgtgcgaagcagcaaaggtcactctcctaggctgaaatttatattccccataaaaatctacaattgcagtgttgcatcataggccaaaccgttgaaaatctgatgtgtgaatcatatgtgaaccttttgaaagctggaattttttgctggacatatataggggcgagtatgcatgtttggcatgatgaatggaccccatgtatataccctgtgaagtcgggtcctgatggcaacaggccagataaatgacgtctccatgagagttcagttagttgaggccagcttatgtgttcttcaggggtatgtctattgctcccaactcccaagttattgccacgcatgcaaaatattacgtgaatggtacttcctccgtttcaggttattagacgttttgactttggtcaaagtcaaattgctttaagtttgatcaagtttgtagaaaaaaatagtaatattttcaaccaaagacaaatttattatgaaaatatatttaattattgatttgatgaaactaatttagtattataaatattactatatttgactataaacttagtcaaacttgaaacagtttgactttgaccaaagtcaaactgagggctaggaaaaaaaatcacataaacccctagaatgacaagaaactgaaataacccagagagatatgactacgtgagataaacagaccatcaataattccgtcctccttttgtattccttgtccttgtgggagggagaagttacttcttctgaattttctcttctttataatgggcctgtttggagaactatcccagggatattttttgggctaaagattatcccaccaaaatagccccctaacaaaatagccctcttgctgtttggatccaaaggctatttagctattattgtaccatcccaatcatttgcctccactaaaagtatacagcagccggatcttctatggctaatccaatacaggcacatacaagcatacacaattccttacaagcacaaacacataatttgtctcaaatatataagcaagtatgtaaaacaatcgtgtcacataaaagatacaattccatacaacaatcgtctcacataaatatacaattacataaaacaattgtctcacataaatattaaaatccatacaacaattgtctcacataaatattaaagtccatacaacaattgtctcacataaatattaaagtccacacaacaattgtctcacataaatatacaagtcctcaaaccgtaaaaaaaaattacaatccattaaacaaagcatttgccaagtcatcgcggaagaaattcatgttgctatcctcaacaagaggttcatcttctggccagttagagtgaggtgatgtaggcattggaaaataatctgcatccgcatccagctccttcctcgccgccaccctggaggaaggcaccgtactcgtggaggtgagggaactcctggcccgacgccgcctgggtgttgaggtccagcgtgtccacgccggcgcggggaacggatccgtgggaagggccggacgccgacggctgcgacgaccaaatgttgccggcggcggacgaaatgggatcttgggagaagaaatcgaagccgttggggtccatctccgcgcggatccggtgcaaggcgatgcgtcgacgacggatctgatggccggcaacgcgggtggggtgagtcgccggcgtggatgcctctcggtggatctgaaggaagggcggcgcgattcgagggagagggcggtgcgggtgaagggccgggcggcggcgcgggtggggggagggggaggcgaagctggggccgggcggcggcgcgggtggggggagggggaggcgaactggggccgggcggcggcgcgggtggggggagggggaggcgaagctgggccgggcggcggcgagggttctggagagcgagcgagggcgagagcgaggggtgagagcgacgatttctgccgcaactggatccggcacaagtgggggaaagtgggaatcggtggggcccacagcaaatagccccaattagcacccctgggggtgataattttttggggtgggctatttgcaaatggccctaaaatagctctcatgtttggatccccttgagctattttaaggctaaaaggggtgggctaaaaaaaatccataggatccaaacacccccaatgttttggtttaggcccaaagcctcaaattagctaggccatctaactggattatgctagcttaaacagttttatcaacagagatctacctggtccaaacttgcttcttatctagccagattagcctcgcaactgaacacactaaatcaatttttgcatgttgcttaacaggctccagttttggtttttatcgttttaatcacttccctgttgagaacactgtatggaatggaaaccaagttgattctgtccatgcatcctgcaggctgcctggcaaacaccacacaccactcaccggtgcaacccgcaagtgcagccgtgtgcaggtggaagacgaacagtattaggggagcttaagattttgaaaatcagttggtgagaagctcacgggtgagaatctggagactttaattcattttttgaattctaaaactataacttctcaaaatcagagtgaaaatttggactgtttggggaaagcttttggtatctgcagattccagaaaaatctctagctgcgagaagctctcccaaacaggctcaaaacccgcagttagctagcgtgcgccaagcccctcctacattccggtgcgcgcgcgccagcgcccggagcccaccgcgagtcgtcgaatgtgcgcagagccccgtccctttcgtccgatccctcggcgacttgcttccccggccggcagcctactcatcatgcacgaacccatcgccccaaaaaagagccgcgcatcgtgcgcagcataatcatagctatcgctgaaacgcctgcaccttcccctcctcctccattcgcttacctcgccattgacatcgcatcagctcttctccatctgtatctgtccgtttttctttcatccatctccgtcttttcgtgcaactctccagcttcagcttcagtgccttctctctaccaagtacgtgaagaagagcttcatctatgcctctactagatcagagatgctagctagcgctctagctagctgctagcaaggagcgcaccagcaagggcaccaccactggcttaagtacatggctttaggggagagggcgagggcgagggctcctcccatggtcgtgcggcgcacggccgtcctcctcctcctcctacatctcgtgttcgtcatcgccgcagcggctgccgcggtggataggcgtcggccagccgaggcgatcgtcggcgggtggcggcagcggcggcggctccaggctctgatgcaggagaaggccacgctgctggccttgaagcggggcctcacgttgctgtcgccgaagctgcttgctgattggaacgactccaacaccgacgtgtgcggcttcaccggcgtcgcctgcgaccggaggcggcagcacgtcgtcggccttcagctctccaacatgagcatcaacggctccatcccgctggcgctcgcccagctgccgcacctccggtacctcgacctgtccgacaaccacatctccggcgccgtcccctcattcctcagcaacctcacgcaactcctgatgctcgacatgtccgagaatcaactctccggcgccatcccgccgtctttcggcaacctcacgcaactccggaagctcgacatatcgaaaaaccagctctccggcgccatcccgccgtccttcggcaacctcacgaacctcgagatccttgatatgtccatcaatgttctcacaggccgaatcccagaagagctctccaacatcggcaagctcgaaggcctcaacctcggccagaacaacctcgtcggcagcataccggcgtcattcacccagctgaagaacttgttctacctcagcctcgagaagaactccttgtcaggttctatccccgccacgatcttcacaaattgcacgcaaatgggtgtattcgacctcggcgacaacaacatcaccggcgagatccccggcgacgcctcggatagcctttccgacaggttcgccgtccttaatctctactccaacagcctcaccgggaggcttccgcggtggctcgccaactgcactattctctacctgctggacgtggagaataactcgctcgccgacgatctgccgacctccatcatctccggcttgcgcaacctcaggtacctgcatttgtcgaacaacgtccatttcgcgagcggcgacggcaacaccaacctggggcccttcttcgccgcggtgtcgaactgcaccagcatactggagatcgaggccggagcactgggcatcggcgggcggctgccgagcttgctcggctcgctgctgccgcctaacatgtcacacctcaacctggagctcaacgccatcgaaggcccgatccccgccgacatcggcgacgtgataaacatcacgctgatgaacctgtcgagcaacctgctcaacgggacgatcccgacgtccatctgctggctgccgaatctgcagcagctcgacctgtcccgcaactcgctcaccggcgccgtgccggcgtgcatcagcaacgccacgagcctcggcgagctggacctgtcgagcaacgcgctgtcggggagcatcccgagcagcatcggcagcctgaagctgtcctacctctccctgcacaggaaccagctgtccggcgagataccggcgagcctcggccagcatctcggcattgtgcggctcgacctctccagcaaccggctgaccggcgagatacctgacgccgtcgccggcattgtccagatgtcgctgaacctctctcgaaacctgctcggcggccggctgccgagggggctcagcaggctgcagatggcggaggtcatcgacctgtcatggaacaatctcaccggcgcgatcttcccggagctcggcgcctgcgccgagctgcaggtcctcgacctgtcgcacaactcgctcaccggcgtcctcccgtcgtcgctcgacggcctcgagagcatcgagcgcctcgacgtctccgacaactccctcaccggcgagatcccgcagaccctgaccaaatgcacgacgctcacctacctcaacctgtcgtacaacgacctcgccggcgtcgtgcccaccgccggcgtcttcgccaacttcacctcgacgtcatacctcggcaacccgcggctctgcggcgccgtgctcgggcgccgctgcgggaggcgacaccggtggtaccagtcccggaagttcctggtcgtgatgtgcatctgcgccgccgtgctggcgttcgtgctgacgatcctctgcgcggtcagcatccggaagatccgggagcggctggcggcggtgcgggaggagttcaggaggggccgacgccgcggcggcggcggctcgtcgccggtgatgaagtacaagttcccgcggatcacgtaccgggagctggtcgaggcgacggaggagttcagcccagaccggctcatcggcacgggcagctacggccgcgtgtaccgcggcacgctgcgcgacggcaccatggtcgccgtgaaggtgctccagctgcagtccgggaactccaccaagagcttcaaccgcgagtgccaggtgctgaagcgcatccgccaccggaacctcatgcggatcgtcacggcgtgcagcctgccggacttcaaggcgctggtgctgccgttcatggcgaacggcagcctcgagcggtgcctctacgcggggccgccggccggcgagctgagcctcgtgcagcgcgtcaacatctgcagcgacatcgccgaggggatggcctacctgcaccaccactccccggtcaaggtcatccactgcgacctcaagcccagcaacgtgctcatcaacgacgacatgaccgctctcgtctccgacttcggcatctcccgcctcgtcatgagcgtcggcggcgtcgccaacgccgccgacgtcggcgcctccaccgccaacatgctctgcggctccatcggatacattcctccaggtaaattaaccatcatcatcaagcaaactcatcatcatttttctcgtgacaaattctaattaatcgattcgattctgaagagtacgggtatggctcgaacccgacgacgaagggcgacgtgtacagcttcggcgtgctggtgctggagatggtgacgaggaagaaaccgatcgacgacatgttcgacgcggggctgagcttgcacaagtgggtgaagaaccactaccacggccgggccgacgcggtggtcgacccggctctggcgcgcatggtgcgggaccagacgccggaggtcaggaggatgtccgacgtggccatcggcgagctgctggagctcggcatcctctgcacgcaggagagcgcggccgtgcgcccgaccatgatggacgccgccgacgacctggaccggctcaagcggtacatcggcggtgagaccacggccacgttcgcgtcgtcgctgggcttctcatcctcaacatttgaagatctcgacgactagcagcaggcagcagcatctcctaaggacgcatatgaatcatgcatgatgtgtaaatagctaggaatttagctaagaggcaggaagattatttgtcaggaaattaaagaagtgtgcaatttgtgcagaaatattgcgagatttataggattctttggaagtatctgattaaattttgatggagtgatatcttcggttatagatatcgataaatacattaatcccagtgtgtagctgattcagtcgtattgcttatgcatgctcttccttcctatctctgcgtctgttcaaactgtatatgctgcctgaagaacatgaactctagacaaccatgctaaattgactctagcttagcaagaaactgcagtgtaattaaatgagaagcaaaattgcgaaaaggtcgactgaaaaaaaatctaatagctttgacacctttcttcttaggctttacaaagagggttaggtcatgaatgacatggtgtagctgcacataaaattttcagaccaaaatctggtctatatgactctaagctcatttattaaggaataggctggtgacaaagctggttattggaaaattgtacacgcatcgttgaggtaaaccgagcgtgcgatatgagcacgtttgaggatgtgctgtgcactggcaaactagcaatgcctaaaatggaccagtctagcaaatataatagagggcaatagcatgatcttgcatactatgcggttatgcagattatgcatatcattgttgcgctcttatccaaatattagtctactaatgttccactgatgaggattctcattggatattgttaaaggctttttttagcatgttcagagcaagtttaatagtataaccaattactagatccaattcatctatagccaatctaatagctcattcatacaatagttacatatatactacactattaatatccgatcccacctatcatacacacactgtattttggagtccgtgctacagctggctacaaatctatagcccgctgcccttctctctcctcatttatctgcttaaaatatgtttacagctggcttatagcctgctattgtatatgctctcagagcgaaaccgatcattgccgaaacttctatctacattttccggtggcaaagcatatttttgataaactttacaaaaatattgtatactcgtcttctctgcaggatactctgtgacactatataattcactatattttctgtctttcttccacaatggcggtctacaaaggtattgtccatgatattttgttgtaagatccacttcaccacataagctatctagcatgctatcgtctgttttttttgtcccaaaataagtgtttttagacttgttccaaaataagatttttttttacttcttaactatctccgttttataaattaagaagttttatcccaatacaccttaccttcccatcctctattaccatttctattaattagatccactttgattttttcctcactacaaagttttcaccagatataaggatccatttattttaagacaaagagtacatggtatcgtgagtatccactaacaaaaaggacatatacaccatggtccattccatatgcaaaactttccaatcccatcataaattcagaattcaagatccactagagaatgaaaatttggcaattgaaccctttttaaaatcttaatataagaacagatcatgtcaaaacttatttcagtaataaaccgtaacttgaatacacatagtataataacgccaaagtacaacatctcagccaaaaagggtatgttgctacgaacatcgacacactggtgcgaaattcccatcagcaagggcaccaaggtaaattgtgttgaccttatttataggttaaataggtgataaagaataaccgtggaaaatcttatcaatcaatcaatcatcaatccttctcaagccggcaattttacggatgcaggtcgtttgcaactgacatgtgggccccacagcccctcggacccacatgtcagtgaacattactgtaagggatctcaattgcaattttaccggatgttgattggtccacgtggcgtgccaacgtttaagataaatccaggagtaatgaggattaaaaaaatgctaggatatgtaaaaggagattaatgaatagaagtatctagaaatatgcaatattatgtgcatgaagtgaatgatctagatgcatccagtcatgtgtgtgaagttaaaaacaaaaggtaaatccaatctatatcaacgggtctcagcttttagtatctgccttctctgtaacacacacagacatcaactaatctcaagctagcatcaattggaccacatgatgttgttaaatattgagataaatcaagcatttaccgatggggggaaaaaaaagaaaaactcacttgtgtaggacaagaaacagagagagaagaggttaagatatgagaaatctagaaccttctcaaatataaactaaaatggagaaagcgagagcctttaaaaatctgaactgctgtcttattctccttcggttactccaatacagaaaccagtaacaaaaattcacagggcaaatttattaaaaaaaaatcataggaaaatttaaaaggaaagaggaaaaattgatggtaaacacatagggggccatatagcggcgcgccaaaaggtacgctacttttctagtcttatcttatcttatcttatcttatatagtgaaagcagcaagctttttcacacgaggatgcgtcacatcaaaaggtacacatgcaataaaaaaacaacaaatgggcgtatggtaatttccagaggtttctagtgccaagagagggggcaaagataataaagaaataaaaaaacttggaggcttctagtgatttctcatatagcacaacttagctaaatctatagttagcttagaccaattgatactttgtaaatcaattaactcatgttataaccttctataaactaatataccgtatacaaaagttattatatgggatcaaaagtcgcgcagagcgcaactacgtggctaacatatggtaaaaatcacatcctaggtagaaacttgtcgaggtgtgatcctccctagcgggaggctgtgaggctcccctttgtgagttcggctaggggaccgggtgcaatgccaaggaacgtgtgctcacgcaagcgaggtggatccgcggggattgggcttatgaggtggaaggcgagggattatacaggttcgggccgctatcaagcgtaataccctactcctatttgagcgatgatctttgtgtggttacaaagacttcagaccctgggagtaccagctagggcttggccggcctcttcccagaatccggctttctaagagacgtccccttactcgtagggcatggtccttcttttatagaagaaggggataccacatgcatcgcccctacactctcctcacaggaaaggggcccacattgcctatattaaaaagcatcccatgccttgggccagaagcgatccatgcagctgcccttgggtggcccccactgaatcctttcgtctgacacgggggacatcccctgtcatcccctattaaacgtttgacgactttgtgggcacacgcgcatgggaggtggcgatctgcatgtcctccccttgtgcatgatgggacggggcataccagcccccacgccgtctgacacaaagcgggacgtgggtgcgctgccacctatcccatccatccatcaccgggtcacagaccggtcaaaaagcggtcgccaggcgcacgtccatcagtgggcggcgcacgacctgccacgtcgcattaaatgcgacgggggcggttggagcgccgcccataaatgcgcctggcgaacggcgccctgcccgctcaagcccccacatggccgtcacgtggtggccgagcgagggcctcgggggcggttcatcccctcgggcccgaggggtacgacaaggtaccccaagccccccccccccccccgagggggactgggcccgccgtgcgcgccgcacaggaagagcttcccttccccctagttcaggtatcctcgggcctatatcaccgacaaaacttgaaaccttttatatatatataaaaggtcttaaaaaaatctcaaaaaatcacacatgtaagtaatgtgtaaacaaataaccctacaaagttgcacgaacaaattcaactccctttatgagatataaaattaacaaatcatagaggaaagccactatcatctttttctccaatgtttctcaattttatatctcataaacggaattgagtttatttttggaactttaaatggttgtctaatatcaacttagctatttgtgtgatctctttcaaaagatcagctgtttagctgggagggggtgtaggataaagctgtcctatatatgatatccaagaattaaaaaaaaaacactggctagtaaagtgtaaaaaaagaaatgtcaccaaatagaaacaacaacaaaaatattgctgtagtgtcaaacatgcctcgtccacatatatgcacaaacttcgcgccaccgcactaagctctaattattgctcggatggcgctattacttttgtacctatataagtgaggtcagcgccaagcttaatagcgctaaaccttacggatagggatttcgtgccaatgtgataatgttctaaacgctaaaaggtatgtgcgcggatacattatacttcagcgtcatcctcgacgatgttgaattgtgatttatttctaaaataatttcttggcacggttctttttgttgtaataagttaaaaaaaaccctaaattgtcaaaatttcggccactagttgggatattctgatctgatccctcatcaccgctagcagatctctgtaatctcaccactgaagcactgctgatcagcagccaccaccaccggtcacccctgcaggcctgcagctgctccaacggctttccccctccgtcacccactccctatccgcctatcccatcccaaaacctcctctcccctccccccccggcagccgccgcctccaaagttctctgctttcgtcaccgccagcctccctccaaggtaaaccacagcaccgaatgtgaatcttgcagttcgcgagctgaccagctgatctttttgtaaagaatcgtttggtcctgcacctcgctgatcgcggtctgtttcgctgttttgctatgatgcgcaggtattgttcgatccggagtagtgagtctatgcccttgtccggatccgaatggctgccctgcggatctgcacgccgggtggtggtgctccggaggccagaagaggcagtcttgctgctgccgggagcgcggttcagcatggaccggatttgatcgggttcagttcttgggtgctgccaatcagcgccggatatgccgtggaccggaggcacgcagcagctggtggagttgccgcatgccatgggctctcgtgtgctgacagtgggaggaggaagaatcatcccagggcaagtctggtgaatggtgtggtttcatctctggaggacagtagcggcggggagcctgcgctatgcgtatctgattcacctgaagacgctagctccagtggaaaagtgttgtccgatttgcgtcgggacatggtggatggtattagtggtattccaagaatttctgcgggaaagaagaaggggatgaagttcaggagaagagggcagggtggaaatagattgacacggcgtagtgctccgaggcgtgccagtggaaagagtgggcaagatcagaggattttgttgagcgaggatgatattgctgcaattttgtccagtgttacccatgaatctagcatcgaggagtgcaattctgttctcatctgtctcgagaagcatagtgataagacagctcttggtttctttgagtggatgaaggctaatggaaagctgaagggaaatgctgaggcgtatcacctagcgcttcaagcgatcgcctggaaggaggattgggaagcagctggacagttgcttcatgaaatggttgctgattcgggttgcgctctggatgctcaagcatttaatgggcttatatatgtttgtgccaaacggaggcttgttgactggggaacaaagtggcttcatatgatgcttgaaagagatgtgcagccgaatgtgtctacagttggtatgcttatgggactttaccagaggattgggaaccttccagaagctgaattcacttttgctaaaatgaggaaatgtggcattaagtgtgttaatgcctactcagctatggttactttgtatacacggttaggccattttgccaaatctgaggaggttattactctaatgaataatgatgaagtagttccgaacatggaaaattggttagtgcggctaaatgcttattgtcaacaaggcaaaatggaagaagctgaattggtattgaagtccttggtagatgaaggaattgctctgaatgttgtggcatacaatacggtaattacaggttatggaaaagtttctgacatgcagaaggcaatggaagtgtttgataggcttaagagtgcaggtttagctcctgatgaaacaacctatagatcaatgattgaaggttttggtagagcagacaaatacaaacaggcaattttgtactacaggaaactccgaaactctggatttaaaccaaatgcatccaacttttacacaatgattaacttgctagcaagacatgatgacagtgaaggtgcaacagagattctcgaggacatgcgggcagcaggctgccagtgttcatcgattgtcactgttcttgtccgagcatatgggtcagtaggaaggatgcataaagttcttcagattctaaaagcatgcttctataagaagattttgtttgatgccacctcatgctctattttagtaacaggattcgttcaaaattctctagtagaagaagctatgcgtgttttgcgcgaaaagaagtggaaagattctgattttgaagacaatttatatcatatcttgatctgttcttgcaaagaggctggctgttgtgatgatgctgtcaggatatataatcagatgcctaagtcggcaacacatccaaatctgcgtatttattgcagtatgattgatgttttcagcatcatggagagattcactgatgctgaagctttatatcttgaactgaaagcatcatcctgtgttcttgacatgattgcctacagcgtaattgtgaggatgtatactaaagctgggcgaccagaagatgcctgtttggttttggaagacatggagaaacaaaaggaaatagttcctgataagtaccttttccttgacatgcttcggacttaccaaaaatgtggcctactcgagaaattatctgatacatattactggatactaaagagtcaagttgaattggatgaagccatgtacaactgcattataaactgttgtgggcgggcaataccggttgatgagctctcaagaatttttgatgaaatgattcaacaagggcacttggccaacactgttaccctcaatgtattgctagacatatatggaaaagccgggctttttaataaggcagaaaaggtatttctcatggctcgcaagcagggtatggcagatatcatatcatacaataccattattgccgcgcatgcaaaaaatggggattttcgtagcatgatttatttcgtccagaggatgcaagaggcagggttccctgtttctctggaggcgtacaactgtatgctggatgcttacggtaaggcaggacagttggaggagtttgctgctgttctgcaaaaaatggagagagcaggatgcgagtttgatcactatacttacaacattatgatcaatatatacgggagaaagggttggatcgaaggagttgcaaacgttcttgcggagctaaagagccgtggtggcgagccagatctgtacagttacaacaccttgataaaagcatacgggatagcaggaatgcctgaagatgctgttaaactgatgcaggagatgaggattaaaggcattgccgctgaccgagtaacctatactaaccttatagctgctctacagaggaatgagaatttcctggaagcagttaagtggtctctctggatgaagcaaactggagttgctgcaactcgaacatgatgtgcctaagaattcagagttttggttgcatgcaaattctggcatccgcacacgtttatatttcatctttcagtagagtacatacatacatgtgagtgacattgtacagagaactatttctgattgttctacacatcctatgggtaccggagattcagaaaaacctcctacctttccattctcttacaagatgaaactcaatcagtggatagcaagataggaacttttatcataccaatcatacaattgtaatttttttaccagaactggtttgaacttctgataataatgatcaaagattcattgagaaacccaagttcaatgtccattgtaccctctcatgtctgtcaatctgtcattgtaaaatctgtgcgctttctgcgatctcaattcaggcaacttttcccgcttgattttgacgtacctgaccaaatgttttcggtcagtttgtagttgtatggccttgtttagttacccaaaattttttctcaaaacatcacatcggatcttcgtatacatgcatggagcattaaatatagataaaaataaaaattaattgtacagttaggaggaaatcgcaagacaaattttttagcctaattagttcataattagccataagtgctacagtaacctatatatgctaatgacggattaattaggctcaaaagattcgactcgccgtttccaggcgagttatgaaattagttttttcatttgtgtccgaaaacccctttcaacatccagttaaacattcgatgtaacacctaaaattttttctttttacgaaagacccgatctccaaatttcaacctttcgtagtactactaaacggtcaaaaaaaagatgtgacggcaattccacttcctttgactatccatactaaaaagtcaaaaaaaaatttgccgaaaatgtcagcaacacctcgtcgcctccatgccttttagtcaacgcctcgccttgttcagatgcagcaggtgaggtgagagctccacctcccggagctcgaggcttccccggtgaacacctcctcccggacaaataaactaatccaaatgccgacctcgcttccggtgctcgagctcatcggcgaggcgtccgcacgtgcgccaagaacccctcatgagcaggtgaggtgatccttcaagaaaccagcaaaagaaatccaaggtcaatgccggaagaacaacaagaagcggaagaggggatcgccggcggcggcggcggatgggcgagcacggcgctgcagccggtgcggtggctgcggatgctgtgccgggagctgggcgcgacgttcgtcgccggcgtggtgctggtgtacgggctgagccaggggttcgccgggtccttcttccgcgtggcgtcggactactactggaaggacgtgcagcgggtgcagccggccaccgtgcagctcctctccgccgtcttcttcatcccctgggtcctcaagcccctctgggggatcatgaccgacgtcttccccgtccgcggctaccgccgccgcccctacttcctcttcgcaggtcagccactggaatcctgcatctcaaaatgatgagattgatgatctttagttggcgtgcatagatagtagagattagagaatcttatcagtagatagagtatgcgcacagttaaagaacaaaaaaatttgtgaagattttagcaatatgcttgctggtaagaacatcctgaattcctcctgtgtccataatgtcgtagaaattttagttgtggtggcatatttggtactccctccgtcccataatataagaacctagtctgggaccctaggttcttatattatgggacggagggagtatttggtaggcatagtaagttcttaaatgatatttggggtctgatgtggtggtaattgaaaacatagtgctagttcagctttttcaaaaggttcagggggttgctgggggtagagaattgataacacaacgagtgcttggtgatagtacatacttttagactttgtagagagaggttgagtggagactggagaggtagttccaggcacgagcaggaactgtttatgctaggtatcagcagctcattggatggaattggggatgaagatgtgttggttcaactaccatgtggatttcgtttgggactttggatatttgatgatatatgcattgtttattggaggtctagccagatcttaattagtaggtgcaagatttggtgtaagatgttatcttgccaattcttagaacaattgaagtatcaatgtgatgtatctgtgatattgcactttacaaattgctgggcatgatcattttaacaattccttgctgtagtaagtttttaaagtgagtctgagaaagtagcaaacatggaacatattgatcagaaacttatatgttacattttgtcgatttctacagcagttataaacttgacaaataaatcccatttatttctggtgctgacaggagtacttggaacggcttcagctgctattgttaccatggttaatggactaccgatgacttccgctatactttcctttgtggggatatcaacagcagttgccatagcagatgttacaatagatgcatgcattgcgaagaatggtattgataagccatcattagtcccagacatgcaaagcctttgtgcattctcatcatctctaggtgcacttattgggtatgctacaagtggaatgtttgtccaccatcttggggcacaggtcaattacagcctaaattcttgaagcttattgaattgccaagttccattttttggtatgttgcttcattgataatttaaattttgtatgattctttttgtagggtgcattaggtgtgatggctttacctcctgcaacgttggtttttctaggatttttcatatatgagctgaaaatgtatcagcataatgtgaaagagaaggtatgccgaagtgaaaagcaatattgttctatctacttgtgacagttttatttgtgtgcattgaaattttgttccctttacttgtgacattttttatttgcctgcattgaaattttgttccatttaattatgatatttttttgtttgcctgcattgaaatttaccaagttttgaatatcaatatatatttttggtgtcttcatatggtcgtacagatagaggatggtttatctgatatcgctgcatgccacttggcttagccaagctgagacgagtggcttgtgtattgttcttctgagatgtgtaacatattagcaaagttcacaataaaatgaaactgatgcttcagtgactgagattcatcacaggtcttgttaaagcaactaagacctttacggattgaatcccaagtaaacacagacagtgaactcaataggctgtaaagcataggcagaaaccaagtatatcttaatatatggtataacaatgaaagaaatacacaatatatagtttctcaccaagatgctaatgtgcaggttttgaataaggttcatatggcagtgaaagggatggctcagacaataaagtacccagtagtgtggaagccatccctgtacatgtttctttccctggcgcttagtatcagcactcatgagggacagttctactggtatactagcaaggaaccacctaatcctggattttctcaggtaaatgtttttgttttttacctgcctgcttaatcctatcgctgattagcatatttgttggataaaaggcctaatccaagtccatattggaagtttgaaacaatagcacatggttttggactggaaaaccaagtttacaatgtgcccccaagtactcttctttttgctctcaacacttctacacataatacagaagtacaaaacacagggacatcataggcatacagatgttctttaaaacagcaactaccttcatttcttctcaagttcatatcatgtctttatgatgctacctttttttttctcagggtttgtttatacttgtcaataagataatacaagtgaggtgcaataggatatgttgaattggtcctacacactaatcaccaatcactttcaagcaacagaaaataacacaatcaaggtatatcaggaaggaaacctagacaaaagtgtgccctttccttcaaactgggaatctagtatgcactcacacgggttatgtccccacaatcttgcttggtccacaatgctgtcctcactgtctgtaacagatgccttatataagatagactatgttatcccaaaaatatttcttcaccttatctcagaatctaagcctggcacataacaattagtcctaatctccatgatctaagagcttataatgaatagatagtacacaatctccatgttcaagcgttacatggaaacttacaatggcattgttccttaaagcttaggcagtcaggccccatttggagagctgggttttctccagattcctagacatttatacaaatataaagtcagggcatgatgagtatgttttgtgaatagcgaaagcaaatgcataaagcatccctcacaaaggataaaagaagactgttgatcatgaaaaattcacacttgttatagggtgaatggagattagcatcagtagttcaatcccttctgatatatgaattatcttgcttaatctaaaggaatctgatctaatccctttctatcagacaagttctaaaggtattataagtgtgaattaaacaatgaaaaaagacacatgtgcaaaaaaaatatttacacacacattacaaatagtattctgggataaaaaaaaattgtggcatagtttactgcggcataatatttgttgtcatctcttcgctccctttttttttcttttttaatgaacataagctatgtacttcctagttatacagaagcattcttaaaataattgtattgatataattatctaagatcaatagatcttcctttatcttaaaaagacataaacagtttccacatatttcttttttcacttaatctaaccagtttttgttaaacaagtgctaactgctaagggcgtcataagagtaaattaaattaaacaatggaaaaggacgcatgtacaaaaaagattcttacgaacagtttacaagtagtagtttgggataagatcaattgtggtcatagtttactgctgcctaatatttgttgtcaaaatttcccaattctttttctttttaataatcataagctatgtgcatcctacttatacagaaatgttcttaacgatacgattatctaagatcaataaagctttccttcatctgaaaagatacaaacagcttacaaagatttctttttcggcttaatccaaccgcattttgttaaacaggtgctaagggtgtcaataatggattgagatcctctgacgtaaagtcagtggaacatggtgattgacatgtgggccccaccgctcttgggcccacctgtcagtgaccacatccaggggcgaagccacgtgtagggcaacttgggcttgggccccacacgtggcaaaaatttttaatggagaaacactgaaatttacgtagaatttgcacacaaaatttatagttatatggtttagccctactcttgctaaaatgctgcctccgcccctgaccacgtcagggggtaactttacgtcagaggatccgtttccgtcaataatgttgtcacaagattaaaaatagtactcatcccattgcatatgcaggaatttgttggtatggtccatgccatcggcgcagttgcatccatggtgggcgtcctggtgtaccacaagtacctcaaggactaccctttccggagcatcctcttctacgcgcagctgctgtacggcgtctccggcctcctcgacctcaccttcgtgctccggtggaacctcctcctcggcgtgcccgacgccgccttcgtcaccctggaggagtgctgcgcccgcgtcgtcggccgcgtcaggctgatgccgatgatggtgctcagcaccaagctgtgcccgccgggcgccgagggcaccttcttcgcgctgctcatgtgcatcgacagcgcc

SEQ ID NO: 7166 - DNA, 25882 bp, Oryza sativa
  unsure (1)..(25882): unsure at all n locations
cagtagtccatcacgaagggagtacctgattaacaactaacagtctaacacagtgtgctaagcaaggtttcctcaagagaagccaggagacaaactacacaccgaaagtctcgatgcgagccatgttccgagatcagaaattcagaatgggccatctgcagagcagatagatgtcctcacagaggacagagagtcaagatcttagccttgattgatttcgctttatttctactgtgaaccgtacaagatctgaggtggagctgcatcaaatactagtcatctcatatgggaaaagctgacagttggctaatcactagtactcctccaataacaaatcaccatgggtgattgacaaaaaggtgttctagaagatcatcccaagtaaagatgttctagaaggcggtgcagaataacacactatcaggctctatgattgctcacaagtcaactgctcttttccaatactaataactagccgaattgatccaaaaccaagttgcatctcctatccagtagacacgtctcctatccaagtactctatcatgcccatgcatgagagcagaacaagaacagctactattatactccagtacaacacttacacagttatatgtatctatccaaatggtcgatgtatttgagtatttctaactgtttgtcaacgatgacagaattgcacacctagcaattaactagccacacacactaacatattaaaggctacagcttggaaacatctagcgaggtgggccccactgataattgacagcgtcgataccttacaaacacgagcacgtcgacatgtacttaatcacatactgcagaatgcaacagcaccacacgacgcagcttgcaagcttaggccagattatccagcgggttattatctacttaattacacaatacaatagaagaaacagtcacttaatcttgctcgcaaacctcgattaattaaaggagaatctagaagcagagcatcaaatcagggaggtcacgagcggcacagcaaacctatcagtccacgaaagaaacagtagaaacacgacgaacagtaactacaggaccaatcaagattttatcgagaggtgccgattttttctgttcggatttcgacgaagcttataaatttgccaagggacttatattcgaaaaaaataaaataaaatttgccaatggacggtcgacacgtcatcttgcgacccggtttgcaaattgcaagtccgagtcgacctgtgtgttaactgcatcgagacactgttcaggtgggtcccactacgacgtagccccacatgacagtggggcgatatttatgaggctgaccaaacggcttgtactcgtttgtacttttccaccgacgtgccacgcaaagaaaaagaaatacaaagaaaaaaaatactactactcctttttttttcccggaataatacgaggagaaatttacccaaggggggggggggtaaaaaggtggagaaagttaaccatgatgggggtggggtgattaattaacggagaattggagaatacctggaccatggcgaggacgcaggggggctcgccggaggcggcgaaggggacgaggaggcggcgggcctcgggggagggctcgaagtcggtgaacatctcgtcgccggtgaagtcggccctggcgacgacaaacagcgccccctcgccgttgcagtcgatctcgagccggccgccgggccccgccgccagccgccccgccagcgggtagaacggcaccagcgccctcgccagcgcctcccgcagcctctccggtgcgaagaacccctccgcctccgcctccgcccccgcatccgccggcggcggcgagggcgcggggtagtagtagaccagcggggtgtgcgtcttgggcacggcgaggtcgaggttggagagccacagcgcgtgctgcggcgtcgcctcgctcggcgccaccagcgtcgtctccaccacctccaccttcatctcgccctctctacctctctgtgtgtgtgtggatgccttgcttgtgacagcggcttgggtgtgaatttctgtgtgtgcagagaagggagaaagggcgtgagggggtttataggcggaaaggaaaggtggagcaggattaatgcgatgggaataacgtttattttttttattactactatattattgtttcttttgggagacaagattaattctgctaggtgatgactgtcacaactgtccaatttggacagaaactttaataccgaaaagcagcttcttgtacaagtttttcttatgaatatttttatattataagttgctcttaatcgatcaaatttgtagaaaaaatagcaacatatataataccaaattaattatattaaatacaatattgaacatatttgttttatattaaaatgttgttatattttcttataaacttgattaaacttaaaaaattttgactagaaaaaaatcatagtgacttgtaatatgaaatagagggagtactgtgtactgttaagcattaaaatctggttgaaaaaactgaataacgacagaaccaaagatctaattatcaataaaggtgtattgatacaccgagagttggcaaatggatggattttttttttcgattccgtttgtatgaaagtttggctgtgggaagtgggatttgggaacatgagaatattagagtcttggttttatctctcccaccatcccataggttatttttttcgtcctataaaaaataaaaccagtacgaaaatataatatattctaataatatgattttgtgtcgcattttgtttcgtggtattagaatatatcacatcttatacaaggattatttttatgggatatagagtattttaattgccaagcgtcctaataatattgcaatataaaggatttgtggtgagtcgacatataaagatataagagtagcattcaagtttgaaacttcgaaatttaggaaaaatgttatcatccacaaccaaataatatgaaaaaaaatgttttgggggttttctagacaaaaccattatccaaatctcctttgaagatataggtggtgtttgtagtgtttcacgtaaaataaggtggtaataacatgtgattaattaagttttaattattacaaacttaaaaaatgattaatctgatattttggaacaactttcatataaaaagtttttgcacgaaacataccgtttagtagtttgaaaagcgtgccacgaaaatccaaattttcatccacttcttacagaagaaacgaacgggaccatagaagtctttaaaatttcaatactccttccaccctcacatgcttcgatgttatttttatttcagaaagtttgtcgacaaacaactttattacaactaattttcgttgcaatttcgtactttcaaacttgttttgtgccttcaattttcaacacaaattgtcttatatatcacacattcgtttctatgtgacattacatgcttttttttagataatggaatagagcatcccggcctttgctcaaaaagttatagccaattattacaatctcacactcaaaatgagtgaagttcaaggaaacttaaaagacgaaaccaaccatcaagaagaaacaaactaaagattgccaacccaagataaagagtacacaatttattgaattctgtttgtgaatctccattcaaaattgacaaaaaattgcataaccgttgtctcaagaatacgacatgcagcttttaaaagctcactatcttcctcacacttttgtagttgtgcccaagaccggagccaatgtgttggcctgaaaactacctgcatgtatgaaataaatggtgacttgttaaaaatgacatcattcctactcaaccatagagcgcaacatataacagatgctcctatgaaaataagttttcttttttttttcacccctagaagccaattatcaaaaatatgtgatataccatgaggaaggtaaagaacaaaagaaaactgaactgctctccataaaaacttttcataatgatactccacaaatagatgttgaatagtctcatttttcatacagaaacaacatctcaagctaccattccaatttctcgtggccaaattatctttagctaatacaacccctttaagcaagtaccacataaaaattttaattttaagaggcatccaaagtttccaaataatcttgtttatctcaatataaccattgtttattaaggctaaatacatcgaccgaacagtaaattgaccattttgatgataattccatcgaaaacaatcattcagttgactcaactgaatatgcacaatagaagcacacaagttataccaatttgctaaattctgatcaaccaaagctcttctaaaagaaatattcagcggaacagatctcataacattaataattgaagaattcttccttcgaacaatggcatatagagacggacacttgtctttaaaagccacgttacctatccatttatcttcccaaaatctagtttgttcctcattattaacaatccagaaacccatatttaagaaagtatttttaactttaatgagacctgaccagaaatgagaatcccttgtttcatatcaacttgagttatagaacgattagagagatacttctttttcaataagtcctgctaaaccccttgcttatttattaacttgaacaatcatttactcaaaagacatttattttggatctccttttgtaacgttacatgctatgactcgaaaatcttagaaagctcatcaacaagcaagcgtagccgattttcattatagttttaactttatttacttgtttcattccttcatctttccacgcaaattgtcattttctatcacacatggacaaccatccatactaaccttattttgcaatacttccatgaacaacaagatgaagctaaggacgttatagagtggcaaaggagtccatgtaagttgccttttaggcatctcgacaagttttcttcttgccactagtgcatgatcatgattgcacattgcgccaagtcaatcttttagtgtagcgccccacattgatgtccttccacataataaaagtatgttaatcgcaagctaattgtgttcatttgtgcttgtagcctctgtcaaaaattttcatgacttcattgagggccggtcgagtacatacccttaaaaaaataaagtgcacaagcagtccttaaatttgtaggatgtgtcatctaagtctataaactctcaaaatacatatccaagtctcagaacttatcaaagtgtgttatcaaggtcctaaattgtcacatctcatccaggatcctacatgacgctgatttggtatgccacacagatgtgacgtggcatcaccttgactgaaaaatggaactcacttaattttttttctttttttttcttctctttttcttctacttctgtttttcttctcctccttttttttttcttctcctttctatgtgactcgagatgtggcggtggcttagagttacagtgagaggaaggagaagaaaggaaaaaaaaagagatgaaaaaaaaaaagaaaaggagaaggaaacaatgaaaaggaaaaaaattttaagtgggttccatttatcagttaaaattatgtcacgtcacacctgtgtgacatgtcacatcagcgccatgtaggattctacaagagttgtggcgatacatcctacaagtttaaagaccgctcatgcactttataaaaaaataaatttaataatgttgtcacgagttcattttcctcttcacatagaccaaagtacgaaactacattgtcatggagcatccaacacaatatcatcgtttatcttcatacgaatgcatctgttatatctctatgaaccaacactactttcggccttgtcacacagtcctcccgtcacatagccgtccatctctcacccctgatgacaacagccgtagcgtgcatcacgttctcaacataaggaagaagacgacacatagaaccaaacaaagcataaagaaaagcatttttagagagtgccaacagacagctgattacgcaccgatagaaaacttgaaaacggatggtattttttccaaatctttttcacgttagcaatagcagctttttaacacgtctgcatcgggatggtattttttggctacaattgcgaaaggtgctagtaaaaaatgacttgtcggaccacattattcaacaaagattaattatgcagtaatcaattagcctttcgctgtactactactcgctgatcacgtgcattatttactggccccaacacagggaatgtttaatcctgcatcggcgcttaattgccgggcgcccgttgaaatttgcagcctcgacgccgatggtttaaattttgcatttaaatttaaactacacccgggaaacttgtctcctgtctcgattgatcagcaccagtacctttcgtggtttgtactagctaatcttcttttcatctgcggtttccttttcatgtcccggttttttctccgttcctatccttgcgtgaggtaaggatatgcatgcggacgtgtttcgccgcttggttaattgcagcaatcgagtatcttttttctttttttttttgaacgacttgacgatgccgccaatttcatttaatagtggagacgaaaactgtaaaaaaagataaaagtatagaaaacaaaagcaatcgagtttcttgagagctgacgtgtcctgtttagacttaggtcatgcatgagatagataaaattgatggattatcttacttattatatctatgtcaaagtgtaaacgagtgatttataaaaaggttacttttagaacagtattccaagacatatagaaattgttttttttaaagaaaggaaccgcttagaaagcgtgcaaactaaaatctataaaatctagagtcataaaacaaatactagaagtttagttcacatggttaaattaagttgggtacggaatgaaaacatagttaatcttaaattttaaaaactttaaattaatttaaggcatttttgtcgttttcatcgtgtaaccatagcatatgtcttaaatcgtctaaagtgaaagtgcaaaagaaaaaaaaaatcttatttaaaagatttaataaattattttttattaaagcagtgttgatcctccctccgtcctattttgactttttgcttgcactgtttcaccatccgtcttattaaaaaaattttgaaattattatttattttttttacttactttattatcaaaagtattgtaagcacaacttttcatttttatatttgtacaatttttttaaataagacgagtgatcaaacagtgcaaacaaaatttcaaaatcccttatagtatactccagatggagtatattataagccctagaaaaaacaaacaaacaaatcactacgtttttggcgaagttttggcgtggttaattacaatatcaaggtgtggttttgttctttctcctcagttcattgatctgccatgcttgcttttattgcctggtttgtgccggtctccgtcgtccggcccatgcatcctggattaattcccggtcgacagaattgtgaagttgatacagtataactaatacagtattcactactagaaaggtagggtctttttttaggcgaacataacccttgaagccaaatgaccgcctacaaaaatataaattagggtgattttcacaggcggaccacttaagcagcgtcagcgaaaatctattttcacagatgaaccttatgtggtccgcctgtaaaaatcgtacctattctaaaaaaaatctcaagtacttatcttcttctccaccccctccccaccactcatttccctctctcaactctctctctctctccctcaacacttctccctccaccggctgggccatccccctcccctcccctcccctccctcactccaccggcggcgcggacgtagcggcggcggcagcgtggacggctcccctcccctcccagatccggccggagggaggcctggggagggcggcgccggtggctcccctcccctcccctcccagatccggccgagggaggtcggcggcggcgaggcacgtggcggtggcagtggcggcgaggcgtgtcccgcaatttttttcgttcattggattttcataggcgggctgttgccccgactattttcgtagttgttggtttgtaggcggtccttcccctatctgaaaagattacttttggccatctgcaaaaatgatttttctagtagtgattaactcaacttaaatccggtcttaatctagagctatcaaagtacattgcaagtagtagtgtgtactatatcgacaccggcgggttctattgcaatactataaaacacggatacttagcgtgcttgacttgtaatattcgacatcatcgaattgcagaaatattagtgctcaattcaactttacacagtataagtactacgtaaaatatgactcacaaggatatatgttcaataataattgaataatctactctctggagttatatgccagtgcgtacaaatcaaattaaagaagcacaacaagcaactagaacggcagccacaggtttgaaattgtcttcggtcagaactaagctagtgctcatagaaccaagctaattaaacattttcatccatctatcaatggtgccattatattcttgctttcgtgccagtgtttgcagtcatccattcgtcgcaggatcggtatcaatatctttaatcaatctgggtaatgttaattgaagcttattaaattgctaaccgatcggtgtagcctttattaatctgttagtggatgtccatcatgctatggcacatattcatcgtctatccaattggtcactgaattgttatttaattagtgaattctttctgaacttttttaggtaaggaagattcttgcttaaccactgtaattagtactctgttttgtttagtgaattgatgtacagataggttatctgctgatctttgatttttggaaattttctgttcatgtatacttggtacatcctccctatgtccatatcatcctctctcgatttcagaatatatcaatccagaatcgaatgagatatatcatagtattgtacaaatctagatacgatatctgtctatattcgtagcactacgatacatcccattcgatgttaggttattacaatatattataagacaaaagaagtatataaaagtgagattttaaaggagtttgaaatgtgcactgccactcttggtactagtctaggtctggtacactctactatacgatagtttctggtcaatggtcatgtgctcgagctcgtcgtaaatctgcatcactcaaaagataaacctgccccttccgtacaagcatacctggaacactgatttgtttagattcgtgatagaagtaaacaactgagccgtatcatctaaagttcaatgtcctcgtgttcaatccccgtgttttactcaaactgcaggtgtttctttgtgtacgcagtctcgcctctcgcgctgacggacggagaccgcaaatggtcatgaaaacttgcgagagaacgcgacgtttttctgagcacgtcgccttcgccgcctcaccgggtatacggccgaacccgcgggacacggccggccaaggcggtgcctcctctgatttcctcgccgcgtgacgtcgcagccgccgtgcgccgtgcgcggcgtggctggaaaaagaaaaatcagcgatcgatatgcacaaagtcagcgatcgatatgcacgataaatcggtaatcgagtagttatcgctaaaaaaagggaacagatttcacaaagtaaaaaacttatattcctacaggcccaaaattgcatggatgaaagttcaaagcagaaaattttggccgataacaacgcgaattttgtccatggcctgacgatttatattgacaaataggaagcacatggttcgaacttcgaactttggttgataaaaaagatgatgaacggtcggtgttatgccaaataaaaagatgaatatagcttaactggttaagttaagtttctagtgctaaaatatatccatcccggttttaattctatgttcacacgtgccctcgtatttacgtataatatatcttttttttaaaaaggaacttttcttcatcgatctaaagatatattagtcaagtatcataaaatttatgaaaagtgaaaatttaataaattgtattggttgtatcctagtctttattggttgagtcttaggccctgtttagatcccaccctaaaatttttcaccctgtcacattgaacgtttgaacacctgtataaatattaaatataggctaaaaaataactaattgcacggattgcgactaatttgcgagacgaatattttaagcctaattactctatgatttgacaatgtggtgctacattaaatatttactaatgatagattaattagaattaataaatttgtctcgcggtttactggcggattctgtaattagttttttttattagtactcaaacacccccatatgacaccctatataatacccgatgtaacacgtcaaaactttacacccctggatctaaacacccccttagttctttcaaatgcctagctccaccactatttacattccatttcctcgtttcaatgtggcttaatatgtaggggtgaaaacggagcggatttggacggacagtggtcataccatattctaaaccatattttttaagcggattcggagcgggtgtggatagtgtacggatgcggatgcggagcagattgtttcggatgtcagaaatggtgtggagttagtgcggaatcggttcggaaacggattaaatttatcggatgttacgtgtgtacgcaatcaatacaacatcgagttagcaatgcaaggaacaataatacaataatcaataaacgactcatcgtaataattatatgcttaggtgttaaacaacataaatacataatgtccataatataaaaaatacaactacacaagtgtgaaatgagacgatgaaagcttcatactaaaaaaatctaggttaattgatgaattaggccattggatggaccaacttatgttatattctatagataaagtggttacatgtgttgataatttcggattatccgacaaacagcctatcggataatctgatagaaatgtcagataatccgcatctgctggattttagatataccatattctcatctgcatccgcatcatatatactatccacatccgcatccgtatccgccgaatttcttaaaaacctataccatatccttatttcagactgattcagagcggatcagatcggatcggataatatccgatctgttttcacccctattaatatgtactcttatcaagagcaagtttaatatttatggtgtaatataactttacgagtgagcccgtaaatagtggattgttgttaaaactattatgaggaatattaaaaaagctcggatcggataatatccgatctgttttcacccctagtaatatgtactcttatcaagagcaagtttaatatttatggtgtaatataactttacgagtgagcccataaatagtggattgttgttaaaacaattatggggaatattaaaaaacctgccttgtgaataaaaaattttcagatttaactacattataattatattataacttttttttagaattacacagtacaacgcagacactcacaacgcacgcgcactcgcctagaaaattcgctcccacccaagaccttaggtgctaaggaggctcttgtaaccaatagactacatgccctttcgctataagttacataaaaactatggtttagttagctaacatcgggatcttacgcaggacatatgtgaaaatttcttttattttttccttcatgccaaatctaaaagtttttggagcaaaaatcttacgaaagttttctaacaattccgttcccattacaatatagttagaatttaacatgagatgaaaaaaaaatgcttcaattcttatttatataagacgcaccctaagctagtgctattcccaagaatacatatggctcattagtaatgcaattagtcttcagggtttttttttttcatactttgtggttgctctcaacgaatttgggaacccaatttgctcggcctagaccggacgtacgtggcggccggggtgtgtcaggcggcgatcgaacgcatgcacgcgtacgtgcaaacagcacagcggtgcggctcaccgtgcatcgacgtggagacttgtggacgcctcctgtcaactgccactgccaatcatcgccccaaagccgtggaagcggcgcgcggctcacgcgacgtgccgacgccccacacgacgcctccccccaccggaggacgtacggctgcgaggctcacgtgacgccgcgcgcgcgcggccggtccgccccgttggtttggttggttggttggttggttggtggagtcgtggagagagctggagatgcatgcatggccggatgggggtgacggcctgacgggcgaacgctggctggctgaacgagccacactgaacacaagtcactgccctgaacacccgtcactgttgatcacaatgtgacatatatactgatctctgatgctactcttaacattgacattttccctactaacgtgtctatggttcttaccattgcttatatcattaataatggttcctccaaagcaactttaaacatcctgatcacaatgtggcatatctggaaagctagaaatgatcaaaaaatttcggggggaaacaaggagccgactcaggtatacaaggcggctgaagcaatgagcaaaacatacacgaatctttcttctcatactttgttgcatgtagatcaaaacgaggagacaatcagaagatttgataaatcacctaatgcatggtccccgatgttatactgatgctacctggaacaatggccaaacaggacttggaattttcttccatataccaaccactcataatgctatcttcattaaagccacaaccttagtggcccaatctcctttgcatgctgaattgatggctcttcaacttgctatggaacttgtcaaacttcttaacattcttgcaaaaaaaaaggaactttgaagaagaaccagggcactggagtctaagaccaatatggagtcaaatctgttcaagaattccagaatgtcttttgcaggttagctgaatcccaagggagataaacaagtcagcagataggttagctaaagaagcaaaatccaagcagccttctgctcctgttttcatttgtcaaaacatatctcatctagcctatcgttatgcaaactctgtcagagacaacatcagtctcagaaaatttgtaatctagcatgttctatgcttctaagttggaataaagtgctctttagttttctttttttaaaaaaaaaaatcatgtcgcccagtacgcggggacgtggagacttgtggacgcttcgtgccattgccaagcgcaaatggtccgtcgatggatggagatgggtgaagccgtgaaggggtgaacactgacaagtgacagctcgaagaccgcccttgctaggctaaatccgtcgcttaggctgaatccgacgctgaaatatcttgaattgagtgttcttgaagtactagtgcagggccaatggattgaggcccatgcttcaagtccaacgccgcgaatcgcatatcggcatcagtatcgtcaaattaaggaaaaagtacaccgaaggtccctcaacttgtcattgagctataaaatcatcccccaaccgtaaacgcatcccccaacttacaaaaccagttttatccgacgtggcggctgagtcagcgtggaacccacgtctcaggataccatgtcgacaggccagcctctcccttcctctcctttcctcctctctctcacacacacacacactcttctctctagactgggcaggccggccagcggtagggaggaggtcgctggggcaaggaggtccgacggccggccggcgacgcggcggcggagacacgggagaaggggagggtagcggcagggcgaggcggcatcggcgggcgagcacggtggcggagaggcggcggtggttgcgacgtgggaggggaggctgccgccgacccagaagcggaagccgaaggcgatggcgtggcgagcgtggaggcagaggaaggccatggtgacagacgccacgtgcgcgaacaccctcgcggcggcgcaacacggcaaagagcttcctggggcagcgaggtcgacgatggcggccgcccacagcgacgtctccgttagacatggcaacgggaaattccccgtcggagattacaccaccagacccgcctccgcggacgagaatttcccccatcaccatcagcgtgaaatgcaacggggcaacatctttcaccatcaccttctccgtgcgggtaatttatccccgtggagcctccatccccgcgagccttcatcctcggcgtcctcggtgccgccgagagaccgagacgagcggcgccgggacttggcggcgtgatggccttgcgcgagcgtgggcgcagcgagcggcagccttgcgtggatgacggcggcgctaggacctgctgaggcggcgcggcggccctgcgcggacgacggcggcggctggacctggcggcgcagcggccctgcgcgggcgcgggcgcggcggcatggggacctgctgcggtggcgccggaccctggcggcgcaacggccctgcgcggacgacggcagcgtcgggacctgctgcggtggccctgcgtgggctctggcgcgccgctagctacctatgacggcgtggggattggggacggaagggataagggattggaatggctagggttttgtaaatgctttatatactctatattttgggcctggtttttatgggccagatgggccaaatatacataataatactacatatacactattatgtcgggcctccacggagagcggggacgggggacggttaaccaaacccgcctccaccagacccaatggagggtgtttttgctccatttaatcctccgtggagacatattttataccaccctcgcctcataataggaggattcaccgtggagaatcggaggacgggaaccattgccatctctagtcctcatggaggcggtgatggccgacgcgtggaggaagcggggcggagcccgagatgtctggatcgcgaaggatggccggtacgccggtcggtgatgggcgcaagcacccggctttagcggcgaggccctccaggttgggtgccgagggcgatgacgacgtccagtgcggcgtccagcggccaccacgctcgcccacgccgtcgccttcggcttccacttctgggtcggcgccggcctcccctcccgcgtcgcaaccgccgccgcctcttcgccaccgcgctcgctcgccgacgccgcctcgctcagtctagagagaagaatgagagagagagagaggaggaaaggagaggaagggagaggctagcctattgacgtggcatcctgacatgtggggcccgcgtgggtcccatgttgactcagccatcatgtcggacaaaaccagggtcagaaccgtcgaaggacctagtttgcactggttttgtaagttcgggggtacgttgtatccggttttgtggttgggggatgatttagtaactcgaggacaagttgagggaccttcggtgtactttttccttccagcaaaccacgccaacagcccaacagtccatgaggcaacaaccgcgcgccgtggtggttggcccgacccaccgagcagaacacgatcgcggcgcccaaccccacgcatgctcccgcccccgcgacggcttgggttgggtggcggctaggggtgaaaacggtacggaaatttccgagaattccggctaccgttttcggtttgcaccgaccgtttcaatcggtatcggtaattgtcggtatcggaaatggaaacggtaatctttttcggaaatggtagcggaaatgatatggggttttttccgaccgttttgtcggtaaccgttttttatcggtaatttccgtcaaatttccgacaaaattccgaagaaggaagtcggctgggcctggctagcaggaggaggagcccattaggcattaaggagcagcccattccgaataaagaagccaactaggcctgaccgcatcgtcgtcttcatcggcgctggggcaccgccgcgccgtgttgggcgccgccaccaggtcgccgacgccggccgcaacctccttcgccccgacggcctccgtcgcagccggccacctttccctcccccatgctccaccgccggcttccgtgccaccgagccaagcgccgagcgccgcggcaccggcccagcctcctcctccccaccgatgccgcccctttctcctctctccttcccccaccgccggcctgcgccaggccgccatctccggcgcttctctcctctcgggcgcgcgtgaaggagccaaaggcagagaagagaacaagagagaaaacagagaagaaatcgagagagcaggaaaaggacccgagagaagggaggataagagagagagaaaataaaagaaagagaggaaaagaaaggctgtgggatccaccggcgggccccaccatcttgactcctctctgtgatcgacctggaaataccaaaaagtctagtttagcatgaaacttaattacaacggtagttatacagtgtcaacataaaagttcttatgcaatgtgccactgtaggacgacgatatagctatgtcaattgatgatgaaataatgaatgatatttgacaaggagctgatcagctgaagccatgccagcttgtgagcttggtgttctcgaagacttcaaatctatatcctaaaaaaagtcggacaatattagttatgctgtaatcctatcatgtaagccacattgtatgctttagccacattgatgttgaagtatcattgaactttatttatattatttgtcaatcttattgtcaacttattaatcatcatataacggtgttgtgtggcagcataatgatgcaagggtgaaattataaggttatcttcatacatagttaaatgcgggatgataccacagttcgctgtttccgacatgaattttcgacttccgtccgatatcggtatattcccgttccgacggttccgtttccgagataccgatataaccgatatccttaccgtttccgagtatacgttccgattccattttcgagaaaataaaatgaaaatggaaatggtagagggtttttccgaccgtttccgaccgttttcatccctagcggcggctgcttcggcctgcgcctgcctctcggctcgatctccggccgtcgcgagcgagtgttggctggccgctttgcgtgaccggcccaggctcccagcgatagctccagtaagagcaggtttaatagtacagctataatagctggcggtaaaaatgcttatctcagcaaaaaattgagcctgaatgtacaatagctagctattgagttggtaaacacgagtccctataaatcactttataattttctactctaatttgtgtccctacccgtccttctatcctctctacgcagtgcattgggaggtgtataacaagggctgttgcagccaacatcgatggaaaggttggctgcaatgcctcgtttcgtgtgtgtagccaggcgacaggattagcgcccgttcctttctctctcatcgtttctcacccttccagctcagattatgttgacgtggatgagtataccgcctgctgactggactttattgtatgtaacaggcaaagcagcttttacaccttttagcgggctcccggcgcaagaacggcgtgtcgctcgaggacaaccccgcgggcgggctgattctagaatcgtttcgctcttggttttgaggcttatctggctcttagctaaataaactcaatcatatactctcttcgtccaaaaaaaaaactcaacctaaaaacgaatgtgacccctcaatctaggagggaatatctaggaggggttacattctcttttagattaagttttttttggacggagggagtaagtaaatatttcgagtcaacaaaaaaaacttgctatcattcgtttggtttgcaacgaaattttgtctttgcctaattatttggtttaatttcggcataacctatgggtacaaatttagaggcaattcaaagaagctcatttgtcaaaactttagcaatggctagcagatcaccggatccattccctatcacttccacatcaatagagacatgaaaagatgtataaaaccatgtccatttgtttgctatcaagaacattacataagtaaacaatgtacatagatatatggtgggttttctctttattatcgatctattctcgagtaaaagcaatcatcaatgtctcacccttcagttgtatattcaaaaaatttacgtaattatcatttattttttttagttgttccaaataagccgtgacccttgagtcatgttgctaagcagctgatatcacaggtaggatcctatagggactggttttttaagcataacaaagatatttaaatttagattttaaatttgaattcttgtcaaatttcgcacatcaccagtcgcaggaacccatctctcctatccactcctctgttcccctcgccctctcttcccttgcgtattctaggaaatagattctaatccctcaagatctttttcttccaaattcaatgcaaacaatcataattttgtttttaaaataatgataatgtgaaatagtgacatctagcactaaggctgcattcgtttgtttgtgttctcctctcctctcctctgttttccgtgtgcacacgctttttcaaattgctaaacagtgtaatttttttaaaaatttctatagaaaagttgctttaagaaattatattaatctattttcaagttagttttagttaatacttaattaattatgtgctaatgagctggtccgttttccgtgtcgaagagggaaagttccctagcaacactaatgaaagcagcctaaattaagttcaaattcaacctgcacattaagaaaaaaacaaattcgggtatgaatagtaccactactattcatctttcgtattaatttttcttttttatatctcaactagttgggtggcccgcgcaattacacgactagcacccacacaaaattatcgtttttacacatggttttctttaaaatttgttaaatagtcatcatgttgtctcatgattttaaaagatcggatattattgccaccgtgtttttaattttatagtttttaaaattcacaccagtcttcaccccttactccttcgccatcatctattcttactcgacatgctacaacttttattcatccccctctacagtttttactgttcgttgtctcgtcaggtctagttttatagatttagaagttccatcaaaacgtcagcactatactcctctatgcacacccgctgacctcctttattgtcattaggattttaaatcaaatagtattgcagttaattcgttttaacttagttctgtcaaccatcagaaccgtgcttcttcacaccttgctgatcgcctcttctcctaattgtcatttggattctaaaaatcaaacctaatcattatttaggggttttggtttatggttttcacatatcccagtaaccgccaccaccctaccttcacagttgtctgctatccctctcctatttaatgtcatttgtctatgtcgtgtttaatgtatcatgttctttcaaaatttcttatttcttattctatctgttttatttataagctgtattcctacttaagcacttatttttattttactaattttgcaatttattttttattcatatttttagttaatcccatgttgtattctatataaactgttctttcaatatttatttttatgtcaaattttagctatttctaaatcgtgttcttactcaaattctcattcttatttttctatttcagaattcttttattgtttatttgaattgtaattgatttcttattgtgttgtacatgtactttcaacagtgattttagttatttataaattgtatttctacttgaaactcttttttataatttcaaaattcattcttttttctttcgaaatttacttaatctcgtattgtgttctacatgaactattgcttcaatattacttattttattccgaatttgaattatatctacattgtatttctacgtgaactcttttttttctaatttcagaatttattttatttttattctgaattttaattaatctctaattgtgttcttcctttactcttctttacatatttattattttttattctgaatttcagttatttctaatttgtatacttgtttgaactctttttttctttttcttcgtttaacatgggaatttgtagcatccatagtgaacgtggtgtctacttctaatgttgttttaataatatgatagatttgacagaatgactcgcacaattacgtggctagcatggatacaaatttacattatatgcaaaattatatatatctttttctacatataatcatctttatagtttaatttgcaaagtttacccaccaccgtcttcatgctcttgtgtcatcactctagttgcttgcccgtcgccacttctattcttgtccttgggaaaaaaaacccaaacatttgtgtttttaaagttgaatcttaatgttgtggaggctatatttttatagctttctaaaagttcctgtagccgccaatttctttccttcactttgatctatggcatgaccgtagccgccagtgtcattacacgaccaagccgcccagggagttcccggcaaacagcccgcaaaaaccaaccataagcaataaatacaaccgcctatgtcagcgacattgggctatgctatcagcttaatgttttcaccgttagtttctgtttagatagaatcaaatgtcgaacctgatttcttttatgttatttacttttccttctgtattcgaccatgatttattcatcaaataatccgcttatatatattagcactaccacaacttcgatacattttcaaatatacgtatcaaatatctcggctatatataatatagacccacttgatccaacggtacagatatttttgtttttcaccaattaacaattcctaagactatacggatcaagcaatgtggtgcatttttttagctatttttattggatattatttatcgatttcatattttggaaatacgaaaggtggcttgacgtgtgaaaaatcgggaacatagatttttctttaaacaacaataaaatagataacatatttgattaaatggcaataaaaatttatttttgttcttgtatatttaacttgcctttttctgttgtcatttacgttcatgtatttaattgcctttttctcagtatatgcatgatggccaacagtctataatcaccattccaagtacacgttggagagtgccgcgccagctagtttgtttgcctgttcgtatgcatcgagcagaatcttttgcttttatttttcattaataggatgtatgtttctgatcctctacgtgaatcctagagagtcatagacaaacagacatactactgatccgtttcagcaagtactcttgatcattttcgaattggagtttgattctgacacactatgtacctaattttgcacacgcgcagcagaattgtattatgtcaacaactctaatatctgttatagtccaatcaatctgcaccgctataatctaaacctgttgtgatccatcggtgtggatatttatttttttctcagattaacgtgggaatttctagtctccacagcgaacgcggtgcctcctttcaaggttgttttgataatataactagctaggtggcctgcgcaattgcgcggctagcacccatacaaaattatctattttgtaatatggttttacttaaaatttattaaatagctatcttattgacttaagacattaaaagacaaaacattatcatccttttgcttctaattttgtagtttttaaaagtgatatcagctgctacaccttactttgtcacgtcttctttgtctgcttgctcgatccaccactgtttctatttattctttctttttagaacatttaaaaatcggaccttatagtttttaaagtttatttctcattggttacatttttataaattttagaagtctcatcgaacgttgtcactatactcctctatgacccgtccgctgcctcatctctttattgtctttgagattttaaaaatcgaacaaaattattgttgggttcattttttactttctagaagtcccgccaaaccttcagcggttgtgccattgtactcctctagagctcgtccgctgcctcccctcgttattgtctttgagattttaatatcaaacatgattatcattggggtttattttttactttttagaagtcccgataaccgtcgtgaacatgttgcttaacggcatgtccgttgtctctccttttaatcatcatcgagattctacttaggattttgttaatatttttagatatctcatcaaccgtcaacactcaactgctttacaggtctcatcgaactgtcggcagcttcgttattatactcctctacgggccgcctgttgcctcccctctttttttttttgagatttaaaaactaaacatgattgtaattagggtttattttttttactttctagaagtcccaccaaccgtcgtgactatgctgcttaacggcatgctcgtcgttcctcatcttaatcgttattgggattctatttaaagttttgtttatagttcttagatgtcccatcaattagcaccactctagttctttacgagcatattgtcttccctctttattgtcatttgtcatcattgttctagaaattccatatttttcattccgatggtttttttataaacgatattcctacttgaactcttttaattacttttttgtttttggaatttattttatttgttattccgaatattagtatctgttcatatgttcttagatggtctcttatttccatagtctttattttttattacgaattttatttttattacgaattttagttatttatagattgtattcctagttgaactcttcgttttctttttctaattttagtaatttttttctaactctaggtggcctgcgcgattgcgcggctagcacccataaagaattatctattttttacatatgattttacttaaaaattttttaaatagctatctcattatcttaagactttgaaagttgtcatcccggtgtttttaaaagtcaggcccatcaataccccttagttctttgtcaccgctttatttgcttgctcgatctaccactgcttttattcattctccttgaaacctttaaaattttgaccacgtggtttttagtgtttctagttgggttttgtttttatattttttaggagtccctcaactacggttatcccattgctcttactatttattatcattaatattttaaaaatcgatcatgccagttggtgggtttcccttttataattttagaagtaacgctagccgccgttaccctattcctttgccacccctacttgccctcttaaaaatagaatttgattattgggttcaaatcatatataatttacatgacttgtgacttgtgatgcgtcactgtgtataaatacctactaaatgaaaatagctattttgagtattattttacgtggaccctttttttaagtgtatttactcctaattttgacgatttataatttgtataaagagtagcacactcctgaacgtatctaagctattattattttatttttattatgaaatttatttgctttagaattcgtattgatttgtattttaaatttaatttattcccgcattgtgtttcatttgtttttaatatgtacgatacgtacttggcggtagtaatggcggcaataatcactgtacataagttcatgtatatacatgtctatgtcttacgtcaattttaagcgctgctagggtacacaaaaagaagtgcttctatgaagaaatttattttaaccaacgctgctagggtacacttgttgagttgcctcaatcggacaataagtcctattcaaattaagctgcgttggttaggagtccaatccaagtcagatcgtatatatttctatgtttgattttataatttcggaatttattttattttttatttcaaatttaatttaatcttatattgggttcttatatagactcttcttccaatattgtttacttttaattacgaatttcagttatttttaaattatatttctatatggattctttttttctttttctttttattatttattataatgagagagtaagagataggaaattactgcatagagtccaaatgggacttctgctcacgcatgctctattattgatcatgcacctgatttgatttacggtagtatttgttgtgcccactatcttggttctactcggattgctttcccgtaaatctattaggagtatctcttatttaatttaaatttccatataaatgattgtattttatatacaactctattgatcaatctataccactataatctggatctattatgatctaacggtctattttttttcttcttttctccgattaatgtgagaatttttagcccccacagcgaacatggtgtctcctttcaaagctgtctgagtgttgtcggtgacggtgttataatagatagatagatagatgtgtgacggtgtgagtagtttatatatatgctgtatgagtgttgtcatttatttttcatacgaggggtatccccttgatggtttaaaacggtttctccatattttcatagagcaccgctacacgtactaaatttttcttactaaatttgtactaacaatcatctcaaccgtttgattcaagtagatggaagttataaaaaatctagatgcactcatagcatgacatgtcagtgttagtaaaaatttagtaagaaaaagttagtacgtatagacttttccattttcatatttccctgccatcattcctcgcaagaaaaaaaaagtgctacatctctgtaggtgcaatggtacaaatggacgcttatacaatgcgcattaaactgctaatttgtattatacatatgtatataaaatatatagatacgtatatacatgagagacttatagagggagaaacccaccgcgccctcgagagagtggttgcgtattaggcgcccccaacgtacgggcgcaagaaaacagcagcttcaatagcgtagaattgcacaatcgtcttagcaactttacatctcccttcttccaaattgcaaaaccaatatttattagaacatgagcaacactgcagctagccgagggagagaacacatcaactcccggcccaatatatagcacaccacaaggaacagagaacagcaggccggcgcaaggaggggctagccccagtaagctacagtttccatagcgacagtgatacttcgcctttaacacgaggcagatctcgcaacaacgacaggatgatcaccagccaaaatcaaaacttgcgtcctaagatgcttcagccagctgctgctgctgctgcccctcacctgcatttcacatccaggatggggacgtttcttcctccaggtcgtcactggacgcaacgacatgatatgctgcgtaccttcnnnnnnnnnnnnnnnnnnnnnnnnnnngtttcatcgtgacggtttcttcttcctcctttttccggcgatgatcagattgcatatgttcagatgccaatggaagctgaagctttcgtggcgtttttgtatatgtgtgtgtgcgctacacgatcacaacgtgtgg

SEQ ID NO: 7167 - DNA, 22499 bp, Oryza sativa
ctgggattttgtaacaatatcatggaaatccttgtaaacttcttcatcctctgaattgaatgtccttcctgttttgtcccttgcatttgataacatatggaacaggcaattcctatgaacagtgtctggaaaaactatggcaatagcagctttcattgccaagtcttgatcagttataatagtagcaggagccttgccacccatacaatcaaggaacgtattgaacaaccactgaaaagtctcacttgtttcatcttgtaggaatgcataaccaaataggcaattgtcaccatgactagttatccctacaaatggagcaaagggcaaatcatacctattggtcttgtacgtcgtgtcaaaactatgtcaccaaacatctcataaaattttctgttgttcccatcggaccaaaacagactcttcacaacattgttctcatcagttctgaatctaaaataaaacaatggatcctctgatcttttcttctcaaaaaaatccaaacactgcatcatgtcatttttcccactttctcttctaacacaatctctataattgctcatagccttttttgtgtaaggaactgtagacaagccacccctaacatatgacaaaacagacataatcgtccttgtgggcacattgattttgttcagagttcttatcaaaagtttctcctgatctgtcatatgtttgtgagaccttaggaattttctttcttctggtggagatagtggatgattgtgctctagattaagccttgtaatgtaccaaaagcccctcttcaatgttatcaccatctcagctttgcaatttgtgtaaaccactttgttctgttttctattttttactaatggatttgttgtgtttgtttgcagacaattctcaacttcatcaacctcaggcaggtccttctcctttggatcacttggtttcctccacctgttgcatttgaatgtgtgccttgtcacaatatcagttttcctactgtggtaattgctagctttgcatgtagagaaaccaaccatataagcataaccattgtagaagtcaaaagcttcattctcatcagcaaaaactttgttgattgacggcacatgtgcactgttagcttcctgaccacctctctgaacagctgttacactttcattctccagaaatatgtttatatcttcctcactaaaattttgatctggattttctgcacttttatcttgttctatttcctcaacttgctgaaatgtaactattgcatgatcagacaataaatcctcttttgttgcttgctcaaagtgctggtcaaaacaggcatcagcctcaatggtttgagtctgcatttcattataaatcacttctacagatgatgctttcaattgtactgttgacctgcacatctcagcttgattatcaacatcagcacttgatttctgcatttcatcatatagcatgtccagtgatgccacaagaggatgcacagctacactttgtggcaaagagttgcacatctgagaggtgtctgtttgtgcattttgcaggtcattttgttgataaccattgtgaggatcgaaaccccaaaagatgttgtcatactcaaatctattggatgtcaaatatagagcagtctgcaatggtaagaaaaaaaattctaataaagagacctttttataattctattttgatttgaacttttagccatattagctatatccacatcaatcatgaatatgtttttaatcaaataatgggatggcacagcacaaatcaaataaacaagagggaacacacctctgattcaataggagcttgcaatagctgcatgaaattgccacaagtgttttggagcaagggaagaccaccctgttttgcaaaaaaaaaaaaacagtgggggttatgactgtgcacataaagtttttagtttaaacattttcatttaatatgtgttttatttctactcactgccacctgagcaccaggaaaaattgcattaggtaagacagagacttgctggattaaatttgtataggtgatgcctccctcctgtgataacctataacatcccatagtcttcatttgattctatctctgtgccctgtacatttggatagatgaaaaaaaaatgacattacatcctttgtacaatgtaatggcattgcatgaacagagagctcccataattcaaagaatgaccacaagagaacaactacttgaaccagagcagttttaacagttagcgaatcaagatattctgagttgtgcactattagaaattcagtcaccctattgtgcataaggaaaagcagacactctgcacaagatttgctatagttgactgcagtattgcattacaaccacatgaaaaaatagaccagatcaatattgtgttgcttatgagcttttatataataaagttttgtgcagggaagcagcagaaaacgcagggacagtggaaagggaagaaaagcaaaaaaaaaagagagaaaggaagaagaggttaaactagagagagggaacacaaaacaaaaaaacctccatcaattaaatttcctccaagttcttcctgttctttcctcaacacacgttgttcttcagaggaggggagtggtggaaagggaagagaaagcaaataaaaatcaaaagatgggaggaagaggtgaaaaggagggaggtggaaacagagaacaaagagaaaaacctccatgaagtaaaaatttctcaggttcttcctgtcccccccccccgagcacacgttctttcttctttttcgtgttctttctctccctttctcctttttgcttttccaatctgagttttgatctctcctctcgtttttcttttggatctaagttttgatctgagtttctatcttggagcacaagacatttttttaagggaaccagggagtggaccatttttgtgacagaacccaaatcggagctaaaaggcccaaaacgggtatcatgtgagagcccatttgttttgttgaaaaaagcccaaatcacagctaaaaaactgaaaatccagactcactgaactataacccaaaaagacttgggcccataccttcgttggcccataacacagcacaaaaaactagggcccaaacattgggcttttgtaagtttttggacccaaaagtgtgttttaaccagttttgggctttgggctttttgttagtttttgggcccaaacatccgcaccagattgtgatcttttttgcacgtcacgttttgattttttgagctttaccgttagatacatatctaatggtgcataaagttgactgaccaaacgcaaaaattgcaatcgactgcagaataggcggtccctaaaaacaaatgcatgcacataaagattggatcgtggttgtatcatgtaaaattaaatgattgcttacactcaaaagtcagagtaaacatgatggagtaatatcaagttctttctcacatattcttcattgagaaaattgctcatgcatctcggttttcatgatatcctttcctgcccctgagtttctattttcatcccatctatgcctattatgttatctgaccgtgttctgaccattagatttccccaaatgactacattgcccttctcacaagtcacaagcatgttttagtaccttcatatcaaaatatagcaacatttggttatgaatctaaacacacagttatctaaatcaatagctaaaatggttatgttttaggatagaaggagcacttactttcttaaaaaaataataacttccaatgtgaaaagatttaatttagaataaaatcaagggggacaaaattatttgaccccacatttgaaaaaacaattccaaacaaatgtcaaaaacaatgaattttgtagaaaagtttcactgaggatttgaaaaccaaaactattttttacttgaatttaaattccaatgaaactattgtatgaatttcagcaagtttgatttgaaagttatttagaaatttcacttttctaatgtatgatcaaataagtctatcctttttttatatataaatgaatgtgttcaatttgagaactatatttattagtaatccctccattccataatataaggcacaactaaaaagatgtttcataatataatggcatgaattcatgctattaactagccattcttttgcactaaattattattttttaagttcttcatcctcaatagctttaattctattaggtgcatgcattatatttattaatgtgattcaaactatgaggtgataataattatttcttggtctttaggttaagagtgattaagccttatattttggaatggagggagtaataagctagcacataagcacgacaacatataatcgtttcaaaaaactagcaatcaattcaagatcaattaatggaatgagaatagaagggaccaaagtgaaaattcatgggatgtagggaatgaatcaaatttcaagggaatgcaatgatgcaaaaggagtaaaaacctaattagcagccgttcaaaaggaaaaaaaaaagatccactccacaggattaattacaaccaatactgcatctttgtactaaaaactgaaaacatattacaagttgggagctttgtaaaacatatcatggtcatgataataacataacatattatcataagctgataatctttttaaagcataccaaggttatccccatgcattaaaagaaataacataggtatgcatgcatgccataatgtgaaagctggataccttaaactagcacgactgatgattactcttctaatactagtatatccaaacacagtttcaatgctttgacatggtcatggtaaggctgataaaatatcgatcggcaggataagttaaagatgcgtgttatctggtcatacccatgcatgctgcgcatgcacacgcttgaacttgaccatacttagcttaatttctttgattaatttctccccgagaagaaatgcccggtggcttgcatctgactgacctgcctagcgcatctgatcacatttcacctctgcttaatcaattgagatcacaactgatcaggaaacatggtatagataaacagagagagaaaaagaatatcaccgtgaatcgtgatgtggtgatgctttcgctcgtacgtactgtcgtactctctgggtcagtgggtcgtacatctgccacgttgtgttattaaggccagagcccagagcggcgataattatgatggctgcctccttaatttgattgctgcgtgttaactttgctggtgcagtgcttactaagcatgaatgcatggtgtgtttttctaaaggggcacgggggtaatcatagtgccgcgcacgttgcttccgctctaatttattctccattgtccatccaaaagaccaaaaagtagtagcagtatcaagtaccttaagctgtgcgtgtgtacctcgtaacgctctacggctcatttctttttattaatacgattgacaaaatagataaatagtaaaaatacagttttatctaggagtgaaaacgttacggaaactttccggattccggacctattttcggaaacggaatctgtcggttgaaattttcgtaaacggaaacggattcagaaatattttctcggaaacagaatcgaaaatgacaatggcagtttccgtcgaaactcggaatcggtcggaaactttctggaaatttcctcagaattttcggaatttttcttggaatttccagaaatcacgaaatacattggattctttttttaagtactaaatagttaatactatggtgtttggctgttatttttttaaaaaatatttgttatacaaatctaaaattacataagaatattttttccctgcattaggatttatcaacacagcattactaatttattccatagattgtgttttatgatgtactgttgatacttaacaattggacttatatgattgtgttttacgatgaattgttgaccattgagacttgagaattgggtttatcggtttaagggggttttttttattccgataaattttcgttatcgtattcgcaccggttcgttttcgctccgttttcggtttcgataatattcgattctgttttagtatccagggtttccgattccgatttcgattccgaaaagatatatgaaaacgaaaacgataaaagattatttccgtccgtttccgtaccgtcttcacccctagttctatctaataaaaatgggtgaaacagataattgcaaaacgcaataaaaacacttgaacgatcgtttaatagacaaaaaaacaaagagagatagactaaaataattttttaagggattagagccattgccgatatttcttcaagatctatatgcattgagccaatacttaggaattcattgaatatgaaaaacaccaatctttgtttgaaaggaccatttaggaaaaatcatataaaatttaaatcctaaaaaaattcctctacaattgttttgtagtagaaaacttgtacttataagagcatatgttatatattagactttatggatgagtaggaatgatatgatttttgataaaataccatttgttttatatatgcagataattttcaaggcaacacattagctcatgtctttggcacaactacaaaggtgtgatgaagatgaccagcttttaaaggttgtatatcgtaatattgagacaacgattatgcaattatttaccaatttaggatagaggttcacaaacagaattcaataattgtgtactctttatcttgggttgatagtttttggtttgtttgttcttcatgatttgtcttttatttctataattctatttaaattaattgcactcattacgagtgttaggctataataattggttgcagctcgttgagcaaaggccgggatgttatattctattatcttaaaaaattgctttgttttaaagccagcctaaaactgagggcctgtttagatcctccaaaatggcaaaagttttgcttttctgaagcactttttactattttggatttaaatactagtagcaaaagttgacaatttgttatttgccatttgctagtccatagtagcaaattatgccaaaaagtgctttgggcactcactctttctctctctccaccaaaaagtgctagaatggcaaaagtttaggatgcatctaaacaccaactagtatttttgtaatgctaaaacttttaccaccaaaacttttgctatttaccatttaacatttgctattccaaatgaatctaaacatgctcctggaaaacgacagcgaattccaaatagcagtgggcgaggcatcacgcatgcgcagcgccataagccagtggtgagtggtgacccgatcagttattgccagtttgccactggaacgtgggaatctcccgtacaaacacacatctcaaactggcgaaatgttttcgcaacgaatagttgtctctctgtgatggacgggtgcgcgcgcgggagggtgcggcgtgtcgcgatcgggcggcgcgcgcggccaccatgtgcgccagagtgcgcgcactgatggaggcgtggggcggggaaacgtggcggttggagagacggcgaacgtggtcaccacgatggggccctcccggccggcctccccggctccggttctatggctccacgtacgtatggtgcgcgcctgcgcgggaaatagagagcctgacggagcaacggcaggcagaggcaggcatatgtgtgtcttcggttcagaaacatcaaaacatgcaggttccatataaaactaatcactgcctgtccagacttcaaaattaatataccaggttacccatagatgttctcatgttcagaatatgatatgactttggcaagataaaaaaagagagaaatagagtgatatttcgccaagttagaattctgcaactaactaaaaatacagcacttattaacaataaaaatgatttttatatataacttttatatgtgcgataaaagaaatatcataattaactttttaaattatgttttaaaatttaaaatttagtaatggctgataaaataaaaagcaaacggtggagccgatgtctcatgatcatgagaactgcgcatattgtgggctataacccgcatttgacttgaagcactcaccgtttcctcttaccatatgtatgtctcaaagttactctcttaattttgtaagtaaaattgatgttttaagacttgtcttcaaaaatactttcatataattgccagtaaagccttatttaaaaaaacaaaatacccttatattttaaaatgaagagaatttaggattataaaagtttgatcgccatcaattttggactctggagggtgtttgctttgatttggattcttcattgaatggactgttcttgaatgctattactagccgcctagcttactccatatcagacatcagtgtcttccagcgatgataaagattgaaaaggtcatcgtaaaataaaggggtctctaccctagagattaggtcagctaatgaagcctaccggcatcattgaccaggctttgttaaatcgtgttaattacttttaatttggtccaaggagatgagctaatccgggaagaactcgcctgctctccttttttcctatgttgttgcttccgttgaacaaatcagttatgaccatgaggtcccatatttctacctccaactacaagtctacaaaattccgattgccccatggaacataaatattgtttgtctgcaccctgcagagaggtactagcatgctattcattcatgtacccatgattcgacaataacatcctaaaaaattgatgtaaaatgcattgttatactcgtatgcgtttcacatttcggtaaccaagctacccctccatcccaaaatataagcatttttaggcttcgtcatcgtcttcgagatgctacttttaccaacaatatctataaaagtaagatattttaaataaaataagttacatattatggtagtttgtttaatgataaatctagtaatatcaattttatatgattgatcttttttatattttttctattaatagttaaagttaaaaacatttgactttgacactatgttgaaaatgtttatattttgggatggatggagtatagattggacaatttatatacgatggatcataaacataaccctcaaagtatttatagtgtttatatgattataaacataatatatttttcaagtttttaaactaatattgaattaatctcgcgctaatcctttgttttgtttttcgtgtcagacagcaagggtgcctccgaactcagtctaaacctgtagttaaccgcagagagacaggagtgttaattctctctgggtacgaagttgcgtgtgcacgagggaaaagcccaggaccacagcccccacctagccaggcccagctcctccaatcccctcatcgccctactgcacagcgcactggtgggggccggggtacacgcccggggtacacgtaccggatcccccgccccccgggtggtggtggggtttagtagtagtcctccatggcttaacaacaagagaagcgcgcaattagggaaaccgtttggtcttccttaattgcgccctcgcccccgcggcaaccgtccttctcctccatctccccttccacgccgctgccctcccctctcctctcccctcccgccgagaaatcggtaagtagtggactagtcgctgcgactccgcgagggttccccggctgcttgtccacgggatcccacgacccggcggcgttgcggcgaggaggaggagagcagtttgggggtctcgccgcgatcgctgaggtgaggttccacgtttacttggtgcagtagttacggtttggttggcgtggagagaagctgcggtgtgtttttgattgaatccgattgagctagggggggaaggaagagggggtttggagctcgtaggctaggacgatgtttggatggtgctccgcgcctccgccgcgtgggttttgacggggatggagcatcggcgagtccggattggcttcgtcgctgttctcggatgatcctggtgcgtggtttgggtttctcgcggcggattccgtggggaactagggtgttgcggcgtgagttctgaggaatctggcttggcatggtttctattggcttgttgccttgttcgttgtctgtatctagggagagttaattttatttaactgcgaaattactttttctccgtactttgagctgttattataggtgatttcggtgcttggggtagtaaacagtgcatttttaaattatgtgctagttaaaccaatttatggcgatcgagccgtacaaatcccctgttgtgaatcctaagagccagggaatatgcctccatctatgctatatgtggttgatttgctcttgctgggtgaattcttctagctaggattatctaatttagagcccaacaatgtaagcatcatgctgttgcctttgagtgtgatattgtttttgcgtttggttagtcgatttgatcgaagaaaattcccggcaacttcaagtgaactctgccaattttatttggcactatgtccactgttatattttttctctttgtctgtattggagcatacaaaatctcaatgcatgtgcatggttcataagtggtaatcattaaaaaaggtccctgtttcccatgctgcttctgatgagaaattattaaacttttttctagcaaagagattcgtctcatctcatgcatgtggattgtcctgtctgttccaaaaccatcagaatctccgcaaacagtttgtttatttgcttcgtcctttctcgaatgctgcatgatcccatgtagcagctgtgattttacccaaaatatctttttttttatgttctgtaatggatgtgcaatgtattcataaatgccaccctcctcccttgcttccaagccactattagatcacttcccatcaccaatctgccttcgatatccctgtgagaggaattgcagcaacaatcatagctgtaaatatttttggtccttgaactggtatagcagcatctcatttctgaattcagccatctgcgatatctgcattacctttttattgcttatttatttgtatatgtgagaagtttctcttgcttacttcaagttaaatagatgattgctttttgtattcgaaaccttctgattgtttggtgttcttctttggatgtttggtagatctcagtttgccaaggggttcaagtttcatgagtcatcttgacgttgttactactgtggaagttgcaattcttcatggatgtcctcaagagtgatgtgaagaagactggtattctcaatgagactctaagaccaccgctagttccatccgagaagcataatgcttctccagtaaaccgtgggagagatgttgcttccaggtacaagaatggtctgtctgctcattctgctgccaccacagcaaggagatgcacatcaccaagtcctgggcggacctccgcaaatgaatgcacaccagaaccaaaaagagctcaatcagcagacagaagaaggccctcaactccttcttctagagtgtcaacaccctccacccctgcatcaaggtctgtcacaccagttcgtaatactgttacagagggacataagagttctaggcgaataacaagcacaaggaatactgatggcttgtggccagcaatgcgaaacctatcttcctctttccagtcagaatctgtggttacccccggtaataaaaaggataaggtagtccccagtggatctttggatcaaacgaaggggcaagctagtgttatagccgagaggaagaggagtcctctgagaaggaagaacattggtgaacaatgtgagaatgctcaaccctcagaggaccaacctaggagggtaatcgaacaacaccgctggccagcaatgcagagtggccgtgtggccagcaatattttgtcaaggagtattgacatgtctgacaaagctggcagatcagtcccttcaacaaatatttctagaggtgtttcaccaaggaagacgcttgcttctgaaggcacaggcaaagggtttaataaatcattggatgaggtagcaaggagattggctattcatgcaggtggaagagatgacaaagtagactctcgctgtcatgcttattcacagtcaacagagagatgtaaatccgttagccgtccaagtagggcagttactttacctgttcctgttcttcatcgctcatcttcgccaagcaaggcctcttcagttacatcctctatttctaggtcctttcagagcccatctcggacaaggccttcaacacctagccggtcacaaagtgctggaagtattcaatcaggtgttgcgtcacctattattagctacatggttgatgcaaaaaaaggaaagaagaactccagccaaattgaaaatatccaccaattgcacctgtcttataatagatacttgcaatggatctttgtaaatgcttatgcagaagatactatgtctttccaaaaagtgacagctgaggtaaagttagcatttggtttgcatcacattgcacagtcttccttgttccctttgcagtgtcctcctttgatggataccaacataaccataggtccataagtgtgtttatgcaatgatttgcttcctgatctgataagcttttgagattacttttctttatgatcaattaaaacaagcttccagactatgaaatgtgattaagtaaaatatcagctagatctactggtggttatttgtttgacttaaaaactgacaattgattttgcactgtaaatttgaggtctgctatttcttagcattagtctcttgggtgtgtagatgtactctcctttaatatttgccattatttttttagtgatctttaattgttgaaagttctttctatgttgtcatgtaaaacagagtattatatataatgttttgaggaatacctcgaacttgcgggatgttgttaatatgagaagaatcatggttcaatgcatacaacaagagttgaagctacatggcattcttaaagagcaggtaagctcttcccactcattaatgatttttataattgtataatctaccaaggttgttctaaaatgcaagttatcacgcgttcagatataatcccaacttgtgtcaggttggcacagacttgctataatgctcataatcgaagcacggctggtgaaagtaaatataaacaatttgctatgtagtctcttctgtgaaagataaaggctggttacagagtaaaaagagtcttctgatgcaaataggataaacttaggataacttagcaatgttgaagtaaatacattgaactgcacaataaggacatagttgtgagcttgttatgtcacactttggttttctaaagatggtgagacgtgagatttgaaaagtaggggtttgcaagagatcatttatcctctattggacagcagagagaacatttaatctactccagcagatcacatgacaacactaacatcttcttctttgcaatcaaagcagtgtcaggaaaattcaaaataatgtgcttagaaagcacaaagtctaaatattgtgttgtatcagggaggcatcgctattatatatgcaaaaattaagtatgcaacacagagtaatcggtatctacaatgataagagaaaatataaattgtcaaatgcatacaacaaatttttaatctgctgttattttgattcagattgattaccttgaacaatggccagcacttgaaaaggagaacagtatttcattattccacgcaactgaagctctaaaagcaagcacattgcgtcttccagttacatcaggagcaaaggtatgctgtaaaatgttgcattactgaaatcgcaaacaatttcgtaatttcttcattattaactgctactttgtgattatggctaatggttttaattattgtgttaacaggctgatgtagttgctcttaagaatgccgtaagctctgctgttgatatcatgcaaggtttgggatcagcggttcgctgtatgcttccaaaggtcagctaacagtgcgcatacaactgaaaattttactgtccacttttatctgtctttggaaatcatttttttaaccatatgaagctgattttgttagctcattgtttagtacacatttagcacaagaattaccttttataaggaaaatattatctctggttgtgatcttccatgcccgcctgtagtcatctactcatctttgtgacagttagagatctctaattccctgaaaaaaaaagagtaaagtgtaggggcggtccttaaacttgtaggggtgtgtcatctaggtccctaaactctcaaaatgcatatccaagtcccaaaacttgtcatagtgtgtcatctaggtcccaaatcgccacaacccctttatgattttacgtggcgttaatgtggcatgccacacggacatgacgtggcattattttgactgacaaataggacccatttattttttttcttttttttcttctcggttttcccctttcttctcctttctatgtgatccgtgcagaagaaaggaaaaaaaaagaagaatgagaagaaaacgaaaaagaaaaagaaaagaagaaaaaaaagaaaaaggcacgtcacgtccatgtggcattgccacataagcgacacgtaggatcctataggggatgtgtcaatttgggacctaggtgatacactttgataagttctgtgacctggatatgcattttgagagtttagggacctatatgacataaccctacaagtttaaggaccgctaatgcactttactcaaaaaaaaaaaaaagaaggaaccctgcactggtttctgaggatgaatatacaatagattttaatttttaagtatctaataaagaacaccctccatcttctatcaagttcttttcattggttgcttagttttttttttccgctgggccagccaaaatttattaagaaggggagggttttaaaattacaaatttacagcaaactgcccaaacctggcttagtttcatactgtattatcttaccaggttgaggacaggacatatttggtatcagaactttcagttatagcaagacaagaaaaggccatgcttgatgaatgcagagaattattagctatggcagcaaaactacaggtacttccaatgtaatcccatgtaatctttcctaaatctgagcacagagcccccttgaatatcaaataatgtaatttctctgtaattgatggcaaactgcccatgatggcaacagttcatacacaaagccttacctagagctgttgtatttttaatcaggtacaggagtccagcttgcggacgcatctcacacaactgaggcctggaattgctcatatgatttgacaatctaagggaagatctgcaagtcccagaccagccttctgaacaggtacaccagtgcaagttgagcctctggcgatatgaacatattgtgcaaacatacaaggagtttgtagagatgaaataatagaccaaaagaacgttgaacatcccctggtgatcatggagtgatgctgtgcagctaacaactcatggtgcggtacagatgatagatttacttaaaaggtctcctcatgtgtaaataaattcattcaggttccccacacccacctacctctctttagtttctctaaaattatttgttagtatttctacaatgatagagctatgttctttccgattgtattttttggcatctggaaagaaaatacacagatgaaatggaagggcaaaagtaatgaaaaaagtgtatttccctttttcttctcctccaactgttgttgccagatatataggtctgtagctctactcttttcgtcagcttgaccaacttaagcgttgggtgaatgctgacatctcactcgtaccaatatatattttctttggattgcagtttactctaaacaacactgttgctgggcacatttcagtttgttgaaatgtcagaagtaccttatgcagtagttgaaatttaaaacataagagttgaattctcatgggatggccaatttgccgtatgcgttcttaggatgttctctcagatttggtatccttttggtttcacttaggctttacacctaggctaagccttgcctaacactttcttacctagatgcaagactcaaaattctagtatttgttttgtttgagtcagtttaaagcaaagctgcctgtgctgcaatctgaatatattccttgtaggaatattacttcagcccttgaccaaatcgattcatatacttttaagctacattaatgcccatggtttggtccaaattacccatatatccctagtaggagcaatgagaacacagctgcaaaaaatctaacaaacatggagtgagaataccagcccttgttgcttaacattcaaatatggccatctgtccattccctcttcaaaagtttaaaccatttctgggtcccaaaatattacagaagaacatagcacgaactcaacacgagcaatacaaaacttttacaaatcgatcttcttgctgcccccctatgcacaaatcttcagaaatcgctgacgccctctctcagcagttgatgccgcactgcctgacgtcagggcccctggccttgatggtgaagggatcaatcctgacccagagcaaggaaaagatggaggcgagcagcacggaccagatgacaacaatggtgggcgtccggttctgcctccccatgagccccttgaggaaggggtagaggtggacgatgacccagaaggcgaagaagagcttcccgaagagcgggccccacgcctcggagccgttgttgatggcgtcggagacgccggcgacgacgccgatgatgttgaggatgagcagcgtggtgggcgggatgaggagggtggtccacttgaaggcgtagagctccgcgaactcgtcgtcctcgtctccggtggccttggacgtgacggtgaagttggtgtcgatcccggccagcaccttgagcaggccctgcaccaccgcgaacaggtgcgccgacacgccgccgatgacccagaactgctcgttcctccaccactcctcgatgctcaccccgctccacctcatctccaggatgcccgtcgcgaagatggagatgaagagcgcgatgaagaacaaactcgcaaacgtgctaatctgcatcaccaagaaaaggttcagaacatttgaaacttcagttttggcgggaaaatccatggaagaagaggagcaattgatggcaggatgggatgggactgaccggaggcatgatgaacttgccggtgaggaggcagacggcgggtagggtgcagtaggcgaggagggggagagaagtgaaggggtagatggtggtgttgatgtaggagaagcgctcgagccacttgaggttgccgttcttgtagccgtagaggagcgggctgtgccggctgaagaagatctcgacggagccgagcgcccaccggagcacctggttgagacggtcagataggttgatcggcgctgaccccttgaacgccgccctcttcggcatgcagtacaccgacctccacccgcggcagtgcatcttgaaccccgttaggatgtcctccgtgatcgacccgtagatccaccccagctgcatcacacacatccatggcgttcacaccacaaactcactcaatggtaatatggcttagtgtctgataacggtggttacctcgagaccccagtcggtcttgtcctcgtagccgcagctgatgacatggatggcctccttgaggagcgcggcggggctggacgacggcgggacgccgccttcctccatcagcgtcgacgtcacgaacgccgccgactgcccgaaccgcttctcgaagttcatctgcgacatgagcatctccttgtcgctgtccatccctgatccaccacacacaaacttacattattccatcagctgaaaatcttctcacaccataatttcttcttagctctgaatttgggagctcaccgccgtcggcggcgacggcctccgggaggccgtccttgccgtgcttccgcttcttcctcccgaagcaagggcagcagtcgcaggtcaccatcttgggcctcttgggtcccttgggtgggttgtatccgtacagcgcctgccgcctgaacacgcaccctgtcccgacgtacaccgggccctggatcccatcaagccccttcatgttgatctgatgatctcaccaagaacgcaccacacaaaatttcagtcacattgctcgatcgatcgtgatttgctctggatttttcaagattgtatatattcatctagtttgtgtgggagagagctcacgtcgaagaagacggtgttgcggttggcgtatcggtcgtggacgtcgatgccgtcgaacctctgcgggaactgcacgtagcaaaccttccgtccgacctgcggatccatgaggaagcacatcgcctccctgatggccttgctgttgttgatgtagtgatcgcaatccaagttgagcatgaacggcgcgttcgtcagcacggccgacacacgaatctgccaagcaaaccagaaatttcgatcaaatcgagcagagttgtgttgttttgaagatgaaggatgtggtggcgtggcgtacgagggcgttcatggcgccggccttcttgtggtgctggaagccggggcgcttctcacgggagacgtagacgaggcgggggagctcgttgccctcggtgtcgtggccgccgctgtggccgaggaacacctggatcatgcccgggtggtcgcgggtgttgttccccggccatggcgtcccgtccttcatgatccacccttccgccggcaccttctgcgccttcgccaccagcgcgttgatcctcaccttgaactcctcgtactctctctgctcgatcaaatgccaatgcccccacaacagttagctcttcgtcaagctcctacagaatcagcaatgacgatggcgatcgatattaccttcatggcgcggcgctcctggacgaagttgggatggaccttgtccttgaggtagtcgaccttctgggagaagtagaactccggggcgcggggctcgatgctgaacttcttgcagaatggcacccacttgcgggcgaactccgccgtctccgacagcgactcgaacgtgagcatggacgcgccgtcgtcggagacgtagcaggacaccttgtcgacggggtagtcgacggcgaggatggacagcacggtgttggccgtgaccagcggcggctccttgagcggatccaccgtgctgacgaacaggtccaccgccgacagcagcgacggctccccctcgcgctcgtagcggagggagaggcggtcgaggtaggtctccctgtcgatcgggtaccacttggggaactggtcgaggatccacgacacggcgaaccagatctcgcagatgatggaggtgagccacagcgggatggcgtcgggcaccgggtggaggatgcggtaccggaggaagaagccgagcaccacgagacggaggatgatcaccatccggtacgggttcaccttgctcgacgcgatcgacaccttcctcgacagcggctgcctcgcctcgtcgttcctgcaagccacagagagttcaggcatgatcaatatactagttgtcatgcatgatcagtgtaagctgctcagctgaggattgcgtacagtgggacgtcggcgtcgtagtcgtcgggatcgggggcgccgccggcgacgatgccctgcttggatttccagtcgtccatcctctccttccagctcacctctttcttctcgtcccactttgcactccctggtcagaattcatcggtagatgattgagatgatcaatgtgtgttcatcaagaacattgattaattagtgtagtgaattcgttatactacctggctcagacaccgggtaggggtggatgcgcttgtgcagggaagaggagaactcgccatggccatggctgttcgatatcgggaactccccgctcacctgaatttttttttacaaagaacatttcgtgaacatgttgaggtgagaagagggagagaatttggtgtgagtggggtgaggtgtgttgtgtgtaccgggacggagcgagcgccggtgatgatcggcgggagcggggtgctgttgccgtcgccgtcgtcggggcccctcccgtagctcatcttgccgtgcagcatcgcctcggtgatgtggctgttctgcatgccatcctgatcctgctgcagctgcttctgcttctcgtcgtcgatgttgaactcgtgctccaggtcgtcaatgtcctcctcgtcctcgtccccgggcaccctcgggctccctgtaacaaaaccaccaccaccaccatcgccattagagatcaatcaacggaaacctcgcgatcgcggtatcaagggcgtagcgtgatgtgagtgtgtttttttacccttgaggcgcttgtagcgggtcttgcactgggggcagttctgggtgccctcgcggcgctcgtactcgtagcaggggcggcacaccgggaagccgcactcgttgcaggcgacgaagaggtcgccgtcgacggtgcggccgacctcgtcgccgcatatctcgcacacctgcccgctcagcgcccgcagcggcttgggctcctcgtgcccccggatcagcaccagctcgttccggttgtgcgacccggccaccagcccggcgctcgcctccatggccgcgcaacaacggccggcaacgagctgcggctgatcagggaggcgacgcaggaaggaggagaggaggaggaggaagggcgatcgatcgcttgctccacccgcttgtggcaggggctatatgggagggggggttttggcgggtgggagggatcgagaggtgaggggtggctgtttgttcgcgcgcgcgcgggagaggaggggtcgaggaggcgtcggcgcgtgtgggagacggtggcgggttggttgggtgcggcgtctccgttgccgccaagtgaagcgaaggggttgtgtgttgcttgcttgctttgcatggtggcgcgttggcgcgagggaggagaggagaggaggcctgcgtgcgtgcgttggctgctgctgctgctgctgcagatgcagctgctgccgttgttgtcaggctgcgttcgcggaccaacccgcgagatcagtcaccaaccgatgcttggctttcccgccatctcctcatttttctcccctttgctcttttatttaaacaaacaagaattaaaagggctagattatattggtgagtggtagtagtatagttgtagtagtaccaatattggggcatttaaaatttgatgcatggttgccgcgagtaattctacctgagcttgcttcaagattagtttggtgagtacggaagtcctctccagttgattactggagtagattagtacactggaatgactgacgcacaccgacgagattatgcgtccaaggaagtccaattttctagagtctgcacattgtttatacggaagtctagataatgcacatttgatataggacgccattgtttatacgggattactggaagctgtaagtgaaggacaaccactttttttcagttcagtgacaagattacaagaaatggattccgagttcaatagctaaaccgatcaaaactagtctttttgacaagggggatccctagagtcctgaactgatttctttctacttgcggtgcacaaatagtcgttcctatcaactcaaatccaaccgaaaattgctgttcaagtctagagtaggttggtctgtcccaagccaaacgcacgtttctgcccatcgatcgagtcacagcattgagccataagcaaacgaggcatcgatcgatcaccttttcttttcttttttttttcttggcatccccagcgattcagagaaggtgaccaggcaccttagtttggtagcatcatccatcacacaccctgccagtttgccaccaaccacacgttgtgatcgtgtagcgcacacacacatatacaaaaacgccacgaaagcttcagcttccattggcatctgaacatatgcaatctgatcatcgccggaaaaaggaggaagaagaaaccgtcacgatgaaacctgccagatgcgtcttctgctgttaccgaaggtacgcagcatatcatgtcgttgcgtccagtgacgacctggaggaagaaacgtccccatcctggatgtgaaatgcaggtgaggggcagcagcagcagcagctggctgaagcatcttaggacgcaagttttgattttggctggtgatcatcctgtcgttgttgcgagatctgcctcgtgttaaaggcgaagtatcactgtcgctatggaaactgtagcttactggggctagcccctccttgcgccggcctgctgttctctgttccttgtggtgtgctatatattgggcccggagttgatgtgttctctccctcggctagctgcagtgttgctcatgttctaataaaatattgttttgcaattggaagaagggagatgtaaagttgctaagacgattgggccattctacgctattgaagctgctgtttcttgcgccc

SEQ ID NO: 7168 - DNA, 34566 bp, Oryza sativa
agaccgagcgcctggccattcgcagttcgacgcggcactagggtttgcgccaccgccaccgcgcgccacccatgttcccgccgccagcgtgctcccgtcgtcgcgagccgcgtctcccggcgctggcatgctccgacgcccgtctccccattgcccgcccccacgccacccaacgccgccccaggctgcccgatggccgacggctgtctccctgtcgctcgcccggtggccgtctccccgtcgcccacccgacgccgccccacgccgcgccgaagccacctctgctcgacgctgcttgaagacacccctgctcgacgccgcccgacgctgctccgatgcctttgccactgctctagccggtttgaaaggtgaggccgaatcgcccctgcccctgctcttgtgttgatgcatgtgttgtccctagaatattacagcaaattgatttttggcctgcaaattgattgaagaaaaatttatttggttcaagaatgggtgacaaggcagattggggtgatgattttataaggcatttgtttgatgtttgcaaagaagagatagaagctgggaatatacccatgggaattttcaccactaccggttggaaaaatgttgttttcaagtttgcagaaaaatcgggtgacaagcgaaccaaaaaaaacaattgaagaggaggatagttattttgagatatggcatcattgtatgaatgctctgtttatgtggaccatatcactttgatggatgaaaaactaatatattttgatgaaaaacttatacattttttctacaaattggccttttaaatacaaaatattgaacatattaggttaggtttgtacgagtaatttgcatataaacagtcctttcttatacaacttacagtttcacagctgctctaaccaaacgggcttctgcttttcccacagtttattttacacagctgcttttccacagcccacagatcacaacagcttttccaaaagccacaactctaccaaacacacccttaggctatgtgaaaatttttgccgcgttacatcagatatacagacacatatttaaagtattaaatatagtctaataataaaataaattacagaatccgtctataaaactacgagatgaatttattaagtctaattaatccgttattaaaaaaatatttactgtagcgttatattgctaaatcatgaagcaattagacttaaaagattcgtctcgcaatttatacgtaatctaactaattaattttttctgtatatatttaatactttatatatatatatatatatatatatatatatatatatatatatatatatatatatatatatatatatatatatgtccaaatatttcactcattttatttcgtgagacagggtgaaaaaattatcagctctccgtctgcccagtgatatccgcactcgccttttctgactgctgttccctgaatgcacgtcgcatcaagtcaggagaggcattgaacaggagatagaaaagcccacaagttctcttcgagaaagagaagtattagttttggacaatttttaagttaaccttagaaatataaatcataaataacttttaaattattaagtttaaaaatataaaaattatatgaatagatttgtcttgaaaaatacttttaaaaaaatatacatatatcacttttcaataaatatttttataaaaaaagtcaaagttgtgttttgaaaaccgtatctctatccaaaacaatttcttttataagtacggagcgagtactcccgcatcatctgcagaatttttacgacggttaatttatttttcataagaacggaagtacggaacaaaacacccgcatttcacccgcatttcttaagatgatgataggtgtcgggtgaaaatctgatctgcacactagattagctactaattacacacttcgccattgtgttcggtaagactagaaattattaagaaaaataaaataaattttaccccgttaaattgagtagcttaaatcatacaagtattagttgcatacaagtataattatacaagtattaccccgttaaatggagtagatgcacagtattagttgcatacaagtataattgtacatataaaaacaaaagatcaaatttataatatgaaattcactcctaaatttaatattaatatataaagctgtatataaaattcagctcacgtaagattgcattgaaaaatcccctagtttggactttggactaacacggtagaaaacgatcatgctctttagcttatcagctgcaaccaaaatttaaattttaaatcttaattttgattattttaatcgtagttttttttcaaccattatttttataaatctcgaatcgatataaaagaaaattgaggactgctacaaaacaggatcccgttgcaacgggatagacatattaactattctcttgtacgagtatcacaggtattaggtcctaggtatcacaagtaccgggtaagaggtatcacagatatcaggtaccatgtagctggtaccaaaacaggtatcatactgtcttatagatgatatcctgttacaacatgataccgttgtttgaagaaaattacccacacattatttttctcgcaaatcatcgcttctgaagatcacacaacggaagtccggaacccacgcccaaatcaaaaagaagcggacgccccccaaaaagttcaaaactttccaaaacatcgtgtgcgcggctgcatcgccgcccacccgcctcatcgcattcacaactctcgcctaaaaggctaaaacccttcctccgccggccgaacccgtctggattcgccaatggagttcccccgccgcggccaatcctcccatcccgccgacgccgacgacgacgaccgccgccgcctccgcttccctgactccaccccgccgagcggtaaccaatcccaactcccaaaccctcggtattcccccaaattcgttgtgcgatttttttatttttatttttggctacgaatcgcattatctctgttgcaaatgatgatctggtggtagattggtagtgaatgatgctaagatttgttttcatgatgcagtagttgtaagcggggttagtgattttattttttattttttattttttattttttattttgattttgatggtgttgtgttcatgggcaaaggacgcgaagctaggccggctccggcgcagggggacgcggtgacggcggcgctggggcggcggagggaggagctgctgtgggagctccacaagacgaagatccaccgggagatgctcctgtgccagctggtcgagacggagcgcgccatggcggcgcgcctcgccgcggcccgcggccaccccgccacgccaccgctcccgtggccgcagggcgacctgctcccggcgcgggagtacgcgtggcggagcacgccgtgggaggagcaggcgaacgcgaacgcgaacgcgcacgcgcacggtgccctctcggcgccgcgctctggtgacgaggagatcaccccgtggtggcgccggagcccgtcggcagtgacacccccggtgtacccgcacgtggagcgctctccgtcgccgccgattgcgcggggatggccggccgacgatgacgagcggcaggaacgtggggagccatccgggtcgccggcgatggctcctccggtgcggcatgcacctcatgtcgaacagtccacaccagtgccgatcaagtcgcctgcggcggaggccgtttgtatgccatctgggtcaccggcgatggctcctccagtgcagcctgctcctcatgtcgagcagtccacaccattgccggccaaggagcctgcggcggtggcgaaggtggaggcagatgccattgtccagactgcggccaatgctgatgccgaccaggcgttgctcggcaagggggcgacaccaggagggcaaggttgcactggtcagaagggtgaggaaggtgatttcgccatcgacggccatggcaggcagctgttgggtgagatgaatgtaagcaagagcaccgagcagccaaaacctacagaatccatctctggaggccacaccgatgaacttgtccagaagcgttatcaagataataagccggcagatcaggagattgcaacattggacaagcagaagcgagtaggttccaatgatgaggtgattcgcttccgttactgttgttccccagtttttgctgccttttcatgtttacctatcaagaatgctgttcagattatgtttgcatgtgcccatactccatattgccatactgtgccacacttgtacagtgtacacttgcgctatatatttctttgtatcgacctttcaccagcatcttagcttgtttacaaatccataggcacttataggaatcaaggcccatttatgtgggattttagcttacaatatcaagttcaagaatgatctactagcattttacttgcagatcaggaattgtgtgtggagagctagaaaaactatatcagttttcgttgtgtttacttgtacgggcagattgaggtaagcaaccgaacaggtggaaatttaaaggtgtaggataaaatgtctattcaaaatcagcaagtttcatctttaatgttgcagtgtacaatttatagtagtattagtatatatttagttagttaaactgtaggattaccatcgttcacacatctggccttatttatcactttacctatctgagataagatatttgagatgatactgttgtgttgatgctctataacaaacttgctctggaacagcttacaccagaaaggagatcctctggtgtgaagaggcagctggcttcaggaacctcactggcaaagaagccgaggtcccaggggagctccatcacttgctccctctgcaaggtcaccatgacttctcccagggcgctggttgagcaccgggcatccctcctgcaccggtctaacctcgcgccattgcgatcggggaacaaggccaccactgaagctgcgcagcccgcggagaagaagaccgagaagccagaggcatctgaatggaacagcagtgcacaccaccaccagaatcggatgtactactgcgatatatgcgaagtgaggtgcagcagcgagaagatgatggcgtcgcatctcgccgggaagaggcacagggagcggcacaactccattttcatgtaatgatgatgggacacagtacaagcttgccgctttgccgcagacctgcagcagtgcaaaaaataccattttgtttgaaggaaagattgtttaggccatgtttgtttaggtttatacgatcggtttatgagaagtttaagtctaaacaaacaaatcaatttattggttcggcttttttaagccataagaaaaaactacatgtcacagtagttttttgggattatggaaagtgtattttttactcgaccattaaactcaggcttcgaagtcactgtcttacaaaaacatcctccattcaaaagagttggcttaaaagctagtaaacctaaacaaaggctctgtttggatccggaatcttgctatttagtagtattatacgtagattactgacaaaacccattccataacccctaggctattttgtgagacgaatctaacgaggtatattaatccatgatttgctacagtgatgctacagtaattagccgctaatcatggattaatatacataattagattcatctagcaaaatagcctaggggttatggaatcgattttgtcgttaatctatgtttaataattctaaatagcaagattccagagggatatttaatagcatagaggatccaaacaaggccaaaaagggttttaacttttaacctgatgcttataagtcatgattggtgaaaatatttggggtaaagcttctgtactttatactatagtgtattctgcttattaaaaaaacaatctttccttctattcttagtggtgcaaaagttcagattaaaaaataccaagcaatgagaaaaactctaaaaattaagttgtatgaggttgaaggataaattttgcagaactacggagattttggcatgcgggcgtacagcacgtaacctaggtattttgatgctacaattttacaaaacctcatcctaagcaaatctgtttttagataattgaatgaaatatctcggcctttgctcaagagctacatctaattattataaggttaacacaaaagcaaactcacacaaggagtatgtagtcaaagttaaaaactaaaagtagaagcaaattaataaaaaccaaacaagataaagacctcacaactactaattctatcaactattgattctattggtgaatcttcacccgaatttggcaaatagctacatgattatcgactcaagtttacgacatgcatcttttgttagcttgatatgattctaagcaaatcttagcataagttatcttagcaaaaatttatatacaaaagttgttttaaaaaaccatattaatctatttttcaaaaaaaaatagttaatacttaatttaaatgcaatagtgcttcgttttgcttgccggggaggaggggttcctcctcccgaacgcatcctctaagtatataggatttgctcaaacatttcaaatttagttacggcctctaggccatcctccaaggcaccttgctacagttttagctctttttggacaacggattattatctaggattatttgttttacacatgtaaatttatgttttctaaaaaaaacttagggaccctttaaatcgtagaattgaaaaaacgtaggaatagaaaaaaaacgtaggattttaatagaaatgtaagtataaaacagatgattgcaaaaacacaggaatgaccgtttgattggaccacaggaaaaacgcaggaattagaagagagataaagactcgacggaaagtttccatgaggttctacctcaagttagaattcctctaaaacttgcatggagtattaagcattccataggaatttcattggattttatagcatctattcatttgattcaaagggctatataggaaaaattcctatagaaatgagatcctctaaaatttatatgaatttcatttgaatgaaatgggcccttaacttttctcttttgcattgtccacatgtagactatgtagtactccttacatctacttttgatagtcattttatcttgacacacagaccaatgataaataattctacttatcattcatttaaatatgttactactcattcatcgtaaacaagcaattcattaatatttacatttttcaatgtccatatagccaatcatgtgtggaagaatggagagtcacgcattaaatccgaaaaagtcattaagggaatagtttgttggattgaaatatttctatcaaaaataaaatttttagatttaaaaatataactatcaaaaaatagatagagagagtacaaaagtttgaccggtatccccgccgcttcattgaaagcaaccacctctagttcttcccagtgtcttaattaccggccacgtattcgaagatttccaatgcggatatcgctagcactagtaatttgaccgacgctactagtgctagtactggagtagtatgaaacagtgaaccagccgtaatctccaatgtggagtattcgctttccctattacgatgagtctgaattaaacgacaattatttcctttttgcacgttaatgtgacgcttcgtttttcctttgcctctaagcaaatcattgcaaacgcgacgagtgtgtgagaaactgagaacaaatcagccattaatctctatatcattagctggtcacgcggcccaattgattcctataaaagccgccccactcaccattctgcttctgcgctctgctttttctctgctcttctcgatttctccggtgcaccgctcctctgatcggccgatggacttcgccgacgctccgtcgcacggtatgcatcgacgaagctctctagtctatcaacatcttctactgtcgtctccatggccgtttctttgctggaaaattggagcttagaaccgaacgatgtatagtaaaacgctagtaaaaacagatgaccctttccgtgtcccttggttgtttagattatcagatgcgatgcgatttgatcttacgttttttcatgccatgaatccactttgcatgcatggcagataaaaatgtcgatttcaaaacggatataccctatacaggtaattagcacagatctgcttgtgtgacagatagattctgatgcagaaaagtttcatcaaaactgtttgtttcttatttcgttacaaaaacagagaagaaacatgtccatcttggatcggcactcgatagacttctgcgtttaagccttgttagttgtagtttaggcactagacatgttgctcgtgcttaatcaatcacgaagaacatcatcatcaacaatggctggtgcatatacttgcaggagactcgctggtggtggtgagggacgcgctgctgtcgcagctccagcaggatcgcctccggaaggacatcatcgtcgccgagctcgccaagatagagcgcgccatggctctgcgcgatgtctcgcagtcgccgacgccccggcacgccgccgccgccgccgccgccggaaagactattacaactgtggtgagaaacttgtatatgccatcatgtttttgagtcatatccatgacccatcaattttgtgtctctacatgtatcagagtattgttaagaaaacaaacctgttcgatcagtctatacttcgtctttgttcttttcaatttcaaggtagtcaacacattaatgtagttctttcagactcagtaatactggggttaattagtgtgcacttgcactagctagctaatttacttgtattttcgtaattggtctcaacttcattttctaatggtttactgaaactgcatatcaagcaggctacaccggccaagaaaccatcgccttcagagaaatctgaaccggcagttcagaagtcgatgccaccctcggcatggagctgcgccgtgtgccaggttcgaacaaccagcgagcgcaacctacgtgatcactgcggaggtcagaagcaccagtccaaagtcgcagcactggagaagacaaccaaggccatggcgagaacgacggcgaaaccttctcccggtgcagcagcaagatggggctgcagcatctgcaacatcagctgcaacggcgagtgcgatttcgatacccacctgaaggggaagaagcatcaagcgaacacccaggccttactggaacaaaacaagaagagctcagtgaatccagagtcacagggaaccaaggcggcggcagcaacactgatctgcagagtttgccaagctaagttcacctgtcagtcagacttgcagagccatctcaaggtcatgaagcaccagctgaatctccgggcaccatcttcagatggctctagcttcaccagtgcaacctcggagagtttgagtttggaattgtattcttgcaaggtttgcagcgtgaagtgcaccttcgagaggatgctcgcgtaccatctcactgggaagaagcacctgaaacaggagaatttgcagttgtcctgcgagatctgcaaactgcagtgcaacagcgagaaagtgctctctgaccatcgttatgggaagaagcaccaggcgaagctcgagaaagtgcttcaggcaaagctcaatgcgacggaatgagatgcgtctgattctgattaaagatgctggcgttttgacttttgagcaacgaacatttaaattatcgacggcactgtatgattatttcagattattaatccttgattttgggacttactgctgctgcttcttttcaattgcttctatatactagtacaaaaataatctatacggtttaaaatgccactaatactacttgtgcaaatcaatactcaaatatcgactgtactcttgctcaaagacgcgagtatgtgccctcttgaattattttacaagtgaatggtaccaacaaaaacatcgatttaattatttaaacaggacacaatcacaatgtttccaaaaggacaaaaaagcacaatctgagtgacataagcctactccctttgtcctgaaaaaaacgaatataggactagatgtgatacattctagtacaataaatctgaacagagatatgtctaaattcgtagtactagcatatgtcatattcagtactaggttggttttttatgggacggagagagtagtcaaaatctgagtggatattttatcatatcacattgttacatcgaacttgccttgaggcatgtaaaaactaaatgatatgccagtttatgcaacaggggtgtaactcgatgaatgagtatccttaactcgtatctttatgctgctctccactaatagttctatggagtatcattccatacaaacaatacaaaattctcactccatgcaaaaaatataaggtgcattaattttacttttttttttggacaagactttacccatgattactttattaaagtagagccctatatatattaaagtagacaagacttcaccttatctcatctctatggttctcatggacaaactctcaatagcaagcctgcatagttcatctcaggttattagagcaagtttaatagtatagcccactactagctccaattcatctataatcgatctaatagccaattcatacgatagttgcttactatactattgatatattgttccacctgtcatatacacattgcgtcttggagtccgtgctgcaaccaactacagatctgtagcctgctgcttttctctctcactattatctcactaaaatatatttatagttggctaatagcctgctattgtacctgctcttatgcggcatatttgcaatcaaagtgaaactattatacgggtatcagaagttgtgcattgcatgattaaaagggtagtttttttctaagcatctatacttatggcctcacatttttcaaaaaaaaaaagcctcacattgttaatttagtacttacctccctccatccctagaatactactccaaaaagtattgttttgagcctaaaaaatttatcccttaaaaaatctttttagaatgaagtccagtagacatctttaatactacttcatcccctcttagtttttcgaatgatgttttagaatgcacgccccccttcttagtctaaaatttcatctcgcaaaacatatcttttaggttggggtccattaaatcttttaaatatcactccatttgttcctaaaaataaatgtagttttagagtgttccactgtaccctttttagggcccctttgaatcgtaggaatgaaaaaacagaggaatagaaaaaacacaggattctgacaggaatacaattgtaaaacagaggattgcaaaatacaggaaaaacgcaggaatgaccgtttgattagaccacaggaaaaacgcaggaatcagatgagagggatagactcagaggaaatattccaagaggttagacctcttgctaactttcctccaaaatgtgcatagaattactcattccataggaattttaaaggattggataggattcaatcctttgtttaaaatgccttcattggattttttttccatagaattaaaatcctctaaaattcctacattttttctacaaatcaaaggggacctaatattactctttttttacttccatttttagtcattgaaccaatagtactcgcccctctttcttgatttcctttcccactaagtttccctgcatcatgcgaacgtaggtccgcaggtgtgcgtgagaactgagaacaaagcagcctttttaggctgtgtttttttaggggttgggaaccccttcccttcacacagaaatggaacgatagattaacacgtgattaattaagtgctagctataaaaaaactttaaaaaataattaatatgattttttaaagcaactttcatatataaactttttttcaaaacgtgtaccgtttaacagtttgaaaaaaacgtgcacgatagagatgggttgagaacccataaaaaagaacacagcttattcaccaccattgttggttggtttcgcggcccggttagcatcgagtgccctataaaaggaataagttcactttgactatcttaattagtgatcgaatattatcgtttgatatctcgactctcaaactattaaaatcagtgtaatttgacttccccagtggttttggaggacggttttactgatatggtagtattggtgtggcgcttaggcggtattaaaattgaagatatatatatatatagacccatttgtcattcattagaaaaatgtgagggccacttttctccctctcattcggaaacttttcacactagttaagggagtaaatctgaacttattcctctactaaaaaaactactctatctcccaacgctttgctttttgcgctctgctttgctagctcgctttctccggtgacccggtcggtgcgctgctctgctccggtcctcatctgatcggccgatggagtttcccaccgccggtggtagccgcttcgccgacggtacgcatcgaagctctctttctctctgccctctctacctagccttcctaggacaggatctgtggtcgaaagggtgatccgtttcgtatctctttggttcagataatcagatcgtgttttgatgtcaagaactctccatcctgcattcattacagttagattgcaaactagatgcatcatacatgtcaaatagcacaaatctgataataggacttctcaaagactgttgtctgttcatctggaagtggatttttgtctcttaagaagacatccccttattttatgcatggcattcaaaaagtattaaaaaatttgttaagatagattaatatatgatatatcttttcgcaaatatgcgagttaaaatttaacttatacaattcgaaacaaaaataataatttgagcatgaattgctattcatagtcaaatttgttatttttgtttctatttgtataagttgaatttgaatttgcatgtttgtgaagtgatatatcacatattgatctatcctactaaattttttcaaattttttgatggcttttccccttaggggatgatttgagttttcctgttcatcttttcgttaagataaaaacaaatgaaacttgttcatcttagataggaacctgacctgacagcgattaggccttgctagttctagtttaggtgtggaataattccaatgttgcgtgtgcttgaccaccaaggacacatgaacaacaacaatggatttgtgcaagcagtagcaggagacccgttggcggtggtgagggacgcgctgctgtcgcagctccagcatgatcgtcttcgtcaggagatcatcgtcgccgagctcgccaagatagagcgcgccatggctctgcgcgatgcctcgccgtcgccgtcaccgagccccggcacgccgctggaaagactgcggcaagtcaggtgagaaacctatgtacctgtatgcttctgactaacctttttttcttcttctcacattatgatattcagatatgatcatatatattccatccattttgcgtctctctgcatttgtaaatttgttcatacttcagcatactgttaagaaagttagctccttgtaaggcagatacttgtttgctcggtcagtactttgctaattttcttttcagttgtaaggtaaagaattaaaccatatgtaaggttgatgtaaggttgatgtagttctcccaaactcaaccatatgtatgtggcattagtacggtttgatctattggactaagtaatactccaatttacttcaatttcgcagtttcctttcgtaattgtttactcaaactgcttattaaacagacatggagctgcgccgtgtgcgaggtgcaaacaagcagcgaacgcaacctacgggatcattatggagggcagaagcaccagtcgaaagtggcaggattggagttgaaggcgaagacggcgacagtgaaaacgacggcgaagccttctcctgttgcagggcagagagcacacgctgccagatggagctgcagcgtttgccaggtacactgcaatggcgaatggcatttcgatacccacctgaagggcaagaggcaccaagcaaatacccaagccctgctggaacaaagcaacaagaattcagggaattcagaatcacacgatggaaccaaggcgcaaccgagcaatgtgagccatcacgccgagaagaagaagaggaagaagaagaaggaggaggaggaggaggcgacatggatctgcagagcttgccaagctgtctgtacctgtgaatcagacttgcagaaccaccttaggggcaggaggcatcagctgaaagttcaggccttgcctgaagctgcgaaacaagagaagaacaatcctcccaagcttgcaaagaaccctaataagcaaccctcggaatgggtttgcagtctctgccaggccaaatgtaacactgaatctcagcttgagcatcaccgcagaagcacgaggcaccagcagaaggtagaatctcttggatggaatgcgaaagagagtgacctggggactctgcaaggaatgtcttcggatggctctagcagcaagagtgtaaaaatctcagcgacgatggataaacagaaggctacgtatttttgcgaggtttgcagtttgaagtgcaccagccagagaatgctggcggatcatcttagtgggaagaaacacattaaacagttggagttgcagctattcagctaaggtctgtaatttagctaaggtttgtaatttgcagtgcacacacagctagaaaatgcttgctcatcatcgtgaccaggaaaagctcaatgcaaagaaataaaatgttgcagcagatatgagagttttgaagcaatggcgttatgatcaacggtcatttaaattacgcgatggcattgtatgaatgtgaattgaattattaatcattaatttcaggacttaccgctgatgttttccttttgcttacaatacaacttgcttgatattcataattcatttcacatgttacaatatgatatacatgtcaaaatgccaggatgccagtctgctgcagttgccatttcagaagtaaatggtaacaacaaacaaaaaacattgatttgtcaccatgtttccaaaggatgcagcagaacacaatccagacaaatgcagtcaatgtgcgtcagttcaaaatctgggtggatatttcataacatcacatcatcagatcgagcttgcattaaggcatgtctaactaagactcttgtgatatacaaagcactgcaaaatatttcagaaaaaaataagcagagtgcagttaatcatctgagaaggatgttatttcatagccacatctatggaaggactagaccttcaacgctacacggtcttgccatgaaacactcctcttatcatcgcttgccggagagtttccggtatccctacaagctgataggttgacatcggcagtcataatatcttcatctactccagcctgttcagcctttttaagttccaaatggttatggtgccccgggaaatcagaaagctcatcattctgtagttacagaaaaccacaatgttagttgtcagaaatagattacgttttgtcagatatccataacactccaaaaaaaagttacataccattgcagaatcttgatttaaatctaaatctgttcttttactggtagatggcacttcagtactcgccccataaaaagctgaagcatcattgattcccacatgagatgggactcgcggagctttcttcttcagccgtacttgctgcgaatcattcttcttgaaagaatttaacttcttttgtaagaaccttacaaacaaaacagtttccatgattagttgaagaggataaaagggtcaatactactactactatttatgatagaattcacatagcttgcttcgttaacatcaattgagtagatagatgggaacatggagggacaagaaagaaacggaagtgctgtcatacttgacttcagaaagcaggacgagctttcgcttgtttatgctctctagcttcctcctcttcatctcattatcctgcatcaagaaccgctatcagattcaagtccaatgtagtgcaagtgtatatatgcagtatcaatgtgaccatgtcatcatcccatgctacaaccataaccaattcttgacagccctagtttcgcactaacatcagctatgcaatcaatcctagtttcacactaacatcagctatgcaatcaaccctagtttcgcactgacatcagctatgcaatcaacccctggactcctgcaatcaagcggagcagagtactaggagatatcatatgcaatacaaaattgcaaccgcagcgaattagtagttcagacaaggaggtgaacaaggagattcatcggcgaaaccgcgccgcaaagggcaagggaaaccagagggggcaaacccttcaccttgagcacatcgcggtagtcccgccggagctcgtccaacctgtccctctcgcccctctccgccgccggaggcggaggcggaggcggagcgagcctcttcttccccttcctcctcaccagccgcacctccccgtcgccgtagtccatctcgtgaggaggacgagggcgagaggggagggggggctaggctagatccagacgggggaggcgagggcgaggaggagggaagaccgagggccgcgtggtggtgtgaggggatcaggaattcaggagggggtcagtcaggccacggggaggggagaggttggggagaggaggagatggggatagcgaggaggaggaggagcgcgtcctccctcctctccatatccgatccaatccgatgcggtcgcggccgcgtcgtcttcgcctcggagaggtgggcgggggcgggggcggggcgaggcgctggtcgtgggtgggtggatgcgtgcgtgcgggcgggcgagagcgccacttcttttttttccgccatagatatccatgaccatccatccgttcgacgcggttgatggctgtggtctgtgcggctgtgcccccatgcgactggagttgagctgtgcttgtgttgtgcttgcgtgattggctgggggcggatgtcatgtttgtcttcctccttggtgtccatggttttggccttcgggggcatttttttttttttgacttttgcttcagcaaaatttgtttgggtttaccaaatgttccttttttactcttatatagtaatccctctgtactcataaagaaagtcgtttaggacaacgtttaagtcaaaccttgggaatataaatcataaataactctcaagctgttgagtttgaaaatataaaaattatatgtatagatttgtcttgaaaaatactttcataaaagtataaatatatcacttttcaataaatatttttatagaaacaagaagtcaaagttgtgttttgaaaaccgtgtcgctgtcctaaacgacttactttataagtatggaaggagtatatacataaaagaaaattatgatgatttttctcccttatactatgttaatatagtacatttttatctcccttatgattcatgaaaattttgcctatgctagttttgtttatatgttttccacgatatttatgatttgtccctctatgtttggggtgactttttaactacccaagttcaccatggtatatttatatattttaccgtgttgaactgtttgacatttagaatgtaaacttgcatttttactactaaaggaattgacattttaatacactggtactttgatacaccctcatcaagtattctaactcggaagagggattttacgatgtttgcgagttacaaggaggtggggcgacgtgagccgttgatctgcgaggggcaaggtatggaaagaaaatattgtaataggtggcattaatgtaaatatgatgatattagaatgacaaatgtgtcttttacacatatgaaaaggtatgagaaggtatcgaaggaattagcttgtagcctgttgcgttgcatcgttcttagatacgttctgttcgtacgtaaggtttatgtgttcttcgataagttgaaaggtggagaattgagggccagcggtggacttgtggccggaggcggtggttggagggaggggcggcggaggaagaggacccggaggaagtggtccaggactgcctatgttcgccggagctagaagcggccgcacggtctcgatctgtcagacgattggtttagttttttttcgcaaatcttcctcattgaacttgttttgttcttgttaggttcttaaatcttctcaatttgttgtcctttcgatctttgattacattcatcaaaagatggatcaccaaattgctatgtaaattaatgactaactggaaataattatcaagatcatgcgaatatgatatgtaccacgtaaatcggaccaaagtttggaaaccgacacaaacagaacgaccgaagattggaaaccgaatagaagagaatgtaatttttgtccccaccacgtaaatcatattttacgttacctttaaaaactacttacgcggtaccttgtggtaccttcaaatccacttacaccatacctttcggtacgtccatacgttgttaaacataattgccctgttatcaattaccttttaatccatagtacctttctacctctgatacctttcataaggtacctttcatcgtgagccgttagatctatgccattttaggaatgcaaacactgtaaaaggtctcaactcagaaacgggaggcctacgggaggggctaaacatactagggaggactatgccaacataagctcattatttcgcataggaaaaagtacgaattacccccctgaagtattaggtgagtacgaattacccccttaaacctgaaaaccagtcatttttcaccctcaactatcgatatcggacgaaaaacccccctaagcagctttgcaagcggttttggtctacgtggcagtccagtcagcaattattttctttttaaatcagtgggccccacatgtcagtctctcaccctcttttttacccctcacctctctgtctctctccaaaatccactctcttcttcctccctcacctcgatgatgacggcgggcagagcacgaggcgacgaagggggcgatggagctcgggacgatggcgggcggcggcgaagagggcgcccgcggaggggatgcggcaagcgcgccgagagggaggaggcgggcgcttctctcctctcccccgccgccgcgctgcgcggcactcctctccgtgaacgagctcgtgcgcgaggggcataggaaggccgagagatgaggaggccggactccctcgcgaccgccgtctctagccagatcccagcgagcaggcgtcggggaagggtagtggggcacggcggtcgtcgtcgggccagaggtggtcatcgcagcaacgagtatggctgggcttgtcgtactccggcgggagtggctcaaacgacgacgacggcggaggaggaggcgcccactcagcccgctccctggcctcctcacctctccctccctcctcagcctgctccctagcctcctcacctcttccctctacgcccaccccactattgccagcatgcttcggccgccgccgctccgcccgccccgctctgccaccgctgcttcgccccgctccttctcccgcttctagtcagcggcgaagttgccaagcagctggtgggaggtcacggagccatccatggtgaggtagagatcgtcggtgcatgccgcgagctccttctgtgtgcggtaggtgaagttgagcgcggcggtgacctccttctcgaagcgggagaaggggctcgtagtgtcgtcgagacgcagcttgcggagcttgcagaggctttccccgagctccatcatggcaccacggtggttctgtgtttgtgcacgatcatgtgtctaatcacaatttttactggtggagtaataattaatatgcatagttaaatgtggaaatgagacgatgaaaatatacttggttgaagaggtggtggaagccgacggcgcactggaggatgcgtggagcagccggcagcgtccgggtgggctcgtcggtggtgtaccagagctcctccacgacatcgtggcgcgcgtggaactcgccgccgttgaacagcgccaccgccaagtcgaagctcccacatatgatttccgacgactcccaccgaagcagcggaggaggcgcccgctgctgccggcgcgcgagccgcagccgccggcatcggcgctcgctgctgtcggcgctcgagccgcagccgccggtatctaacgggagtgagagagggggtgagagggaaaaagatagagagaagattatatctgacaggtgggccctatcctttatttaataaaaaacttactgactggactgccacatagaccaaaaccgcttataaagctgctcgagggggggtttcatccggtatcgatagttcaaggtgaaaaataactggttttcaggtttaggggggtaattcgtactcacccaatacttcagggggtaattcgtactttttcctttcgcatactagctctgttcctttttacattatttatcagattattaaaatgaatcatttgctcaatgctttaaaaactttgttcgatcgtattattttaatctcttgtttatagatatatgttaggttaattttgtttagaaaaaaatatctctataatcaagtagataattcgctcaacaaattaaccaaatggggcctagaccaaacattatagtttaaaacagtttcatatgaaaacataggtgaataatgcaaaatacatagcaagatagcaaaagagaagggactctgttgtccccatagttgatccggcatggaggagaggtggaggagagaacgaggaggattatcttgtccgcgagaagaggaagaggatccgatgatgcgaagattaggccggaatccctgtgtcccaacccaacagtgggtatacggtctaaaatttgagtagccgagaacatactactaacactttaaataaattgagtgatataaattacaaatgttctttttatgtgttattcgtaatgattggaccaacactttggggttgctccttcagcttcgacgatattactttaccttatctgtcaggcatggcctaataatctatttactccaacggccatagagaggaggggctttctgcctattgtatgggacatacaacctctgttgacgtttttgcatctatacaggatacaccaatagatggtagtagagagtgtttgctgtgttttgagtagatggtagtagagagtgtttgctatgttttgaggatatgacgagggtgtatgtgatgttactgtcctatgaccacgtttttcactattgcaatgagttagggatagtgaatttaggaaaagataatttttccactattgcagtgtgttagggatagtgaacttaggaaaagatagttcggggctaaacatactaggattgtatcattatttctcatactagacaggcattatagcttaaagcaatttcacataaaaacatagagaactgcaaaatgcatcacaagatagggaaaaaagaagggagctccactggtcagagggctagggggcttgagcccccttgccatactactaaaagtaattcattttacttctagggaataataaccgcatccgggatgattttttgtccgtcattgtcatcatctgctatgcgattttttttcttcaagcaaaacatactaaactctagggtcctcttggctcgatatgaagcagatttggtccgattattggaaaaacgagaagagaggaagataaggatagaaaccctcaatcaattttggattatctccaaggttgcattcaaattttacaaaggagaggcgttaggcagctgagggactctgtgacattgtagcgatggccctacgtgacaatgacaggagcaaggggagtccgattagacttttgattgcttgatgggccggatgtgcgattgcgggctgaggcggaggggaggagaagggaggaaagcgggccagctcgctgcagactgaggaaggaaatgggatcaaaatggtctagatagaaaggagggtttgatttttatttaaataaatattgaaatggtgtttgtattattaaaattagcaattgacctacaaaaattccgagaaaattttagagagtgtaattaatcatggataatttaataaaattaaacccaaccatgtaattttatttctcacacatactttactttacttgtaaattaatttaattctagaccttcctacttagaaatacccaagtattcccaaaacaatgtattttaattaattaaataatgtaaatgtttatcgattttttctaaattttctcgtattttcttcccgttgcaacgcatagacaatttttctagtcttttataaaatacaagattatttagagaccatgtttttacattagttgagacgaaaatgatcttactcaaaaatattcttcttattactattctttccattttttcaccctcatgcaaccatgtttccatattatataggctaagagtcgttgttgagctgttgttacccatagcaccgatgttttgtctctcatctttcgctctttcatgtcaacgaatattcctaattaacaacgccaagagtccgctattaacaaccattgtacatgccgttgcgctgatctcgctttcttgtgattctctgttatctttctgttttaagatcgtgattttctagggtaacaaactctcttttctccttaaaattcaaaggtgtctttccctttagctaaaaggaggtttgcatttctaactgaacattggtgcattttgtgaagcttgttatttatatatttgtaacagcttatgctctttgagacatgtcattgtggatgcctctgttatgatgcgtttgttgttcggcatcgaactaaataagctgttgagtgttgttcattcgtttggtgtggtattatccgtatgtggaagttgttatgatgcgtattgcttctgtataacgagcagcactcttttcatgtcatgatgactgacattacacacccttcatataaagccatatatatcttttattctccaggtgtgttgtattccttcaatacggtaaaacagatgcaaaataatccaaggtttgaaaattgtaccactgttgtgtagccacaaaatgacatgtgcctaactgctgaatttgagtggattaattgatttggaaatcctctagttatctggattagttttggcctttcaaatggcgcactatcgatataggaacctaagtttgcttgtctttttaccggtaatcctgaacttgagtgccttgtgttcctgctcggacgaccactaccatgttcatcattaacctctccatttcaacctgttcacgatcctgcttaaccaatccaaaccatccacacaaattgaaactcctacaacaaagttctcctgatgatttcggcactgaagaataattagcttttgtggccggcagtgctgcctaggaattcagggaaatgtctctctcctccacgctgcattgtcgtgtggatcttggatcgttgggagagattagccggccatacactagtacagtagtacaatgttaattacattggctaatcaaaattacagggagagattagcagtgtaccagtactgcacaacgttaattgcattggctaagtataaaaattagtagggaatcagcggaatggtggtgtgaaaaggtgcatgatgcgagagcaaatcaaggtttagttttcttccctttgaggctttcactcctctcgttataaaagcagttctctgtcgcagcggcgcgggaggaggtggcagagaaggaaggaagccaaacggcatgggctctcgtggcgccgccgccgaccatctccacggcgtcctcgaactgacggtgtacgaggccgacgacctccacaacgccatccatggccggatcatcaaggtacgattaccgtaacactcacgctcacaagtcattctagattcttttgttttttggtttccttctcctcgatcgtggcctagtggtgttcgcttgcttggctctcatggtttcttcttgcttatgagctaatggattggccgtcaaggatgcccttctctttttcagctagagatcacctactgccactaacagtctggtccatctgtttgtcccgaccgaaatgttctctcaagctgaattgctgatgcagttatgctgcacaagtgcacagtttttaaatataaatccttttgagtccgttgaaatctactgatattctagtggcagttcgaacagtgagcaaaccggaaaagtttggtggtgtttgaatctcctgataataaagatgaaaataaagattaagtgtttcacgtaaaacgaggcggtaataacgtgtgattaattaagttttaattattataaacttgaaaaatagattaatctgacacttcctccatctacttttgatagtcatatttcatcttggcacatagaacaaggataagtaattctacttatcatccatttaaatatactactagtcattcctcgtaaacaagcgattcattaatatttatatttctcgatgcctatgtagccaatcttgtgtggaggaattgagagtcacgcattaaatctgaaaaagttattaagatgataggttgttggattgaaatatgcatatcaaaaataaattttccagatttggaaatatgactatccaaagtagatggagggaacaactttcatatggaaaatttctgtacgaaatgcactgtttagcagtttaaaagcatgccacgagtatccaaaatttcatccaagagttatgtgaatagtttttgtgcgtgatggtcaagtaattaatggtggtgccacgtggttcgccggcgaacaggcggcggagagcttgaaggagtcactgggcgtgcaccgtctggcacacaggatctacgtcgacgtcgatgtcggcgcggcgagggtggcgcgcacccgcgaggtggagttccacccgaccaaccccgtctggaaccagtcgttccgcctccactgcgcctacccggcggcgcccgtggcgttcaccgtcaagagccagcacctcgtcggcgccggcgtcctcggcgccgcgcgcgtgccagccgcgcgcgtcgccacgggtgagcccgtggagggctggctcgacctccgcggcggtgagcatggccacgcgacgcacaccccgaagctccgcgtccggctgcggttcttgggcgtggagtccgacccgtggtgggacgccggcgttcgcctccccgggttcgccggcgtcacgccggcgttcttcccggagaggagcggctgccgcgtgacgctgtaccagaactcgcacctgtccggcgggttcgacccgggcgtccgcctcgccggcgggggggcgtaccggccggcgcgcctgtgggaggacatgtacgtcgccatccgcgacgcgcggcggttcgtgtacgtcgccgggtggtcggtgaacgcggatatcacgctggtgcgcgacgcgtcccggatggtccccggcgccgagggcgtcacgctgggcgagctgctgcggcggaaggccgacgagggggtggccgtgctggtgatgccgtggcaggacaagacgtccgtctccttcctcggcaacgggggcctcatgaggacacacgacgaggagacgcggcgcttcttcgagggcaccaacgtgcgctgcttcctctgcccgcgcaacgccgacgcgtcgctcaccatggtgcagagcatcgaggtcgcagcggagttcacgcaccaccagaagacggtcaccctcgacgccgccgccgcctcgccgggcgacgcggacggcagccgtcgccatatcgtcagcttcatcggcgggatagacctctgcgacggccggtacgacgacgagaaccacacgctgttccgggacctcgacaccacgtaccgccatgacttcatgcagaacaacttcaagcacgccggcctgcggcgcggcgggccgcgggagccgtggcacgacgtccactgcaggctcgagggccgcgcggcgtgggacgtgctcgccaacttcgagcagcggtggaggaagcaggcgccgccggagatggccggctgtctgctcgaccttagccaggcggagctccctgaccccggcagcttcggcgacgacgagccgtggaacgtgcaggtgttccggtccatcgacgacgcgtcggtcgtcgggttccccgccgagccggtggcggcggcggcgatgggcctgacgaacggcaaggacgtcacgatcgaccggagcatacaggccggctacgtcgaggccatccgccgggcgcggcggttcatctacgtcgagaaccagtacttcctcggcggctgcgcgtcgtgggccgaggaccgcgacgccggctgcctcaacctggtgcccgtcgagatcgcgctcaaggtcgccgccaagatccggcggggcgagcggttcgcggcgtacgtcgtgacgccgatgtggccggagggcgagccggccggcgactccgtccaggccatcctccggtggaaccggctcaccgtggagatgatgtacggcatcgtcacgaaggccatcgacgacgccgggctgcgcggccaggcgcacccctgcgactacctcaacttcttctgcctcgggaaccgggaggcgccgcgccccggcgagtactcgccgccggagacgccggacgttgacacggactactggcgcgcgcaggtgaaccgccggttccccatctacgtgcacgccaagctcatgatcggtaagccaagctctcttcaacctctgccacgggagctctcacctctgcggccgcctcaccaccgtcttcttctccgcagtggacgacgagtacgtcatggtcggctcggcgaacctcaacgagcggtcgctggccggcaaccgggacagcgagatcgcgcaggggagctaccagccggcgcacctgaacggcggcccgagcggccgcgcgcgcgggctcgtgcacgcgttccggatgtcgctgtggcacgagcacctcatgggccacgccggcggcggcggcggcgtgttcctggagccggagagcgcggagtgcgtgcgcgcggtgcggcgagcggcggaggcgacgtgggacgcgtacacgcgggacacgatggaggacctgctggggcacctgctgccgttcccgatcaccgtgtccgagttcggcgaggtggccgacctgacggccgacgggtgcttcccggacacgacggcgccggtgaaggggaggaggtcgttgaagcttcccgccattctgaccacgtgacgccctgagcttaccgtgccgtgccgcatgtacaaaactttgacgcaacgatcgtctcttcacgaagccgaacaagtgtacatgttggattggatgttgccgagtttatattgagtgaatccaagatacgtcactcgtgatagccactgagtgacaccaaaaaataatctagtttttctttgagtaaattgtagtggtggtacacaaacttattaggtgggtgcaatttaatatacaaacttataaaatgtttgtttcagtatacaaatttgtctagttcgtgcagacgaggaccaaaataacttgacaacgttaattttacgaagctgatgttgattagaatgtgacgtgcatacgtatagtgcgacatatataaggcatgtaatatttataaatttggtctctactttatccttcatcatcgaagtggtgaatttcatatatttctaactttgtatcttgcttagttttttttaatctttttctactatcactatatcttattctactttttattgaagaggtgtatgtctaatagcaaccttctcagatatatgtttacgtagtattctaatcagcccctaaataaaaaagattagccatgtagtgtcctttttgccttcctccgcaccagacaagttcatgcaccgaaatgaccattttacatgttcgtgcactagattgcacacacttgacaagttcgtgtaccggcgatgcaatttactccttattgagctgggacatgggaaaaaaaacaaaacctgaatttcacaaaggtttagggtgtgtttagttcacgccaaaatgaagtttggttgaaattggaacgatgtgacggaaaatttagaagtttattcgtgtaggaaagttttgatgtgatgaaaaagttaaaagtttgaagaaaaagtttggagctaaactcgccttagctgatctttgtgagaaatccagcaatattcgtgcgaaatctgaactccgactctgtgcaagtgtgagcgtataatgtggccttgtttggatttcagcccgttaaataagaacaccaagggccgggctcctcgaagttttgggcctcaacacgaacccgtttcagtccttcctactagtatttttcatctttctctctcctttcttctagcgggaaacccaaaatcggcatcacccacgcgaaaagtcgaaatcccccatttcgccctccgctccggccgctgaagcctccgacgggagccccgccgccgccgctgcttcccggcggcgcctcctcctcccaggacagcggaggcggaccggacggcgatggagcggatccacgtcgccgtgcgggcgcggccgctcacggcggaggacgctggaagcagcccgtggcgggtctccggcaacgccatcgcgctctccacccagccctccatccgcttcgagttcggtaaggaactcgcacccttccgccccgttgctctgctgccagcttcgattccttttggcttgagggttcgtttctcgcagataggatattcggcgaggagtgccgcaccgccgacgtctacggggcccgcaccaagcacatcgtcgactccgcagtaagaggtttcaacggtaataatctgtggtacctctgcatcctattgctgatagcggcgttttctaggggaagctagttaggtcgtgccttttagttatttgagtttttttttgtgtgtgttttagattagttgttttgggcttttggctaactataggcacagtggcttcttttctcaaccaagctatacatgcattaaaagctaaccatatgttttcacgcataacaggcacagtttttgcatatggacaaactaacagtgggaagacttatacaatgagagggtctggtaatgaacctgggataatacctcttgcagttcatgatctattcaggactatcgaagaggtaaattctagaaattcgtataatttaacagcatgcgaactatatatcatgaagtatctttcaaggtgaatctataaacatatacgttatgatgttgaactatgtaaatttgtagaaattgattttcaaagatataaatgtttggtttagcacaaaactagaatggaatgtaatttgaaactgagggagtagctgtcatatcctttgtttgcatgatggtaacaacaggagatatttatttatatattgatgtgtttggttgtgatcttctagcactttggttgctttctaaactgatcctgatgttgttttcataaagaccaaaacaatgctgatgtaacctttcctaaagaccaaaaagacttgctaagtttatatacagaggctttataaaatacccttatcccattatgtcttcgatatgggatctccttcatatgttctactcttaacctgggagtttatttttaacttaaacttttttcactattttttttagcatttggacagagaatttcttctccgcatgtcttatatggaaatttataatgaggaaataaatgatcttcttgtcccggaacatcggaaattgcagattcatgaaagcatcgaggtaaacaatccacatattataatgaaattcataagttttccattctttaataacatggcaatgctgttcttctgaagaggggcatatatgttgctggcttaagagaggaaattgttacctgtcctgaacaagtactggagtttatgtcatttggagaatgtgagctttttttatttgcttgcttgcactgcctattcatgatttatgatttttaataattatgagcaaaactgcagctcaccgtcatattggggaaacaaacatgaatgtgtacagcagtcgttctcataccatatttcgcatggtatgcttactctccactgtattatctgttgtcttacaaaacaacatcataccttgaattctcacatcactaattactcaggtaatcgagagtcgagaaaaggttgatgaaagtgaagcgggagagtcgtgtgatgctgttcgagtatctgttctggtagataactgtccaatgttaaaaaacaaaaaactaaccagcgtgtcttgtatgagatgtagtacttatttaactataggcttttgagtttttgcacactgtaatttatgctcatttgaactttcagaatctggtagatttagctggttcagaacgtgctgcaaagactggtgctgaaggtgtgagacttaaggagggctctcacattaacaaaagtcttatgacccttggtacagtcatcaagaaactaagcgaaggcatagaaggtcaggggtaagttattaacttgttaactagtggttttagttgctttgggttgtttgtggttcatctgattactaatggaatttgttatcagggggcatgttccttaccgagatagtaagttgacaaggattttgcaacctgctctgggtggaaatgccaatacagccattatatgtaatataactcttgcacaggtaccagctctcttctatccatcatgttcctgtattgttggacaatggaagtagacataaattcttctagttttctctccctcataatgaaagaagattggtggattagtttaaaaatgttgctagattgttgtgcttggtattatctattcaggttactgcttgattgatattctcaagtaatgtgtacaatatgtaaactatgcttaagcaatgtatttagtagcataatttggacaactgaagtaattttttaggtatcattgaatattatagtcttaaatccaaacattcctatttgatttaccttttagcatatgtcctcgctgtttactttattttgtgttacaggtccatgcagatgagaccaaaagcagcttacaatttgccagtagagcattacgtgttacaaattgtgcatgtgttaacgaggtattgaaatatctgttaatgccaatcattttactctttctgtgcaaagagcaaaatatataaatttgaaacgcatctttctgtaaagattttaacagatgctgcattattaaaacgccaaaggaaagaaattgaagaacttcgagcgaaactaagggtatgtattgaaaaagctctgtttaagttagtacagcttgatcatgcaaaacttatactttgtgtgatcatagaactcgcaaagtgaacattgggaggaagaaattctgaatttgcgaaacacgctactgcaggttcctttcttatttcttaagcatctctggtctctgttacttgctatgtagcgccttaaataatctgactattttgtctagagtgaactggaaaaggagagaatttctttggagctggaggaggaaaagaaagccaaagaacagcgtgataagaggttgattgagcaagcaaagaaaattgaaaaccttagttcattggtattaaattcagaaagggatgatagaactactgtttctagtaaggtaggaatgcagtttatttatcttaccagcacttgccataaaatgcacttgaacctcatgtttttttctttcttattggtgctttatttccatttagcttattgctctaccctcctttctactaaaaaatgtgaatattttttagacatttttagcaagagggcaacaatttttagacaaataaccataagaagtaatgaaagtatacctcagttacacaggggaacataatagtcttatggctttgtacttgtgctcttcaaacagaacaaaagacggttgacatggtgtcctggactactctctagacaatttgatggtcaggtatgatttatcagtgatgcttgctcacacctttgatcaacatgctgaaaatataaagtctcattgtttgtttcggataaacatggcattgttggtttgttgctcatattatttccaaattgctgtttaagatatcctcccaaaatgttcatttagattgctttgttgtgaatgatttacctttttttactacaatttctcttttgcgtgatggggtagattacatgatttcaacttttgggtactgtctattgatgcatgccatgcttttgtaaatgctcgctattaaatccttttcatgtttaatccattgcacgagtttgtcaaattacatagaacgccagatcttgttaagaatgacatatctacaaatgtccaggttttagagtctgtgcaagaagaccctccgagcagcacagttaggcatggacgtaatatggagatgccactgcattttgaagagctaatacaagaaagctgtgaaagcagtattaaacattatactgatgcttactcatctggtagtttatcctgtgaagatgattctcttccagattcacatgctttgctacatgttaccagccgaagaaagccaaatacgatggtgactgactctctatcttaattttattaatgtcaacgcatcattattgaattttatatttcttaataaaatagttatcatttttcattggtcacatttctactgactgttgaaacacgtggccttgccagaaaaaatcagatcaagaacagcttatggggttggcgagtgaacgaattattccccaagaacttaatgactggaaatacaccacacaaagtcaggaaaacatcaaagcttgtgttaatggtttatctgctcgagaatcagaagcaattcttgtcattaagcaacttgaagatcaggtgcctaattattcccctattattatcctatcacacaatgacttttccccctaccattgccctattatgcaatgacttttcatccccactattgtgctattatgcaatgactttgccataacatttccttaaaatccaaagcagataaagttgctggagttagagaagagttcttttcaaaataacttggatgatgttcttgaattagcaactcagcagaaagcttctttccatgagaagtacgaagaggtgaataatcttatcctgtttgttaaaagttcaaacatgtccagtgttgtgtatattcttgtaaatcctaaattgtgtatattctttgcttgtttacagcttcagcagaatgctctggttgcacaagaacaagctaaaattgctaatgaaaagctttccaaacaagtactttcttattctcttccagttatagcaattctcctttcctcacaaatggcatattttggacacttaatctgttttctattttgatttcatagtcgattaattaacatgaatgattcttggataaaacatttgtatgaatcccaggaagcagcatatgaattccttactggtatatttgtggagactgaaagcatagctgtgcaaatggatcaatcaacacgctcagttgacaatgctctttctttcattgaagagctcttccagaatctcttcatgatggccaaaaacttcactgtatgacagtatctccatagtctatttcccaatttcttgataatcatgccatttgttgaattagctgtctatttaaagtttaccatcgacaattaccaaccattttgctccattatatatattgacctatgctatggaccggatatgggaagggtgcgaatatcgtcgattggacactaacccttgcaccagcagggcttctccatgctgacctaaaagaggttgagaagcttaaactaactttagagcttcattgatagattgataatagagtacatcgggtacctttatatatagggaggactaacttgatatataaggaactaatatctaataagctaaaagaggttgtgaggcttagactaactttagagattcattgattgattgataatagagtacatcgggtacctttatatatagggaggactaacttgatatataaggaactaatatctaattttgtagaaaccaatctactgtctgtaatgtactaataaatcttgtctccttaccaactagataatctcctaatttattatgcctaaactgttgcattcccataaaacctatcaacccacctgaaaatgctctttgacatcaaatgcaggataaaatcttaagaagttttggctttgttctaagtttgatttaggacaaaacaaaaatatcttgtattttgaaacagagacaagtatttagtactcaaagaaattttcgtgtgtgtagtaccatcaacatttttgggtaatgagccagctacattgctataaattgttatcaacatgtcattttttaaacttccaatatgcaaa

SEQ ID NO: 7169 - DNA, 2118 bp, Oryza sativa
ctctcccggctgacgcaataaatgagtttttaaattaaaatttaaatgaagaaattcgtaaatatccatttaaagagcatataaacttcaaatggccataacttggccatttgaactcggaattggaccgttcaagtctctaatttttccttaagaagtcaagacccattttgtgtgctttgtcctgcgtgttatatggagtttattagagtaaaagccttttcttttccgttggtcgtgtagacgctgcagcttcggaagatccgctcttcgtggaagtagaagccgacgtttgggaaagcgagcaaggcaagtcacatcatccttgaacatattggatcccagtttgtaaaattatgttgatttaaattattgcattatcgctttatttaaattcccgcgttatcactgttttatttagccatgcctatttacctttgttatgaccatattattattgctattgttattattaccttgttcaccctagaataaataaaaccccaactagtgggtactctattcatggttccactagtatgaatttaggtagatgcttcgctgattaattaggcaacattaggtggttttataactttagactttgggaattctcatatcatttggatactatggaatgtttggcttatggtggaattggacatacccctctcttcctctttcaaagcccctaaaacctgttttcggtggggtttgggtgcatgccagttgtgggaagtagcaccccggccactataaggattaagctcgggcctctgttgcaaagcactaccgtacttccacatgtctagtgggtaaggcttagtttgtggctcagtctggttataaacaaaagtacacggattggagatggatgaagtcgggggtcgatggacattctccagggcaaatgaaggctacacgagctgcggcccggtagtcgagatgtcatggcagagggttggtgccctgctgctagggggctcaatcctgcctacctgtcccggaggttccggccgtaggtgggattgggtcggtactcttgtctatggctaggatgggttggaaactatgtcacgtcttccgtctgtataccgtggtggtatgtggcacgtggttgcacgtgaggaagatgtgtcttgtgggtaaagatgtacacctctgatcagagtataatctattcgaatagccgcgccctcggttatgggcaagccgagcaatgtacccaggttagtgttttaattcttaaaatttgctcaacaactaaaatgtggaatggttggcctgggttggcttgggacgagctgggacccagggtcgggttgccagttcggtctgaatcatcgtaggccttgggttaaggcaggttcgtgagggttcacggccttgattaataattttgtgtagctctagggtcgtctttataaaatggctttgggcaactaagtgacttttaaatgctgttttctgcaaaacttaacccctatattattaccccttgtacccccttgcattaatcatgcatctgccggtgtggcttgctgagtactgtggttgtactcattcttgctctatctttctcccccccttcagtaagagaagctttggagaagaagtcttaggtggagtcttggcttataccccagttgagcgcctgtgaagatggagccgtaggcccgctagtccgctgctgttaatttttgattgtcaggcttgaagcgcctttgtaataatgtaaatattatcgatgtaataaagatgtgtcttttatatcatgttggttgggtgtacccctgcttttcctgggacggggattaatacattagcgttcgggaaaatgcaattttctcggtcgcgacagccggcgatgataggtggatttggtaattggtttgtccgattctgataggtgcacctgacatggcatttccacgattaaataatatatcattctggttgttgccaccaagtctcttgctcctattaagctcagccatagtagaagtgggcagcggcactgggtggacggtctatccgccttaagtggtattaccagccattctggaggagcagttgatttagcaatttttagtcttcatctatctgatagactactgt

SEQ ID NO: 7170 - DNA, 20581 bp, Oryza sativa
gccccctcccctccttccccttgcagattcgggggaggtggcacgagtcggccggtgccacacggctctcctctcctcccttgcagatccggcggagggtaaggggaccggcatgcgtcggcaaccggtgaccggatctatctctccccctcctctctttgttacatgtgttttttgtgtgtgatttgttcatgtgagatgtgttcatgtgatgtgttcttgttgatgtgtgatgtcttctcttgatgtgttctgcggcgggcgaccgcgagggcgacggcggtgatgggcgaccgcgagggtgacggcggcgggcctcggctaggcggcggcagattagggttagggttagggtttcttttttcatttttttgtttctttttttgttaatcggttttcccagacgattgggtgcatgcgggccgcccacccacaggcgaaaattggctagcccgcacggaaaaattggtgctgtagtagtgtgtgcatggtcctctacctcgacaaggtggactggccccgcacggcaaggtccaatgatcagggaggcaaaatagacttatttcagccaataagcatggcccaaagaaatgagggacacgtaatagactttttccagccatgcaagctaaatagatttattctaaggaggagcacggtgggtttttgtgcctaggccgctaatgcagcccgtgggcaggcactacccggcccagtaggttgcgccgtgccagcccgactattctcaggctcaggcctggtcatgcccaagccaggccaggccgaccggcccatttggccatctatatacacatcctcaaactcatgtcctgctatgctgccctcgagtctgcgctaggacaaagtcatggatgccataattgttgaaatgcacgcagctaagttgtaatgctctactttatttcttttacatcaatcgttcttatctttaactggttagattggcaaattttgagccttttggagagtttagttttcctagctgttagacgatcggtactcctagcggctcacccacaaggccactagacacgctccacatctaacttccgttgtcatagccttagctcctctagcgaggaggagtggcaccccttttttgggattcggccaggcagcgggtgcacggaaacaaggtgataatcgtgcagagtatagggataggctgtttagacaggttcaggccgcttcaatgttcttgctctatatgatgaagcttacaattagttcttagtgttgatataagtagtagaggatgaacccttcagtgttatgaggctagaatctaacttagctcctctcttttttaagtggcctttggtctttcctttatagttgcaaggggatatcacaatgatcggtttcttacaaatgggcctcaacataggggttaggtatatgttggtcgtggttcttcttggtgagtgggcctggtcgtcaagcctagatggaacggagaccttgccgacccgccgcgtgtcctgagcatgctagcaaagcttagagtagaagcctgaaacacggttgacgcccgtgggcccgcctatcagccacggataagagaaactgcgagatggttgtggctccagtctcgcggcatggcagtcaatcatactgcctgacagtccacccttatccacacaagggtggtgaaagcctatcgcgaggctggtgtgcattgtcttgtcacgtgtcgttctggtggcgtgccgacactagtggagaaaccgtttgtagtcccggttggtaacccctttagtcccggttgtccaaccgggactacgaatccgggactaaagatagctatctttagtcccgagtgaaataaccgggactaaagatcgatctttagtcccggttcgtgttaccaaccaggactaaagatcggtcagccacgtggccggccaaaccatctttagtcccggtttgtgttaccaaccgggactaaagatcggtgcaccatttttttttatttacatggccctgtttgctgcatggttgattatatatatacatgtatgtatatgtatatatacatgtatgtatatgtatatgtatatatacatgtatgtatatatataggtatatatacatgtatgtatatatatatatgtatatatacatgtatgtatatatatatatgtatatatacatgtatgtatatatatgtatatgtacatgtatgtatatatatgtaccacctaccttggaggcacgctaccttctccaaggcggtgcacccatctcttcgagaaagaagaacaagaaaaacaagagtagtatttctccccgaagggaacaagataggtgccatcaaacaacgaggggtttcacggtcgtgagctctattccaattcaacagattggtgaaacaacctaatatatcatggagagtttgatctgaaagtaccaactgttccaaagcattcattttgcgcattcaaagcattcaattccgagctttctcgcgctggacaaagacactcgcccaggctttatacctatatttgccctcctcagacagaagagtgaaggttcatgtggtttttagaagaccctacctacggtgtagacctcaaactcaagcccagtagatagacctcacgaaggattttgctgcgagaacgccttacccaagcgccagtgtccggttcctcgaaagaagcaagaaatctttcatacgcctattcaagagataccatccttgacgtgttgttgggtgatacgtataaccgggtacgacttacaacgtttggataccagattcagagacatttcattactgttctgaatatacaaggcaatgtttcaagactgacattcaatgggaaagaccaacatagttaagttggtaataggtcataggtaaccaaatacatagatagtacttctatatcgttcgtgcagaaaaaagagtatccttagggtactaattagataaaatatattatcccccatacttttagtagaaggttgcatttcatatccggtgagacaagaaaaggccttcggtactattatagtatagaagttcggtacccttttaataccatgctatttcaatacctgactatttaaatagctgacttttaggcttgcactatcgatcaaatgacggacgactataaaaatagaatcagaggattgcttacccttcttactttctatcggttctatctgatcttgtctttcctacgagtatacatgcagctggcttttttggtaatctgacctttccttccttcccgctagcaacaagcaaccgatttcactcacaactcttattgcagggatctcctacactactggcacttggtagcaaggcgctacgcgtacgaaaaccacccactatcagaagatggatatatagcggtactagggcggagccccctccttagattcccaatcggcatcattgatgaatcacctatccaacatccttaaacaaagattgccccccccccccgaattgggggaagccgtaggtattattgcggttcaatctattgaagagcctagcactcaactaacattaagaacttatcatacaggcggtggattcacagggggtactgctgaccttgtacgacccccccttcgaattgataaatccaattcaatgaggattggttctcccgttatgggtagcctgctttttttatgttatatagagtagtatgtaactacttagagtcaggttattttacatagcgggcagagagcctcataaaaagcttgattctagtgatcaatatcaggaatccaaattccagagattcgtgcgggaacgtccactttgcattttaaagaaagggggctatggatggcaagagaagccctcatacccactcttctctcccctccccatacccatcaactactaggttgtggagagggcctcggtatcacttcactatatacctacacctacaaaatcacgaaagagatttgctttttttcggcttgcggcccccttagaagagttcttcgagttccctatacaaaggagctccattcctcccgggattttccagaaagtaccgctccttcttgagttgaactaccccctcggcactgggagctcctgataatccttttttggaaaggaacacgtccaccgtactggctattttcgtttcgtgtataacgtatctatcggcacggcgtcggccttcataaagcaaccgaattaaatcctcctttattttgaattctgtttcaaaataagaaagaatcatttcttgttcctgcagattgcgttcaacaatgcccctagaagacgcgtaaagagaacttgtgagatttgaatagaatgattcattctggaaaaaaaggactctctattctgtcattgtacaggcgcctatgactcatttctgaaatgccattaacgaaatgatttcgctttttgaggatccttgtttatgcactccggaatagaagaaagggctgcaccgacccccgcagagttactcggggccggcggcggagtagtacctgactgggtcgagcaggcgccctcctcagggctgagtggcacaagaatcaaatcgtccaagctgcgaagggttggtggtccctgtagctccaagggctccatcggagcttttctcttgcctttagaaagctcctctttcggggactccacactccccccacttggtgctcttctccaaacggcatggcttcctctgagtaaagaatgaaaaaaagagtaaaggtggttatgagcattccaagaataaatccaataagtttggcacgttcataactaccttttggggaagaagaggttgaggactaggctctcccccctgccttcatctgccactttgtggcatgtcttgttctcggtttttcgacccgaacaaccgctgggattcttggccgttccagaatccctgttttcgtgatcgaatgacgaaaaataaaaaggtctatctaattaatctccttcgcagtttgttttaaagaagcatcaggttcaatctttctttcgttagttaatccccctttttcgttgaaggattttagtaattctggattaatagtacttagaatggctttttcatattgagaaattctgtctagtggcattcgatcacagaagccgttgacagcagcataaatcacaacaatttgtttttcaattggaagtggttcatattgtggttgtttgggcacttctgtaagccttgcacctctattgagtaatgcctgagtcgtagcatcaaggtctgacccaaatttagcgaaggcggccacttcgcgatattgtgccaattccagttttgaactaccgcagacttgtttcatagctttcaactgagcggcagacccgacgcgactgacggataagccaacgttaatagcaggtctaattccgcgataaaagagctctgtttccaaacagatttgtccatctgtaatggagatcacattggtggggatataggccgatacgcctccagcttgtgtttcaatcacgggtaacgcagtcaagctacctgcacctgtctggtccgatcgtttagcggctctttctaagagacgggaatgtaaatagaaaacatcccctgggaaagcctcacggcctggtggtcggcgtaacaataatgacatttgtcgatatgccaccgcctgtttacttagatcatcatatataattaatgcgtgcattccattatcgcggaaatattcccccatggcacaccctgaatatggggccagaaattgcagaggagcaggatccgaagcggtggctgctacaagaatggaatattccaaagcattcgcttctgaaagaatttgaactaattgtgccacagtcgagcgtttttgtccaatcgcaacatagacacaatacaatgtctcactctcatttgtgccccttgagttcatttgcttttggtttaatatagtatcaatagctattgctgtttttccagtttgtctgtccccgattataagttctcgttgaccacggtctataggaaccaggctatccactgcttttaagcctgtttgcatgggttcgtgcacagatttacgttcaataatccctggggctttcacttcgacacgtcttcgttcgtgatcgcttagagccccttttccatcaataggtattcccaaggcgtcgaccacacggcctaacatggcctttcctgcaggaacatccacaatagatccagtgcgcttgacaagatctccttctttaatagcggtatcactaccaaagacaacaatacctacattctcattctcaagattcaaggctattcctttcacaccgctggcaaattccaccatttctccagcttgaatctcgttcaatccataaacacgtgcaatcccatctccaactgagaccactcgaccgatttcatccacttgaaaattcgtgtaaaagttggtcattctactttctaatagagtcgtgagttccgcagctctgggtgagaattccatactttaacaaagacgatggatgagagaagggagaaatccgcttttcaaaaagccttagactgaacaccacacaatcactcactccactagatcataaatgccattatcgaatggggcagacactcccatgagctatttcaaccacttactaacacagggacaccaccattttaaagctgaactatgatcttctttcgtgcacatctcgctttttttttcatttatgcgaatgaattgcagaaccaaactaaaatgggttgatcggagctattctctagaatttcaaacttgagatgacttgcttgaaggaaatgcttacactgaagcctattaccctttctggcttatagggattagggagaagagaaccaattccagtgcctaggactcacattttcattttcctagtatggattcgtattacttaactagttagttatcttactagtctataaaacatgaacttcttattctaaagtaatttatccaaatatttattaatattcaagatgaaaggaaaggcacgccaacaactacaactagccagcaccctattgactcgcttgtggaaggacttataggacgaataaaagcaactagctcgtttggacccccagcaacttcaaatgaaactggatagctggcaactggcactgcaattagatggctgagaactctttctacaatagaagggaaggccttggtaatataacgagattgctaacttgcctaagatatctacttacttaaaggactacagttagctttacgggaaatcaacactttgttgaaggtggaatgtgaatacagggacagagactatccatattaccccctgccttacccttaagggctaagaactgaataggctgactctagattctaactgaaaatactcaaaattggactctgcaggctttcaagcagattgatacctactttacttgccaaaaatatttgatgagtaaaagctttcaaactcagttgcagtagagaccttcctaagggcgaagaaatgagagagcagctttgagcgaaatgcggggattagtggaaggcgggatgaaactgtttcttaatttccaacactctgatttgagcagaaactctatggagtgtgttcattgatataccaatacctcttcatttcttgatttaccagattggtcttatgagtggagcaagaaaacggatgcgcgtgctaacgctttcgcgctagtgcgctcaatccggtgcttgttggttagttggaacaactagtaggaaagctacttctacttggacagctcagcagccctatattcccttgttccagcaagcaaacaaatagaatagttggaacgaatagacaagtaggacagtgctaccagctagttaactcagttcattcttgactttcggcttgtagctttgctacacaacctcgcattcgaaattagtacttacttggacagcaggtaaagcagggacagtagtatatggtagtcagctttgaattgttctctgtgtagaatgcctattggtttttcacgaaacagtactatatgtggacagtacataggtatcaagaaagagggctagctctgtttgaatagttaccagccaagaaaagactactcaaaaatctgctacttcgtttccaagcatacttatttctttctcactcactacttttttctattttcttttgtctatcgaaacagcctaggattcaatttgatttatcctagtggtgacagcttatgcttcatttccttcgaattcttctttcgatatgagcgagcttacccaaaacctatcacttataccagtgcagatcttatttatgtgcatccctcgctgtgactactattcttgtctacaaacctaaggtggataaacctctatggtgcatatctgtttcgcctaacttgtcttagtcattcccacattgaatcgaaactctcaatgcccattgactcatcatatctcgactgagcggaaccaatccaataggataatcaatatgttctgctattccttatatacctcagcttgttcgattgagccgataccgagcccttatcttttcagaagatgtgcaaccacccttgcttttggtttattttcagtcaaccaatagtagatataggaggaggtggtattagagaacaattagttgatttgcaataccctttgctttcatttcacttcgagggaagaccttactttcattcagcattcgcttaaggataggaatagtcatatctcgctcgtagtcatatcagcctctatcgtaggagtggtattgaaggaaaaccgtaccgggccaaatagattggtttttaaaataggggttcaaatcattccgcaaatccagaaactgaaatggggtattgctgccaataaggataccactcttactagcaaggtgaaagacacatcaacccgcatacccttttaccacacctaccccttgttgggcacgtttacgcatctcttgacccatccacatgacccgcttggctaactaaaagaagcttctcggagcatctatgcatatgagaacggatgccgagtaaagggtggccagcttcgacctttgctttgaacaggggttagcattatcaaaaaccattgctcataaaagggatctctttcctaaaaggcatatctcgtacgctagggaatgtgcttcggcttcagcctagctacttttttgattggtgactaaactactaaaagaaaactttagctatcaattcttttctctatgttcagaaatcattaacggatgcagaactggatactctgcttaaagcaataagcctcccttggatagatcgaagaaagaagcactgtgcgttaccaggtgtagtggagaaagcaagggcaaaggtttcatcagaaagagatgctcgagcgataccaggatcacgatacgattaatctgatggcgcagcacgaacaggaaatagataacctagccctgggaaggaaagggaacagtttagtccctccgatccgtcaatcaacgatagggttacccagaattctaattaataggaaggttggactacctcgaatggcaacatgctcgctgattcctaccactcctatctacataactgctccagagaagggaaggcagatgtcagtgaaacgggtaataatacaccctcgactactgggtgagtgagaaaagacaacatcctcctccggttacactccctgtggtgctttcagtgggggattcgttatggaaagcgggaaactcaagtaagtactgcttttcgatagctaattcgagttgggatgaccacctggaaccaaaacaaactctataacttgtttaaaacaagctagaacagcatcaattgaattcaaggtataagcacactgataagaaatacatggggccttatgccccgctatgcactctaccacttcaattcaatgattgacttcaccgataccagacctcacttgagagagatctatcactggcatgtggtaaaccatactagtgaatgagccatatcgagctgtggtcttactctagaactcaagttcgatgagctcttagcggagttgtgcctactatctactaagtgtgtgctagggaaagaaagcagagcagttctcactctgtccggtgaccaagaaagaaagcttcaagaataccgtaaacagatcagagaaacctcataccgaatcgccacgtgaaagcggggttaaggtaaggcaggaaagactgacgccgaaagatatgttttgaagagagctccatcgggttgaagccgaattgcagagaatcaagatcttctacctttgtttgttccatcaatgcccttcggactggcctaagagttgggtccctgtctgtaattatgtggctaggtaacccatttatggcttgtggtctttctgcttatgacgtagcactattccatcttgtaaataacgccttctttaaggcgctactatttctagcggcataggtgctttatcacaatacgaaacatgtacatacgaggactacgattcctatttagagatattcctacgagcgatagacgtagtaaagaaattacgtacgccaataataataatatgactacgatttatcgcaatacgaattagcgttgattgctcctctccctctggactaggccgatccaactcaattagaagatcggggaatcgaatcctattctcggaacttcccgcatccctagtattgtcctcggctaatgcaaagaaaagataagggcacggtttcggctaagccaattgatctgctccttaacggatttgatagttgtagctggtactaagccctcctgagttcgcaatctaattataattaataatagtttcggttccggaaatcctatcgttatcttcggcttcaaagcaaagggagggatatcagtagcagtgaatatgtcttgtttcggatccgtgaatccaaagcttccgggtatatgaggccgcctatacggttcctaatctaactgcagcgtaccatgatggcaagctaaattcaatcaaaggaatctcacctaatgctagctccggcaatcctgggacgagtccatacgctagagtagagaaaagacgagcgctatccctttttttctaaaatcccaatcctagggtcaaacctatccttggtttaggcaatgccaacctttcctttcgaacaacggtacttactgcccgtaaaacagatcggcacctatcctcggtctcggctatctttacggcataccccgaagacgaatcagaattatcgactttaacagatcgatgttttgtcgttcaatcaaaagcatgattcaattaatagctcggctttcgagtcctatcctactcggcttctccccatttttcagacattttcctatcagtctcaccgtcaagatcgcagttcacaaagcacaccaactatatgtgaccccttgtcacgcccagaaattcccgaatagaattccaagcagaatgtgcattaaaatccccgtccaggaccagccggggtacacaaacgacaatgttgacatacagatccacgtcttacaaacatcataaagtcttacataaatgcagcggaagaaaagaaagacaacaggagctaagccttgactaaactttgactaaactgcagtgggaacaccactccacaggcatcctcgacggcacggacgaagcctactcctcagagaaaccttcatctgacccgaactcgaactctggggttgggaaaagtagagcaagactgagtactacccactgtactcagcaagtcataccggaatagggatatgatgcagggaaatcatcaaagaagagctgaagtggttcatttgcataaagcgagcatttataaatagagattgaaagatttaaacagttgtaataattaattaatattaactatccactgtccaacgctaacccacgttgcgacaggcccaaccatccacctaaactatccaaattaaaggattacactaaggtgaaactaatcacggtgaatctggttgaccgcccataaccgcgggcacggctattcgaatagttttactctgatcagaggtgtacaactgtacccacaagacacagccccacgacacgtttccgtgcgccgacatgtcaccacgacataccggaaagaggccgtgacaggaccattcgcatagccccctctaaccaagcacaccacacctcaggtttcacccccactcctcgcaaggcagcgggcagtcccctctcgtgcctaggtgaatccggaagccgcataggccatcgcaggacccatccaaactccatcacgcccacccttgcctggatgcgtcggctagaggaaagctacactacaagcccagccgttgcccacgctggcttgtggtaagtacgataagttcttccagggcatcccgcgaaccggtccttaactgccatgggtgcgaccagcaaaaccatgcacccacagcccaccatgtgattcattttaattaaccaacaccagagcggtggtactaatccaacattatcataagaaccaacagtctaaacattaatatgattttccccatggtgaactagttgaactaagcatggctaagcaattcctagtccaaactctaatcatgctataaccgggaccacgcgggtgatccaccgccggtccacgggatcgacggcccggatcggcccggggccgatcggacggtgcggcggcggccaggctaggctcggctcggcacaaagccggccgagcggtcacggtgacggcgcgcgcacgcgcacgcgcgttgccgacgacggcaaacgccggcggagacggcggcgcaaggcgccgaagggcggtgatgctaaagcgacgactaacgggcggcggcgctaaagcggcggctaggagggagagggaggggaaaaaaaaagggagggggtgcctcaccgagggtggccggcgcggaggaagacgatggcgaacggcgacggcaagccacgggaggacgacgtcggcgggcggacgagcttcggggtgccctaaggaaggagaagagagggattagagagagggagatggaccacggcgaccggaaaccatggccgaaggcggcggtggaggtggtgctcacccgaatgcgagggaacgagggctccggcgaagaacctcgacggaggaggggtggacggggtggatctcggccacgcgaacccgacggcggcgacggcgcggcctggcggcgaccctaacggcggctagcggcggccggagtagcggaaaaggcggcggcaaggggttgcacggtgcgggagcgatgggaggctcgagagagtgcggcgaaatggggaaaaagtgagaggggacgacggcgatgcttaaatagggggagagggaaccggacgtggccgagagaggcgggaatcgccggccgacgtggggagtgggggaggagagagaggcgggattcgaaaatcgaatcccggccatctcgggcgcggacgcgagcgggagagggagaggagtgggcgcgggagacgcggcgcacgcgcgggcgtggtcgacgtggcccggaggaggtggagacgagggcgcggcggcggttgcgggcgcgacggcgcgagcgagatcagcgggaggtgggggaaggacccgacaggtgggccccacctgtcggcgaccccgagagaggaggcggcggggcggcctggctgggccttggcctgcggccggcccagcaaggaggaggggaggaaggagggaatgggccggcggcccattcgaaaaaaaaggaggaaaaagagaggaaaaagaaaaagaaaaaggaaaaaggattttccctggaattaaaatattgcttgctcaattttaattggttaaaattatttctagagctctgaaaattccactaaaaatcctgttaatgaatttcgacatgtagaactcaagaaaaattccacatgtcaaatccgattattatttgcattactttcttagggttttctcctgatttcacctgcattttcttagggtcatttataaaaattacaattttggcttgggaggaaaacttcggggtgtgacaaacctaccccccttaaacggaatctcggccccgagattcggaggagctggtgaagaggtgcggatgggcggctttcaactcatcttccctttcccaggttgcttcctcttccgaatgatgactccactgaactcggcaaaaccgggtgaccttgtttctggttctcctttcgctggtatcaagtatacgaaccggcttctccacatatgttaggtcctcctggatatcaatgtgttccgaatcagcctgttcttcaggtacccttaagcacttctttagttgggacacgtggaacacgtcatggatgccgatcatgttggatggaagttctagctgataagcaacttctccccttcgttccaagattttgtatggtcccacgaagcgtggtgccaacttgcctttcgtctgaaaccggtgtactccccggagcggagtgacacgaagatacacgtaatctcctacctcaaaagtgagctcccttcgacggttatccgcgtagctcttctgtcgagactgggcaattctcaacctttccctgatgatcctgactttctcttctgcttccgctaatacctctgttccgaacagttgacgctcgcctgtctgatcccagaagagaggtgtgcggcacttccggccgtataaagcttcaaacggtgccatctgtagactggcctggtagttgttgttgtacgagaattccgcatatggcaagcttttgtcccaagctccaccaaaatcaagagcgcaagctctcaacatatcttccaagatttgattgactcgctcggtctgaccatcagtttgcgggtgataggccgtgctgaaatttaaacgggtccccatttcttcctgcagcttctgccagaattttgaggtgaactgactccctcggtcagatacaatctttttgggtactccatgtaggcacatgattctcgaaaggtaaagctccgccaaccttttgcccgtatatgtggtatgtactggtatgaagtgagcaaccttagtgagtcgatccacgactacccagatcgaatcgtgacccgacgatgtccggggcagtcccgttataaagtaaattccaatctcctcccatttccattccgggatttgaagaggttggagtaaacctgctggtctttggtgctctgccttcactcgttggcaaacatcacagagtgcgacgaattcagctatttctctcctcatgctgacccaccaaaacttttctttgaggtcttgatacattttagtgctgcctggatgaatggagtactgggtctgatgagcctcagtgagtatcagatccttcagttccttgtcgtcaggtacacataatctttctcccaaccagattgtgccgtgttcatcttcgtggaaatcccgggctttcccgactctcatattctttttcagctctgctatttcagaatcatttacttgagctactctgacttgatccacgagcgtaggccgtgcctccagagcggctacgaacccgtgttcaacaattcccacgttgagatgctcaaactcctgccgcaattcctcacacatgccctcgatgcatagggcagtgcagtaacttttccggcttaatgcgtctgccaccacattggctttacccgggtggtagtgaatactcatgtcatagtctttgattagttccaaccatcttcgttgtcggagatttaggtccggttgggtgaagatgtatttcagactcttatggtccgtatatacttcgcagcggttgccaattagatagtgcctccagatcttcaaagcatgaaccactgctgccaattctaggtcatgagttggataattcccttcgtgtggacgcaactgccgtgaggcatacgcaaccactctgccctcttgcattaggacacatccaagtccgtgacgggatgcatcgcaatagacttggaagtctttcatctggtcgggcaaaatcaaaaccggtgcggatactaatttcttcttgagctcctcaaaactcttatcgcactcagctgtccacttaaacttctcatctttcttaagcaactgagtcatgggtcgggcgattctggagaagttttcgatgaatcggcggtaataacctgccagtcctagaaaacttcgaatctgcgacacggtcttcggtgggatccacttggtgactgactctacgtttgacggatcaactgccacaccctgggctgtaatgacatggcccagaaatttgacttccgtcaaccagaagtcacacttgctgaacttggcgtatagctggtgctccttcaacttctcgagtaccagacggagatgttgctcatgttcttcctcggattttgagtagataagtatgtcgtcgatgaataccacaacaaacttgtccagaaattccatgaacactttgttcatcagattcatgaagaatgcaggtgcgttagtaggtccgaaggacataaccgtgcactcatatagcccgtaccgagtggtgaaggccgtcttcggaatatcctcttcccgaattctcaactggtggtagcctgatcgcaggtctatcttagaaaacactttagctcctttcagttgatcaaataaatcgtcgatccgcggcaagggatatttgttcttgattgtgacctcattgagtgcgcgataatcaacgcacatcctcttcgtcttatcctttttctccacaaaaatgaccggagcaccccaaggtgaagtacttggtcgaatgtaccctttctgcagctgctcatcaacttgcttcttgacctctgctagttcgttggctgccatcctgtacggtctcttgtaaattggggcggttcccggtgccaagtcaatccggaattcaatctctctcttgggtggcatggtagtgaggtcttcggggaacacttccggatactcgcagactatgggtatatattccattttcctcaagttcttctccacggtgtccactgggatttctgcttcaatctgattcaaagagaccccttgctttggtgagactagtgatttgtacgccacggtttctcccttctcgttggtcagggtgactgtgcgattcgcacaatcgatgactcccttgaacttggtcagccaatccatcccaagaatgacgtctaggtctttggattcaagaagaatgaggttggctagaaatggtgatctttggatttctattagcactgaagggctaaaactgactgaggttgaactatttcccggggtatgaactctcattggtgtgctaagctcttctttccttaacccatacctccccacgaatttctttgaaatgaaagaatgcgttgcaccagaatcaaaaagtactgttgcagggattgagttaacaggaaacgtacccagtacaacctctggtgctgcttgtgcctcctccgcagatgcgtggttgacacgagcctggataaaccttggcccggcacgcctgggcttcgggcatttgtcagcgaagtggccaagctcgccacagttgaagcaggaccctgtttttgctccagtctccttcttggcttgcgcgggcgggcctgactgtgccggtgccattggtggacgtggagctgcaccgcggttggactgacctccatggtggttctgactgccactggcgccctgaggaaagttgctaggattgaacgggcggtactggcggacgatcatggtggtaggtccaccctgctgcccgggagtgaagcgcggcctctggcgacttccctgaggtgccctgaactgtgcggccttcctcttcctgtccatcttgttgcgttggtcctcctgacgaattgccttgtcaactagcctctcaaagtcggcgtagtccccagatatcagttggttggtcagctcgtcatccagacctgccatgaacttttcctgcttctcggcgtcggtgcggacatcctctggtgcatatcgtgcgaggcgattaaactcatggaggtactccgtcacagtcctgttgccctgatggagtgcacgaaattccctcttcttttgtgccacgaccccatctggcacctgtgccttcctgaagctacggcagaactctgcccatgtgacttcagtacccggtgggcgggtggccatgtgattgtcccaccaagccgacgcaggcccttgaagctggtgtgtggcaaaagcgaccttctcctgatcattgcactgcaggagattcagcttcttctctattgcatggagccagtcatttgcctccatagggttggtggtgctggagaaggtgggtggcctgacacgtaggaactcaggcaacttggactgagggggagggggaccaaactgctggtgctgctgttcggcgtgctgcatcatcctctggtgcatctgctggtgctgctgctgcatctgctgcatcatggctgccatcatctgagtctgatgtgccataacttgggcaagggtcggattctcgggaagtggtggcagaccattgccggaatcactgctggggtgcacaccatcagcacgttcttcgccgttgctgccctcgcctatcgtgcgggtgccagtcctggtgtagaccatctagagggaaaagcagacgggggaaaagaagaaaaacagatgctcaggaactaagctttattacaaaggaatttaaactgcaattgttctgatctgaattaaaacacttaaaagagcaagcaaaaatccttattaagacagccatatcataggcacatgatatcgaccgtcgactgaccccaaacaagcaacctaaacacacaaactaacaagcagaagctagacagtcgataaactaatgggaaaaaaacgagcctaatgctcggaacggctcctgcggtcggtggagtcgaaggcgtcctcctgctcgtcaccaggtccctctgagcgactcctggagcctggcagatacgtctcgccgctgcctgactgtgagccactggagctgttgctgctgagatcgcggctgccactgggagtagcagacaaccaacctccggtgccactggctggacctctggcggctgatgctggagcgaaggagagagcggacgcgggagctggagctggagctgcaggaactgcgggcggaactggaggtgctgcgggagctgctgctggaggcgggttcctgggcgcaagctggatgcgcacgggtgccgtcatagtcttgcggggcgtagtgcggatccggactcctcctggcgctggaagaccctttagctgagcgttctccctcttcaggcgcgctatctcgtccttcagagcgacgatcctcatgagcttcccatcgttcaaggccttggtcgccttgtgcaggtccgagtgcatcctatccagtcccctcatcacagcacacatgtgaccaaaggtggtgtcgttctcgccggctgtcggacggaaggaactgacatcatcaccgttggctcgacgggggtggaagcggtacgccgtgtcatggaagatgtagttgtggcgctcccgcagtctggccatcatcaagtaggctgcctcctgacaggcgtgatctgctgtgcctcctgacgcctcaactgccatgttagcgaggcaagtccccacgtagccatggacctccaagctgacacggtgaggaagctcgccactgagcggtggaatagtcgtgtactccggcgcgttggggtagcccaccaccagtgtcatgcgtgccaactctgccacaaagtcgatcatgccttctccgcggtggttgggtgggtgaccggccatctagagaagacaagtgagtaggatcaatgcatgctcaaatccaaatttaaacaaagcaataaagactcaaataagggaatcgaataagagcgaaattttatgcatagatcagtttgcataagagcgaataaataagacagactcacataacgataaaataatgagaaattagatacatactaataataacaaacaaagcataaataccttgcaacccatgttactgagctaggacctaatgcatttcacccatcaaatcccaactgactgacgaataaatcccaatagttttactaaaaccctagactgactcgttttggcaaatcccacttaaatgagcgacaagatttttcccttgaaccacaagaacagatcccaattttcccggaacaaatccaattgcaaagaacatatgcaatgaaaaggattcagagggctcttaggtttttttccatttggcttgtcctacggtcaaggtcggctctgataccaacttgtcacgcccagaaattcccgaatagaattccaagcagaatgtgcattaaaatccccgtccaggaccagccggggtacacaaacgacaatgttgacatacagatccacgtcttacaaacatcataaagtcttacataaatgcagcggaagaaaagaaagacaacaggagctaagccttgactaaactttgactaaactgcagcgggaacaccactccacaggcatcctcgacggcacggacgaagcctact

SEQ ID NO: 7171 - DNA, 21749 bp, Oryza sativa
accactggaaggtttctctgaaaggcagcaggctcaagtaccacatcgtcgccagaagcatacacaactctcggagtgaaaagtacttagttgacaaaggtcgaaaggtgatcaaggtcaaaggtgtaaaggaatacgttgaatgctaactgaggacaacatgaagagaatagtgggaagtaaactgaatgtaaagaaagtgaatccgagttgcttgttcatgggagctattcccagttatgaaccaagtgatatgttcgaagatagtttacagaggtcagattaaaatcacatgtaacagcgaagcttcagatttggcagggtaacgatcaaaccataacaagtccagcagtaaagtcatctggaaaggcgtcaaagcatgtcaagtgggataagttgactctgttgagaaacataattgaaaggcgaaaattatcgaccctcgcatcgaatagcagaagtagctagcacccggagaccaggaaagctaatatgaggcagtttgtggcaacttagaagtaaatgacaagcatgatattctcataatgacaagcatggtatcctagtaatgacgagctgatctcgacgcataacgtgaaatgggtaacttctatgaggttgacgccaaaaatatgaactatacgaagttctggaactgaagccccatcttcaagtgccgcaacccagacgaagtcagctaaaggttcaaccagggacaagtcaggtgaagagaagattccatctgcaacaggagatcgagacaagcagtacagagtggagaagttttgctaggcaagtttgttatagaagacgcgacggaagaagtcagataagaagagaagaccgcccaacctatcttcttgctagcctcctcgaatctcggggacgagattcttgtaaggggggtggatttgtcacgtcctgataaattcatcccgaaataaaaatcattttctaaaaggaataatagaattaattaaaattcggaaagaaattggcaaacactaaaatacgtacaagaaaaattcgaatgtggcccggagaatttttgttaaattctccttggtcaaaaaggagccctcaaattttacttgaattttcagagcaccggaaataattattaagcaacaaaaacaattatcaaagtttattaaaaagaaaaacctaaaaataaatcctcttcctcctttgggccaagcccagcccaaagtctccctctcctccctctctttctctccctctccttctctccctcctcctcttgggcctcctcccctcccggcccactccctcctccctctctctcccgggctccctcgccctcctctcctcctgggccgcctctcggcccaagccgttccgccccctcccacctgggccgcctccgggcccaacccgagcggcgccccccctgcctgagccagccgcgtgcgcacgcgcgccgcacgcgcgctgacgccgcgcgcccgcgtggggcccacgcgccaggccggccgtcgtcttcttcctcctcccgctcagcctcctctccctctccgggaaaacctagagccgttcctcctccaaatccgcgcaaatcaaaccatggattccaaaattaattggggggttttaaatcccattgattcctcttcaattccccccaatttcccccttggatcgtgcccccaatcgccgggaacgcccgcgttttctccggccgctttccatggccgccggccgccattcccgtcgccgttccgccctctcccgtgctcggctcgcttccctccgctataaaatgctaccccctcgctccgttctatcgttttagccccctcccgcgatctcccgtggtccctagccctctccccgccgtcctcctctctctcccgtgccgccggccgcctccagccgcctctccctcctcgccggagcgccgtccggtcgcgccgtcgcctcctccagcatcgcagtggcctccccttccccggcttgccctccgtttcccgcggagaccaccggagctgcgttcccgccgtcgcccttccctttcctccgcgccggccgcctccagccgcctctgtctccctgcctgagcgccggtcgacgtcgccaccacctccctcggctccacgacgccgctctcatcaacggcatcacctcctcctcgcccgaatttcgccggaacaccgtcgcccgcgccggcctcaccttcctcctcgtcgacgtctcctccggcaacccctttcgccatgcccgtgcgtcagccggcgctgccgtcccctccctcggcacggtgacgtagccctccacctcgtccacccctcggtttcgcccggaagccgccgcacatcgccgcgaacctctccatccgcctcgccggagttgttcggccgcccgtccctcctcacccgtgcaccggtcggccgcacctccaccaccttcggcatcgcagccgcgacgccaccctcggcctcgcctccccttcgaccgaaccccgccggtgttcgtcgtcatcgtcatcgttcctcctcgccggctcgtcatctcgcggcgccgcctccgtcgtcggcattgcagcggcgtggaacacgccgtcctcgtctccgtgcagccgctgccggctgccctcgtcgcctcctcgccggctccggtcgtcgtcgtcgtcgtcctctcgtcgttcctggtttcgctcgttgtggcgttcgtccctctgtcaagccgttcttgtccgtcgtccgcgtccgtcaagtgtgccgctgcagccccatcgtcgtcttcgtcctcgcctccgcgtcgtcaagcctcgtgccggccgcgtctcaccttcgtccaaggatcgccgctgaagtcgttcccttgccgtctgtctccgccgcgcccgttcgtcgttgtcgttcccacgcctcgtcgcgtggtggtaaggtctcccctcttgctgccccgtcctcgtcctttcgttgtcgcccgtgctcgttgtgcggttgtcgaccccggtacccgtgtaccggtgtcggtagtcattcgcttgtgcgtgtggtgaccgtgttagtgtgcccgctcggtagccgcgtggtttccacgtgtgcagcccgtgtggtgtctagtggactccgtttgtcggccactcgcctcggttgacacacgggatccgcttccatcgacccgtggaccgtctctgtgtactcggtctaccgcggtcctttttgttgacatgtggggtccgcatgtcaacggcgcagccttcctgtcttttccaggctagcgcttacacatgttttatagttgcaaagcttaattataataatccgcaaatctccatatgacagcattaaacttcggatgaccatgtcttggtcatacgagctccgaatcgacccgttcaagtctcttaatgtttgttataacctaaagaaccctgtgctttctttttatgtattgttattgcttctttataggcttgtagctttgcttgtgtgcttcgcgtagtcttcgtcgttctggaggttcccgaagcgtggttcgtggtcgtcgccgaaggttcggaagtccgttctctctgagcaaggcaagtcacatcatccttgaacatattgaatcccagtttataaaattattctgatttaaattattgcgttatcgctctatttaaattcccgcgttatcactgttttatttagccatgcctatttacctttgttatgaccttattattattgctattgttattattaccttgttcaccctaggttaaacaaaaccccaactagtgggtactctattaatggttccactagtatgaatttaggtagatgcttcgctgattaattaggcaatattaggtggttttataactttagactttgggaattctcatatcatctggacagtatggaatggttggcttatgttggaattggacccacacctccccctctattcaaaacccccaaaatggttttaggctgggctcgaggtgcgtggtttggtttggttagtcgtacctcgggtactataaggtttaagctcgggcctctgttgcaaagcactaccgtacttccacatgtctagtgggtaaggcttagtttgtggctcagtctggttataaacaaaagtacacggattagagatggacgaagtcgggggtcgatggacatctctagggcaaatgaaggctacacgagctgcggcccggtagtcgagatgtcatggcacagggccggtgtcctgctgctgggggctcagtcctgcctacctgtcccgggggttccggccgtaggtggggttgggtcggtactcttgtttatggctaggatgggttgggaactatgtcacgtcttccgtccgtataccgtggtggtatgtggcacgtggttacacgtgaggaagatgtgtcttgtgggtaaagatgtacacctctgatcagagtataatctattcgaatagccgcgccctcggttatgggcaagccgagcaatgtacccaagttagtgttttaattcttaaaacctgcttaacaactaaaatgtggaatggttggcctgggttggcttgggacgagctgggacccagggtcgggttgccagttcggtctgaatcattgtaggccttgggttaaggcaggttcatgagggttcacggccttgattaataatactgtgtagctctaggatcgtctttataaaatggctttgggcaactaagtgacttttaaatgctgtttactgcaaaacttaacccctatattattatccccttgtactcccttgcattaattacgcatctccggtgtggcttgctgagtactgtggttgtactcattcttgctctatctttctcccccttcagtaagagaagctttggagaagaagtcttaggtggagtcttggcttataccccagttgagcgcctgtgaagatggagccgtaggcccgctagtccgctgctgtttatttttgattgtcaggccttaagtgcctttgtaataatgtagatattatcgatataataaagatgtgtcttttatatcatggttgtatggtgtaccccggcttttcctgggacggggattaatacactagcgttcgggaaaatgaaattttcccagtcgcgacaagctggtatcagagccatctcgactgtaggataagccaagtggataaaacctaaggacatattttataaatgaaactatttgcgaaagttcctttttcctcctttcccctatgctatttgcaaaatgtttactctttctttcttcttcaaatttcaactagtacgagatggttagttttgcgaagaagaagatgtcgccaattgtttgccgaagctccggaagaccgcagggtccgctagcgaagtggaggaagcagtgaagccagctgtgaagccggagtgaagatcttggagaacccgtcgcagaacctaagccaccctctagggtagagtcgttagtcgtgtgctcctttgcttgtgtgtgtagcgcgtggtttgcatcggtgggttgtgatgtaaccatgctaggttgtttgcttaatcaacttgcagaataagtaaaacaaacagcacatcaacgagaagagttagttcctttaaggtcctgtctttagttctggtctattctttcctggcttgtttccactctcacctcaatccctgtaacagatgtttaacagagaaaaaggaaagaatgtcagcgggtatgcctcaagtaactcaagttttcaactcaatccaccactggcctcaagagagttaacaagggcacacccttggtccattccgagtatgctgcttagttcacagctaccattggttcgaagtcaagaccagaatcagtgtgtgtttgatcgagcatttgccacccaggtcaatgagcctccaatgccaaaagagcatgtccccttttgtcatgattgtagagagcaaggacactatgccctgaattgtccatgggtatatgccaaagaagccccttcctttggtttaacagggcagacatcgctaaaccagcctcctcgcaccaagtcaagcttgcagcctagtgtgcaaagtagagagcccaatggagagaatccattgaatcccgggaaatgctttcctcctagcctttcgtaccacgtggggtcacgtactaagcaagccaaaggcaagaagagtaagaatcagaagagaaaagcgtcgatgcgaactgaagaagaagtacgtaagatggctattagcagcaccgaatggcctcccgcagggataactattcctagacgtcaaagaggaaataccttccgaggtgcacgacagttgacccagcacctcctaagccatggtggcagagtatctgatagtgaagggtcagatcaagtctcctcggatgatgaagatgagtctccccgacatctcggtgaggaagagatggaatcaaaggcatgcacccgttgtggagaaattggacacattgctagcaggtgtctcacactctgccctcgttgtgaagaagaccatccaccaggggagtgtcccacccgcaaggtcacatgttttctgtgcgaaggtacaaaccatgtgcccaaggattgccaactcagtgtgttgttgaccaagaccgcagaaatccaacgaacaaccctacgattgtctcgtcagctagtcagctccaacagcaacatcgacgatatcatccacagcaccaatgctcctcctgctgcgcctgactctgcaataaatcatagcaataataccttcagcaccaaccattctctgcaccgacagcctcagcaaagaattgttgtcgatggaagaagttgtgtctctccccgacctactccaggccgagcaaagggcaatcaatctcaggagggcgataccaagcagaagaccgttctctgcttcaaatagcaatcagaaggaagcttctcctgtgaatgatagcaatatgcagtcctaacacatcatcacagaaccaatcaaggatgcagtcactagaacaatgccagctatatctctccagaatcaaaatgagcagccacgtttgtggttttcagttcgctacttatcattgtgtaatcgggagtttgcagcaatcatgtaataaataaatacattcatgattataaacaatgagtttgttatgtttatggatgattcatgttgaggatgcaatgtaccgatgttaagcaccttcccttcttgtttaaggcaaggccttgtattcatgtaataagggagacatgtgtaataaaaacaagttctatgaggattatttcggaagatgctgatatgggattatgtgtataattgtttactgtcaaaggagacctagggcctcatttcagaggaactatgttctaacctcgagttaataaccaacctgatgatggaaaagaaaatcaagcgattaaccaaagagacatttgtttggactaagagtttcagatgtgtcttttttggatcaaaggcaacaaccgccagtctagcttttgacgaaccacttgaaggtttctctgaaaggcagcaggctcaagtaccacatcgtcaccagaagcatccacaactctcggagtgaaaagtacttagttgacaaaggtcgaaaggtgatcaaggtcaaaggtgtaaaggaatacgttgaatgctaactgaggacaacatgaagagaatagtgggaagtaaactgaatgtaaagaaagtgaatccgagttgcttgttcatgggagctattcccagttatgaaccaagtgatatgttcgaagatagtttacagaggtcagattaaaatcacatgtaacagcgaacccgtcgcagaacctaagccaccctctagggtagagtcgttagtcgtgtgctcctttgcttgtgtgtgtagcgcgtggtttgcatcggtgggttgtgatgtaaccatgctaggttgtttgcttaatcaacttgcagaataagtaaaacaaacagcacatcaacgagaagagttagttcctttaaggtcctgtctttagttctggtctattctttcctggcttgtttccactctcacctcaatccctgtaacagatgtttaacagagaaaaaggaaagaatgtcagcgggtatgcctcaagtaactcaagttttcaactcaatccaccactggcctcaagagagttaacaagggcacacccttggtccattccgagtatgctgcttagttcacagctaccattggttcgaagtcaagaccagaatcagtgtgtgtttgatcgagcatttgccacccaggtcaatgagcctccaatgccaaaagagcatgtccccttttgtcatgattgtagagagcaaggacactatgccctgaattgtccatgggtatatgccaaagaagccccttcctttggtttaacagggcagaaatctagatgagatcaaacaaccagcaaatgaaacgatattttagaaaaaaaaaaccagtcaccagataaatctagaaatactaaatggagtgtttttttcattggtaagtgaacacgagtttttagtggtataaaagtaaacatgtaacaaatttgatattatagaatcatatttttcctttttcccaatgtgatgcattttcatggaactttagaagtaaaaccacaaacagcaaattgaaaaggacatcttcgaaagtcaaaaccaattaattaataagtagaccttttttggtatagctgttacaccaaatcgaatcgattaatatttcctttagcttcataacaaattttcacgtgattttcacaggaccagtactcttacggcaaaatggtggtagagattacagaagtagagcaagcctcaaagagagggataccactgctagttcctgttccacccgtgaaaacatgacttgttcttgtggttttgtaacttagggaagtttgagtcgtgtccaatgtggaaaagtttgtactacgggtataaatacatgcctagagtcgtgtattaaaaaacaacaatcgttaaatatactctcggcgcatcgcaaccttttacttatctactttttcgatgagtttttgcttcgaatcagggcatcgagtacaattttctgacaagaggcatgacttgtctcagcggtttaagttggcagattagggcctcgctttagatgttctaatttatcttatacaaccgctggttaccatatatcttagctaatctaactggattattcgatttagttatatcggtgttaacagcaaaatttggcaagatactcagggtcgaggaacaaatcgaggcggatttggcatgggaaggagttgtttccaaatctggttgcgcatcggctaaaggctatcactggtggagaaaccatctttcgtcggttggccgaattccacaatagtcccgaatgcaataaaaactggggctaaagatgatctttagtcccggttcaaaagggtaacgggcatatttgatctttagtcccggttggtggactaaagatgatctttagtcccggttcaaatgctgtcagggcatgtcaggcccccctgggatcaccaaccgggactaaagatcgtaactttagtcccagttggtaataccaaccgggactaaagatcccggggatctttagcctcggttggtaacaccaaccgggactaaagtcccaccccctatatatatgtcttcctcctcctccagctgcccgagcaagcttcaaaatttcttcaaaaaagaggagaggtcatgccaaaatttctagtgaatttattttggtgattacatacaaatcggaggtgcctaaaaggtttgcaacttcatcctccaatgttttttttttgtcatattacatttgcagcaatattttgcacacttttttgtctccaaaatttagttgtaagttgatgagagagaaaatttgtgtggggaagaaagaatatatagaaatttagttcatttgctaaagaaggttttataaaatagttgagaaggaaaactctagtgaaaattaatcttaaataatagaaaacaaattaaaatgaaaattaaaagaagtaaaacacattaaaattagtttaaaactttagaaatagtaaataagaattattttgtgtaatattttatgatttttgtatgaataaagatatgtcattattgtatgactgttgaaacagtttgtaattatcttataattattgtatgactgtcattattgtaggaataattatttgcgtacggttttttttgactcatgtagatggatcgacaatggatgtacgctgaccggcggtccaaagagtttattgacggcgtgcactattttttgagagtggccgaagctaacaggcaaaggggttttatttgttgtccatgcaataagtgtaagaatcagaaggagtattctgcatacaggactattcatttccacttgtttgagtcggggttcatgccaagctataattgttggacatcccacggagagcaaggtgttgaaatggaagaagatgaagtggaagacgacaatattccggactttgctcagtatgttggatttgaaggaaatcaaacgggcgaggaggaaatagctgctgatggtaacgacgttgcggatgatcttggtcagatgttgcaggacgccaaggaggtctgcgaaagtgaaaaggaggcccataaattggacaagatgttggaggaccacagaacttcgttgtacccaggttgcgagcaggggcacaaaaagttggataccactctggagttcttgcaatggaaggcaaaaaatggggttagtgacaaggcatttggcgatttattgaaactcgtcaagaacattcttccggagggaaacaaattgcccgagacaacgtacgaggctaagaagatagtctgcctgctaggactggaagttcagaagattcacgcatgtccgaatgattgtatcctatatcgcggtgaggagtatgagaacctagaagcatgccatgtttgcaaagcactacgatacaagattagacgagacgatccaggaaaagttgacgggtagctaacaaagaagagaattcctgctatggtgatgtggtatttcccaataataccacagctaaggcgtttgttcaggaacaaggggaatgctagaatgatgcggtggcacactgaagagcgtcaacaggacgggatgctgagacaccccgccgatggttcgcagtggcgaaacatcgacagaaaatttaaagaatttggaaaggacgcacgaaacatacggtttggtttgagtacggatggcatgaatccttttggagagatgagcagcggccatagcacttggcccgttacgatgtgtatctacaacctccccccctggttatgcatgaagaggaagtacataatgatgtcgattattattcaaggccccaagcaacctggtaacgacatcgatgtgtacctaagaccactggtcgaagatcttaaactgttgtggaagaaggaaggtgtccccgtgtgggacgaggacaaacaggaggagtttaacctatgagcactgctgttcgtaaccatcaacgattggcctgcactcactgcatggatgaaacagaaagtacgtatcttaagcactgtaggaaggttgtatacatgggtcatcgtcgattccttgcagcaaaccacccagtacggaagaaaggcaagcacttcgaacataaggccgaccaccgtacgaagcctaaacatcgcagcgggaaaacagtgttcggaaaggggcctggaagccagcctatagagagcgaagatggtcacgcggcgatgtggaaaaagaactctatattttgggagttaccatattgggaattcttggacgtacgccacgcaatcgacgtgatgcacctcactaagaacctttgcgtaaaccttcttggcttcctaggtgtatacggaaagtcaaaagatacactggaagcacgtaatgatctaaagcatatggaacaacgaggcgaccttcacccggaaccaaaggagaaaggaagtcattacttgagtgcagccagctacactcttagcaaggcagagaaggaaagtatgtttggatgcttggagagcataaaggtaccatctggatactccacgaatatcaagcgaataataagcacgaaggagaagaagttcacaaacctaaagtctcatgactatcacgtgttgatgacacaactgctaccagttgtaataaggggtatacttccagacaatgtccgggcaacaataacaaagctatgtgcattcatgaacgcaatttcacagaaggtcatcgatccggatagattagaagcccttcaaaatgaagtggtgcaatgtctcgtcagttttgagttgatatttccaccttcatttttcaatatagtgacgcatctgctttgtcaccttgtgaaagagatcagtattctcgggcctgtgtatctacacaacatgtttcctttcgagaggtacatgggcgttctgaagaagtatgttcgtaaccatgctcgtccagaggcaagcatcgccaagggttatggaacagaggaggccatcgaattttgcatagaatttatcgaagaccttcgcccaatcggggtacctgaatcacgccatgaggggagactacggggaaagggaactctcggaaggaaagcaataatgacggtagacaacaatttattccgcaaagcccatttcactattctgcaacactcttcattggtagctccttacaacgaggagcacttggctctagttcgcgccaggaacatcggtaagtccgatgcatggattacacggcatcacattgatactttccccgcgtggctacgacaatatctcatgggcaacgagtcgatcaaccaacaacttgccttcctggcgaggggaccgtctgggtcgatcgcaacattctagggatatcagatcaatgggtacatattctacacgagagcccaagacatgaagagcacgaaccaaaacagcgctgttcgtgtcgatgccatgggacacgatggaacaactgccacgtattacggtgctatcgaggacatatgggaatttgactatggtcctctcaaggttcctctgttccggtgccaatgggttaggttgactggtggaggcgtaatgattgatgacagtgggatggcaactgttgaccttaacaaggttggatactcggacgaaccttttgtccttgccaatgatgtaacgcaagtctttttcgtgaaggacatgtctagcaaaggaaagaagggcagagggcctgacgagcctaagcgtcaagtggttctcccaggcaaaagaaaaatcgtcggagttgaggacaacactgacgaggattacgatcagttggatgggcaaccccctttcacggtgacgattgaccctagcatcctcctatcaattgaagacaccccttactcatatagcgatcacaaggagggaacaatagtgaggagaaagtacgtgcggtcaaccgtcaccgccgatgtaatgccgtaattattgtgtacacgatgtaaactattttggatgtattgattatccatataaatcaattgatgtatggcatatgttaattacgcacgattattagaggttttaacaagtttaaatcatgtatatgctagttatatgtgatacttacaatttttaaaagttttaaatcacgcaggtggcaatttcatatatatgttcattagagtttttaacatttaatttactatcattcatatgctaattataattgactagagaatttttaaaagttttaaatcacgcaagtggcaatttcatatgttaattagagtttttaacatttaatttactatcattcatatgctaattataattgactagagaatttttaaaagttttaaatcattcatgtggcatttacagatgttaattagagtttttcacaatttaatttactatcattcatatgctaattatatatgactattcgaatttttaaaagttttaaatcatgccaggcatttacatatgttaattagagtttttaacatttaatttaatataattcctatgctaagtatatatgatgattacaatttttattaattttaaatcatgcagtatgtacatacatatgttaattagagtttttaccaatttaataatatcattcatatgctaagtatatatgattattggaatttttattaattttaagtcatatatttgcttattaagatttatccacttaatttattacagacaaaaataatttttctaagtaattgtcattaatctttgtactttaaataattgtaatgcattatcttctattttagaaacacatatgtaagggaaataatatgcagtgctataatcagtagtcccggttcttaaccctaaccgggtttaaaaagaatttggaaatagcgggaaaagatcattagtcccggttaatgagaacaaccgggagtaaagatctctttagtcccggttgttactcccggttgttgagaacaatcgggagtaaagatctttcctttagtcccggttgttctcaacaaccgggactaaagatatctttagtcccggttgttctcatcaaccaggactaaagatccgggggtatatatattcccggtgggccctcgtcttctccaccaacacttagacgttttcggccgatcgatctctctcggcctctctccttcgccgccactgcctagggcatccccgcgccaacgccgccgtatctcgccatcgtctcgagctcgtcgtcctcgccaacgcctccgcctcctccgccgccgccgcatctctggggtgagagccgccgccgccgcctcccttcatctcgctctctccgatctcgatctctctccgtatgtcacgccgcccgccacgagacgccgtgccacgagacgccgcgccacgacgacgccgcgccacgacgacgccgcgccacgagaagccacgacgccgccgcggcatggcaccgtcggggcgccgccacgccgccgcggtgccacgccgccgccttcggcgccgcgcaacgccgtcgccgcaacgccacgccgccgcgccacgcgccggcctgatgccgtcacaccgccgttaacgaacacgtgaacgagaacgaacacgtcaacgtgaccgagaacgtgaacgggaacgagaacgatcgaacgaacgtgaacgagaaggagaacgagcgaacgaacgtgaacgtgaatgagaatgagcgaacaaatgtgaacgagaacgtgaacgagtgaacgaacttgaacgcgaacgagcgaacaagaacgagggaacgaacgtgaacgtgaaccagaacgagggaacgaacgtgaatgagaacgatcgaatgaagacaaacgagaacgagggaacgaacgtgaatgagggaacgtgaacgagcgaacgaacgagaaggagcgaacgaacgtgaatgagaacaaacgaacgaacgtgaatgagaacgagcgaacgaacgtgaacgagggaacgtgaacgagcgaatgaacgtgaacgaacgtgaacgtgaaatgcaatatatatatgttacttcgcgtttatcctaatacatctttttgtatcttgcagaaaagacgtgttgtcggagtcgtccctcaagccggagtggaagagctagccctagaaggaattcgtgcaggcaagtgacgtaataatataaatgattgttatatttgtaatgcaattaagattattatatttgtaattagacttagcatataagattgtgtagtgttctaatattatttgagttttaatataagattattttatttgtaattagacttagtatataattattgactatgaattggtgcgactcctagcaattgactattttagtgttaattagacttagcatatacgacagttacacttagcatacatgactattttagtcttagcatgtaatattatttgagttttaatataagattattttatttgtagttagacttagtatataattattgactacggaattggcttgtgcgactcctagcaattgactattttagtcttaattagacttagcatatacgaaagttacactgagcatacatgactattttagtcttagcatgtaatattatttgagttttaatataagattattttatttgtaattagacttagtatataattattgactagctagggtcgtataatatacgtcacctagacttagcttatatcatgatttgtaattagacttagcacgtaaggttgtgtagggttctaatgtacgacagttacacttagcatacatgacttagattgttaaaacataaatgtctcatgacttagcagatgtttcttgtatcaacagatggctgaccgcgatgagtaacagatattatacggtacaatcgcgaagggaagcagccagtactagaatgaagaagagtggaacgaggatccaaaccagtacttgaatgaggaagggaacgtggagagggatgcggaggggaaccagcaggggcacgtggaaagggatgtggaggggaaccaggaggaggaggctagtggaagtcaaccctccgttggacagaagagggcacgcgggcaacgaggtgcagcgaagaagcttgagggtcggcacatcataacggaagtggaagaagatggacgtcctagtgccccggccgaagctgccaagaactatgtacgtcacagcggttgggttgtgcgggataacgtgcctatcagtacggtgtactggcgaagaacaagggcacgcggagatcatgagagctttgtcctagattcggagaaagagatgctgtggaccacaatgctcgagacattcacccttcctgcgggtacagaggacaaagtgaaaaggtggactctgaagaaaatggcagaacagtttcagagcttcaagggagatctgtaccagaagtatatcctgaaggggcagacaccgaacttcgacacattcccaaagctaagggatcactgggacgagttcgttgtatataagacaggtgaacaagggcaggtgatgatggaaagaaacaaagaaaatgccgccaagaagaagtaccatcaccacttggggtcaggaggctatagcgtcgcgatgccgaagtgggaggagatggaggctagcttgcttgagaggggtatcgaaccggcaactgctaattggccgaaacgatcgaagttctggtactatgctcacggtggaacgctcaacccagctgatggctcactggtcttcggcgatcagatacgagaggctgcgcgacgactaacagatgtagtggaagcctcctcacagggcacattccaaccggacagagatagggacgagctgacactcgccctacagactccagagcatctaggacgaacacgagggaaaggggtgattccttggaagattggtttcaaggaggacatccagacgtacaggagtcggatgaggagcaagagagataccgaggcgaagattgcagatttagagtcctgggtatcgagctatgagctcaacatgcaagaggaggtggcaaggaaggttgatgaacgcatggccgcacatcggtcccatgatccccagccgaccattcctcctgcaatgttgagcccgtcaggaaaccatagcagctacgcctcaacggggcaagtaggatcacagagcatggacgccatgcaaacccaggatgaatcgacctgtcctgttgatgacatcactcagcggacaccatgtgagctgtatattcctttcaagaacttatcaataaaggtaagctcgtagtttatatattttagatttggccattccgctagttgctgcttatatatgttgattactaataaataatctctcacgacatgaaggtggcgtcgggcatggccatcccaacggacccttcaggtacttaccactgcaggccgattccagcaggatactcgaaggtcgaagttgagttggtcgaaggagcgtacgaggacctcgagctagattaccctggaggagacggtgagacgcatctacgagacacaagccatgccattattctatggcacaggcggtacatcatcctccctgggcgacaagcggcgtctcatggaccatctcctccggctccgccatctcctcctcaggatcctgcaccgtctcctcctcatgctccgccagcaccgtctccacttcaggctccagcaccgactgctcctcaggctcctgcaccgactcctcctcgggctcctacacctactcctccgcaagctcctcttccggcaccttcaaagtcaagggccccctccagctccaccgcctgcccacacaagggcaacaaagaaggcgaaagttgacgccgccaagaacaaggacccggggtacgattgcacgcaagaggagcttgacgtttacgtggcatcagaagtcaagagacaattcaagcctcgaagtccagaaaagaagattcctatagacccgagtgtcaggaacttcttcaggggtatgtctgcacctgtcaaggaggccatcaagctatcggactatgagcgaacgctgaagaaagcatcttctggaaagtccaaaccagtccctcagcttggagagcaaccaaaccatgatatcgagccgttggtgaccggggaagacatgacgatagaagaatttattactgacaccggtctaactacggatcaattgctaggagtcgaaccaatagaaaaggcggaagtgaaatacatgtacaaactcggcaaaccgcttgtcaagcccgagctggtgcagtccctacccacacaaatgtacaagttccatcagctgtacatggagatgagcgccaccggtagagagatgatcggagcgaggatcagggacccggacttcttgcaaggagatgacattctctggatcaatttcaagggaatctacgaactataccagctggacgccctcgacgtctctattatgagttgctggattttgtaagtatatcgttcagttagatttcttaattactacgtctcctttaattaattaggtccttgtatataagtagactatataaaataaaatactcccttttatcgttgtagaatggagattcaaagggcctgacggcggagggttttcgatactggattcatcgaccctcggaaagtaaacgtcgcaatgctcgaccaatatccgcaagacatagaggacaatctcgtccatctccttcaggcgcagcattacaagacgttcatactgttgccgtacaacacagagttagtttaattttactatcttcctatataccaaatttcattcctgtacgaacttgctaagtgtttcatatgtaatgcatcccacgcacattgcagattccactgggtgcttttactcttcgacctgtcggcctgcaccgtcaacgtatatgactcaatggataaaaaagagtctacgtttgacaaggttttcgaacttatagacaggtactgttataagttcctctgttaattaagaaattcttgttatgttaattgctactatgaatcatatctttaaactccatgtagggcttggtatcagttccgtcatttggtccgcggcaactggagagaaagacttaagcggaagttcaaatttcctgtgggtaaacatgctctacatttatatttctccgattcaaattaatacatacaagtgtatattaattagatctcacgccgttaatttgtcatttatttgtagtgcgcaaagcaaaagcagggaactaacttgtgcggctactacgtgtgcgagtattgccactgccttgtagaccaaatcatcaccacaagagagctcgatgtacgtacaaataaattcaaaatttcattacgtaacgatttcttgtttaattactaatcaatttcatacattcatatagtttattcgcatgagggataacctgaccacacacaaggaatttatcgcggcggttcaagaacaactcatgggattcatcaacgaagaaatccttgatcccaagggtgaattttactacgacggaaacacaattcataggtccttagcttctgagctagtgactactactacgtcgaaatcgtagctagctaggacatataatggattgtaattaatacatgactacatatgtttctatatatatgtgtaaacattttctataatgtaaatatatatagtatatatatatatatatatatatacatatgcatttgcataacatatatatatgtataaatacatatatattatgcatgtacatatgtactgaaacatatatacatataataatatatatatatatatatatatatatatatgcatatatatgtattgaaacatatatatgcatggtttatatatatatatatataaaccatgcagcaacagggccatgcaaaaaaaaaaaggccagctctatctttagtcccggttggtaacaccaaccgggactaaagatggctcagccggccacgtggctgagccattaccaaccggaactaaagatcgatctttagtcccggatatttcacccaggactaaagatagcgatctttagtcccggattggtagtcccggtttagaaaccgggactaaagggggttacaaaccgggactactacaaagggtttctccaccagtgtatactggcctaaacagaatcggattcagccagccgatacaagtaggttaggcgatacatatatttttgagtttaagttgggttcgtatggaagacttggaaataattgccatacaaggatagatccattacaggtatttgtatatattaattaggaatatttatgagtcatgttagttagagattttggtaagggcccgccataggggattgtccaagtgttttgtaacttagggaattttgagtcgtgttcaatatgaacaagtttgtactacaagtataaatacatgcctagggtcttatagaaaaaaacaacaatagctcaatatactctcggcacatgccaactttttttacttttctactttttcgatgagtttttgctttaagttgggcatcggcttcgatcttccagcgagaggtatggcttttcccagcggcatgcatagtccggatataggacgtcttattaaatctcttactacatcatcacaaatcatatgtatgtgacagctcaattgatttaaggggcaattgcacctatgccccactttcacagccaattgctgttttaccctcagtttttagggtttacagttttacccccactttttgaatctgaatcagccgtgtagcccactcctaacagccggttttaacggtgttagttgtaaaaaaaggacatttaaacccttggtggttattgcatttttgccctttttttcagctttgtgtgattttgccactattttgtgatttccgcttgtgtgatgagcatttcgaccaaatatttgcatctcttctgatgtttttgtacatgagcatgcgttggtgaggaactgcagcggcggcgcgaggtagtcgaggcggaggcgcatccacccggcataggaggcgacgaagagacagtcaacggcgaggagcaatgccacctcctcgaggtgccaccattggaggtaggcggcgacctcgacggcgagtagcagcaagggacaggacaaggaacacccgatgcagccgtaggagcgcacccgcagcgccgtgctctccctcgccagccctcgacgcggccaccgccgcctccgcacgcacccgcagccgcctcgcccacccgcgcgcatccgtagccgccgcctcgccctcccgcggcctcctcctccgtgcgcgcccgca

SEQ ID NO: 7172 - DNA, 45309 bp, Oryza sativa
  unsure (1)..(45309): unsure at all n locations
gccgccccctcccccggatatgcaaggggaaggaggggagggggcaggcgccgccagatccgccacccccaagcccccccccttcgccggatctgcacgggaacggaggggagggggcgcgcgccgccgccgctgtcacccgtggccgccgcgtgctctcctcccgccatgtgccgcccgatccaccgccccctcccccggatctgcaaggggaaggaggggagggggcgagcgccgccggatccactgcccccaacccccctccgctggatctgcacgtatgggcgacagcctggagcctgtcccctatttttccttgcggtttcacttacgatccgtatgggaaaaggggggggggcgtccaggaaaatctattctgtagtagtgacaacccaatggttgggtcgggcctgcacaggactgacccagttaagccgtgttgtactagggctgggccgtccggccccaggccttttggcattctatggatgtgtacattgtccgattggggcagtatcggatgtacgggagcaatgagccgggaggggagtacaatctgagcatacaggatccggactcccgaacggacgcgcccgcgaggagcgacacgctgtagcagtcgacggataaattttggcaatttgaccttttaaaaaacttatttgaagaatagaccatgtcaaaaatttattacaaaaatatatcaaaacctcagcgctaatgggtttagcgctgagttataatatctcagcgccacatattttggcgctaaaaacctatccgagtagccactatacatcatatcattggatctgagcgccaataccacaggcgctaaggttttggtctatttttgcaatatgtttttgacatggcctattcttgaaataaattttctaaaaggatcaaatcactactggagaactaatttttgttgggtcaaccaaaaatcacaatagtcccggttacaaaaagaaccaggactaaaaatcatctttaccctggttgaaaagcccataaccattttatgatctttagtcccggttgataacatcaactgggactacatatcattttcagtcccggttgaaaaagtgtccgccctcctacccgttttattcccgtttggaaacaccaaccgggacttaaaattggcggataatatataatcccgagcacttatcctccaaccacctctacccttatcctcgtccactcttttcttatcttctccctttcctctcgctcttttcctctaacttatcctctcaagtgagcgagcaggcgggcacgcaagggagctagcgaggccggcgacagagggaggcgcggcgggcggcgacgtgcgcggtggtggccggtggccaacggcctacgcctcggttggatctgagttattttttttagaatttgtgattccaatgcagatttgatttgtgattaatctatgatgtatttgatttgtgtgcgatgtgaatatgtgatgtatttgtgatgatatttttagaacttgtgatgtaatttttttttatgaatttgtgatgtgtgtgtggagatgatcgatttgaggatttggagatgatccttttgttctgtgatttgtgaggatcgatttgggatttcacaatttggggatgattttgggatggagtgaaatcaattttcaatgttaaaaacaatgaaagaaaagaaaaaaactggcaaccggacctggcttggctccatctttagtctcgattggtaacactaaccggaactaaaaatgaatttttaatcccggttatttcacctcccggattcatggtgccggttgcataccgggaatattgggggttaccaaccgggagtaaaaccccctttctctagcagtgaactgtcaaaattttggcaaaaactttacggatattttaagtaggtatctaatccgtaaagataaagataaagaataaaataaacataaaaataaatttgatcatcgacttgtggcaaacataaaattcctttatttaggatggagccattgatggactggacatatccgtctcaacaaatgacttaccatcatacatctatagtgcaggtgataacattttgagcttgcatatcttgcagagctactgtacgattatttaaaccaccctagttctattattcgacgcactagggagttttatatccttgaactggagcctatagcttcgtcgaatgcagaagacgcgcatgcatgcacgcacgcatcgacgcatggtgcgtcatgcatcatggctcggcatagagatggtccggcagcctgggcttgacaacggcgaggagagggatcttccgcggcatggtgagcccgaagatctcttccatgctcagctcgccggcagcgatgccgtcggggaggttccaggagaaggcgtgcagcaggttggcgagggcgagctggatgaccttgagaccgaggctgtacccggggcacatccgccggcccgtgccgaacggcagaagctcgaagtctcgccccttgacgtcgatctcgcttcccacgaaccgctccggccggaactcctccggcgagtcccacagcgacgggtcgcggctgatggtccacgtgttgacgagcacgcgcgtgccggcggggacgtcgtagccggcgacggtggcgtcctcgcgagacatccggggtatcagcagcggcgccaccgggtgcatccgcatcgtctccttcatgatggcgtcgacgtaggggaggtgcgggatgtcgctctctgtcaccaagcggccactgccgacgacgttgtctagctccttggtggccttggcgaggatcgccggattcttcaggacctctgacatggcccattccacggtcactgcactggtgtccgcgccaccggcgacaaggttctgcacaaggcatatatgccaaacggtgcactgtatcaaaatgtcgtcctaatagttatatcaaaaaataggataaaaattagacaatacaaaattactatatttattagaaagaaaagttaaattcgacttgcacagagggaaaatttcaagctgtgaacactattatttttttttcacgtgactacgacgagaccgtacgctggattgttactattagtctacgacgaaaccgtacgctggattgttactattagtctagtacacccaaaagtgcatgcattttttttttgttcttatagaattttctcttaaattactcatccgatttacgatccgatttcatgattatattttttatgaaaaaatacaaattacttttataatttatctaaattacttttagattttattaaattgcttcttagtcataaaagtaaattcactgaagcctgaaagtaatttacatatactatataagtaacttaaaagaaaaggaaagtaacttgttatcgcattaaaagtaaatatgttgtggggtaaaaacataagtctatctagaaattagatttaattgatgtgttaccccacaactgatttacttctaatgccgtgagaagttattttctttttcttaagttactgctataatatatataaattgcttttaggccttattaaatttacttttatatatctaagatgtagtttagtaaaatctaaaattaatttgtatttttttattaaaatataatcatgtaagatcttgttgtaaagatttaattgttacggacacaatagtgtattcggatcgtagttcggataagtaaattaagagaaaattttatttgaagcaaaggtggtaggaacatatttgatacttacttgatagacaagtagtatatttggacaacatctgatgatgtcacttgttagcactaaaacgagatgtctctcgatttagattttgctggttttttttcacacgttagttcaactagaaaggtagcccgcgcattcgcgcgggcatataagatacgcttttgtaaggtgtaatatcgaccgggtgacacaccactcttgaaaaaatacaatttcttataaattttcttcatctacattgctcagatatttttttacaagatatctgtaaggtttaaactatataatatttaattcactactataagctgcaattatcagtaattcttcattttctagaaaaaaagcgtcaataaatacataggagatatacatattgtacagctcgcttccctattatatatgtgatctttagtgttttttctaaaaacatacctagtcaacatgagtcctaaacttaaagttaatagtagcatatagataactttttaaccaactatatgttttatatatgtaataattcgttgaaaaactcataatgacatgatataagatagatggatggtcattaacatctaagcacttaaacatggttatggcgatggaacatataatggttgttccaatttgtgaaaagtaataactattttttacaaatttattatattctgcccaattgatttaattcaatccctattggaatttttctatttttctaatttactttatacaactcttattttatgttcaaaatgcataatggatcatgaattgttgtttaattatttaatagagcaacaattagattagaaattagatgtatagcttaaaatatgggtttttcaatattattcatagtttgtctttaaatttgatagctaaaaagtaggaatagggaggagtggagtgcgaagagcctaagctaaaggggaagggggcgtttggtgttgtgtgcatgttatggggacggtgaggaattggagactttattttcctgctttttcctgaataatttaagtaaaaccgatgatcatatgattctccctgcatgtagatttgaattagtgtaatatatttgtcaagcgatatttgacaccaagttgatcctttttatcatgtgaaattatttaaaaaaatttcatgtcatcaattattatatgatggcattaagtgtcatatgtcggcaccatgtatttagcactacaatataacttttatatgtgattaatattttatttaaataaaggaatacaatagattataagttagatatatatttcataaataatttaaaatatgaacatttaaatgtttttcataattttttttataattgtttgaatgtacgcaaaagtgtaagaatataaaccaaaatcaaacatatttatttcaaaagtttgaatattgtgaatatgtgtctttaactttagttataaataatataacaaaaataagtcgatcaaaaattcactatatgctttggatgatactgttctctatttttttaataataaattatgatttctaagtaatgtatcatgagaataggaggaaaagagaggtatggtgtgtttgagggtgtgggcagtggggtggatgaatgagtaagcgcccatgtacggggccgtggtggaggttggtatatgggttctattttttaaaagaaaacgatggatctaatggtcataaatatgtcttgagaaactaatagttagtccataggtagggttttattttgtccacgttacatgtcaactcagctattatcattcttacttgtttttattatccttaaagcgggatgcattttaaataaatggatctgcatctataccactaaaataagcccaatatattattaatacataaaacatttatatctactacaaacataaatgtttatgtcaacccttgtttctaaatctatgaataaatattctataattattgttcctaatggttaataagataacactgttaaaatcaaatatgaatgccccctttaacaggtaataaagccgaccgtagtcgccgaggctttatttctccactgcgatatatttatcgagggatatttgacaccaagttgatccattttatcatgtgaaattatttaaaaaattatcatgacattatgacattaattattatatgttggctaaattatttaaaaataattatgacattaagtattatatgacggcaccatgtatttagcactacaatataactattatatgtgatcaatattttatttaattgaaggaatataatagattataagttacatatatatatttcataaataatttaaaagatgaacatttaaagacagttgatttgatactttatattaatcttgtttaaactgtgcatatacatggatatatgcggagtaataaattttattttataatatagaaaattctactttaaaaccgccgttctatcagcatacagcatagtatgttttttttctggctttatagctgtagatacgtatgtttgtttggttttttgaagtgaacaatacatatgggtaatatccaattatagtgtacgttaacttttctcgtgaaaatttctcttctatatatcggacattaagaagcagctgtgattagataatgggcctacccggacattaagatgaaccagggattttaaaatagatccaatctaacggtctaaaataatgggcctaccagtttaagtgaaaatcgacggttagattagaaagtgctacgtggcgatttaggagcgtttgtaggaacgccacgtggcagcttaggagcgtttctagggagtttaatggacttttagtatataatagatagaagatagatagatagatagatagatataagcttattttgatataatatttttttcacgttattcaactccagtgtaactgtctttcactgtagctagccataatatatttgttctaacttgtacaaactctaatacagtaattacttaaaatataagcttattttgatataatattttttagagagaaggctcttggctctgcttttataaaaagtagatagattttttttagagaaatgtattttttacccagcatctatgtccaaccagatatttgtaacattttaaatcagaacttgaaccgacaaacaacctcatttaaattgggaacgtagcctcgcaaataactcaataagaaattcgctcgtataaaaatttaaactcatgattatcatagaatgctactcaagtcactgcgacgctgactcctcccagacagctctctctagggaaccaaaattagctcgtctgaacgttaggtagctcaggccatttttcaatttccctgcaaccatgactttctgttggttacagatctcataccaaccgaattaaatttaaaaatatactgttcatataaatacttcctctattttatttcgtattataagactttctagcattgcccacattcatataggtgttaatgaatctagacatgaaacagagggagtatttagcatgcatgtcacaaatataccatcaatctcactagactattgagcgaaaaagatgacgcaagccatatcgcgctgggacaggcaagaccgcacggtctcgcaaaataggacaacaagactgatcggtctcgcatatagaatcagcgacagcgaacgtccatgtaattagggattaattaccctgattagcaactaattaatcaaataattaattagcagcctctccgcacgacactgcacggtctcacgccgtgatcgtgcgagacattatatttctatcaaataaattacattctgaatattcttaagaaaagaacaaacgaacaatatattttcaaatttaattctctacctaaccaaacatcttccccgagaaatgtgtttacctgatcctaatttccattcagcccctaggacaaatcatattctgatacttaaaatccctctccaaaagtgtgaagcaccagcttcatttgcctggaacaccccactatctccaacgtacgtatttgtttctcaagatatctaagcataaactcttttccctatatatctaagcataaatttgatataactaggaaggtagtccgtgcattcgcgcgggcaagcatcgtgcgctgcatttgaaaacggatcatattaatcagatagcctctgccatgttctggaagtgcatttcctcagcaaatattcatcgttgcatcactttaataatttctctatgctatatactatatagtttttaattaatatgtataagcaattatatataatcttcatcattatctaaaaaggagttagacctaatttgtttagaaaacatgtttattaaattaaaagcaagttgtattttttctttttttgttgaatgctttgggccctgtgtgatgaaaatgtaagacctagctaaattcattgttccttttcccccgctatatggctttatgcagctcctagacactgtgttgagatgtggttattgcacctacggaggttgccttgtgattcatccttgttgtgatcacatttttggtcaagcttagttactcctatttccatgtcttgttatatcgtaaaatctaaatgaactccaaagttaatcatttaagtatatatatatatatatatatatatatatatatacatacatatacaataaaaatatatttgcagacgattaatgttcatatatagggatgattcaccttttgaatggtctacgcacaaagaaaataaacggagttacccgaaatgcttagaaggcgctagaacaacacgcttgaacatatatcaatgatatactaaaagtgcattaagctccatctaaagtcaattagatagtaacatagtttaaagcagatatacgatagatcatttagcttgcttggattattttagcatattttttttaaaaaaaatcatgaagtaataatcggattttctctaactaaagccattggattttctatgcattgggtggtttggacttcatattttagttagttgtatttgcttagataatgtatatctaatttagctatgcatgtctgacaaacaacatatatatgatgatgcaacctgtattggattatttcgtaattcttttacagcaattcaaatgacatgtaaaagggcaggggtgttcttccttaataaaaaaatgtttcatagttcaatttgtaatttttgtttggataactattgatttgatttagctatacatgtttgcagaatgatgtatagtgatgtaatatgtgcagccaatttgtttaaggtatttcaatcatatttggatggtatgcaaagcacgcaggctgaatgtggtcgaatgtcatattttgtatataggaaaatataaggatacggatcttaaattcctagtttaattataaacagagcaacaattatattagaaattagacatgtagcttaaaaattctggttgttttaacatattgattatttctcttttattttagtcctacccaaaaatagggatgggattggcagtggtctgcgcgcatgtgaagggggcgaggcggtagatgtgatttatttttataacttctccaaataatgtaacttaaaatcaatgatgacaggtttaattttttctcaaaatttctaagattatttatgattttcaggacatgacacgtggcggcgtaagattttttttgtaaattaaatctaatggttgaaaataacgggtctatcgatttaattgaaatattttataatttaaaatgtgacatatggtgacttaagtgtgctctaaaggtgtttaattggtttttattgcgtagattgtttaatatgaaaaatacatgttttcattctgttataatttttcattttcattcagttgccctgcgaaggagtattttaatttttatatagtaaaatacaactataatggatattgaattatttaattaactgtaaataaaacaatagttaaaacaaattaaaaaccaaatataattttagaaattataagccatttagctttttttttaatattaggttgttagttaaaaaatataaggcgagaggatcagaggaggtatatgtacagcaggacgagagatggatatatttttttctgagacatattccaacggatcctagtctttagttatctatttttaaaatatatatataattatagacctattagaaaatgtgttgggtgttgtatttactaatataagctaaatgttgccattcatatggtttaaaaatctatgtgatttttctaaatatgtatcgagtgaccaataggtagtctctagcattatatgacccaaagaaatacatttattttacttttaaaatgtagttaatttaggtattgaattctaaattttattgtaaataatctcatcctgtgcacggataaaaaatagctatttatatgatatagttgtttaaaataatttattacaaagtacgttttctaatattaattaagaaaatgtttgaaaataggagggcatgttgccctcatgtattagggtgagggcagggattatgaaacgtaactacgtatatatacctaatgtaacataatggatggcagcggtggggtgtgggcctttctttttttttctttaagtaaaatccgaggatagaaaatatgggtgcaccgtatattagtgaaaatcgacggctagatattttggtttttttttataatttgctagagtgacacatggtgagatgcgagtgtttgtagaaagctgtacaacggtttgagagcgttttaaggatgtttaatggcgttttagtatataatagattataaaaaaaacaaactattatatatcagccccatgtgtcgtgatatatttaggaccaccatataatttttataatttaattaaaggaaaataacggaatcacaaattagatatataatttaaaaataatttagaagatggttcaaggaacattgattggatattttatattattattatagatcttagtttaactatatatattcatatttgtgatgtaatatattttagaaaaccatattttatataaagatcatggatttttatgatgtattttttgtcgtcttttttatgcatatgcgtatggttttttcttttctttccagcgaacagtacgtaaactattgttttgtttttgtacgtacgtacgtacgggagaagacatcgtataaaccaatagtagaagcgcttaaatcatataaagagaaagttaatttttttcaataatagatctaatccaatggtataaaatgatgggtccaccaatttaaatgaaaatcgatggtgagatttgataatgccacgtggcagcctaggagtgtttgtacgacgccacgtggcggtttaggagcgtttgtaggaagtttaacggagttttagtagatagtaatagatttagatgttaaaaaataaagttgttttgggggcgaagagagtacgtatttgggggggggggggtggttaggaattaagttagcaatggattctcatcgctatggggacagtaatacacaaacaattttcgtgtataagcatgttgcagacgaatcataagtatctgcgtcaggaaaaattcgttgtcctattttcgatatgactccttaagagacccacacgtgaaaatatattttcgcagactgccctcttagggagccgtataaaaactagagctatttccatacaggccacataagcagccgcacgaaaaaatatattttaacaagcggaccgtccagaagtctgagttacctcttctgtccctctttagtgtacgcttcaaattttttcaagtcatcccttctatctctccttatctcattcttatctcctctcctctcctcgtactcctcactctctcaaactctcctggttgggagattggcggtggctggcatgagcgtggtgaaggcgacattgggcgcgcggtgttgggcgtgtggcgacggccgtcctccacacatatccagtggcggtggctgtccccctcctagatccgacggcggtggcaggaggagccgtatgtgacaacggaaggagcacggtggcggtatggttggagggaagatgccttataagttggtttcacccttactaaactaacaatatggtactaaatatgcgtacactgctctcagggaccatataggcctcactgatttggccgggatgtcacatacacacccgctcaaaggacccgactccccgtcggttcaactcaccccctcttagcacacgttcgtacgtccagtgctggtgctatatgtcatgccatgtacctcacacaaagcccacatgcgccatgcgccatatgaccgtacactgacccttacgtacaaccacgagggtcggctctaatactatttgaaacagccctaccttcaggatcgcatagcccagcccaaccgatcggcagacccacttacacataccactccacttacacttttgtcatcgcttcatataaaagagttaactcaagagtgatatcgttaaagggaagaagccttataagttggtttcagctttgctaaactagtaaaatggtactaaacatgcgcacaaagctccacacatgtctcatcctaattgggccggaatgtcacacgcggcggcgtaaggagcccggcggcggcagcggcggacggcagcagcaaattgcggcggcacactactacagaaagcgtttttgcatacgggcggaatcgatcttcacatgcggttggccggcccgcatgcgcgaaatggtctgcaaagatcaccatttgcgcatgcggccgtcgcagccgcatgcgaagattgatcttcgcatgcggtcacttaagacggccgcatgcgaaaatagatcttcgcatgcggtccatataagaagccgcatgcgaagatatattttcccatgcggtcgacctaagaagaccgcatgcgaagatctattttcgcatgcgggcgtcttaagtagaccgcatgcgaaattcaatttccgaatagctaaaataatatttattctagcattttggtgattcgtaattaatattaaattattgagggatttattatcgtatttcggagtagtaagcatataagataagacaagtgccgcagtaacaaacatgtaatacataaccattaattcaattgtaatttacatacaaatatataatacaagtggcacagttttttcatcatatgtataagtagtgtacatgttattgcatatgttctttctcccactctctgagaggtttaaatttgtcgtccattgcgagttcactctggttgtcgtagaagagacctcttgcgttgcagacatcgcgacggatgaatcggcagaggtcagcggccacgttcaagatagtagtgtggttgaatcgttgtgcaatatatgggatttcggggatctgcacacagaaaggaaaataaaacggtactcagtgagaagtgtgtgcgagatgggtttctttgtagagaagagttcgatgacctactcggttactggttgttttgtacctcccatttactctgagcatctcgcacacgtaataagcacacaagttggttcctggtggttgtttgtagcactgcgatataattatggggaccgatctcagtagatatatttagtatatatgtactattcgataattagttgtattggtataaatttgatagtaccggccagccagtcctgacggataacttcttctgggatggaatatgtactggtccacctcttttgcggtagtacttgtgtgctctgtttgaaggaaacaattgttttattagtagttagaagactggtgatcgacctaaacaatttatagtaatgaaatgtttatcacttacaaattcaaaatagtgaggaattccataaatgtctccttgtcatagtgtgcggggtccaatgatatgatcaattggtctttcggatatacaaggaataatatgtagtggtctctacatataagataggcttattggagacagaaaattccgaagaagataaattaattaaacaaaaagaagagagagcttacgtgaactggtaggggaccattaagacatctttgtcggcgtgcgccaacattgctattgccaagtatgttgctacttctagcttcttcctcttgtgcaatgtcttcacatattcttccttttcttccggggtcttgccaaccaattgctcgcagtcctgtctcagctctacggtgtgttgtgttttgcatattcttgttggatcgacgtatccaacctttgctccagttctatcagcttcgtggaattgcatactgtacaatgaataaagaagaaatgagatttggtttatttgtttcgaatgaaacgtgcaacatgtaataaagagtttagacttacagacagaaagccgcaacgagattaacgtccattttatctagcttgtagagggcgtaaaggtcttggaaagagataaaaaatatcccattaggaccactcatgaaagcgccttccgggacggcgacgcttatgaaaccgagacctttcctagatgccttcatataccattcgtgcattaccctcatttcccatggtagcttgttcataagataagttggcaagaatggcttgccatactcataagtttcaggcacatcggcagataaccaggattgcacttcatcttgggccgctagtactgacttctgggagtctgacaagacgtgagatactgacttctgggagtctgacaagacgtgagcaagttcttttctcttctcagaattcctgaaagctgaaaacatgaacttctccttatccttgtcaatctcctttgggtcgtatgtcgatatcaactttggaattatacgacgaggttccaaagtattagactttggttcggatgtagtaccatctggtatgtgcacttcttctaccagagcagattggggtgtaggtggagaggtttgaactgagggcggagccgggggagcatgctgtttagttggggaggtgggagaggcttgaactggttgcggggtcgggagaggcggttgttgagaaggggagggtggtggtgtaggttggcgaggcggtgacctaagcggtggtggtgacggcggatgtcgaggtgacggtggttcaggaggcgacggtggtgcaggagcggcagcagtcattgcctgcgatgaggatggggttgaagatcctgctgcaagaacggccgcgctcaggaatatgtctctgcggtgccacaagataaactgattcactgcatcaccgagaagttcaatcccctcaggtgcaggtatgtctagttccaaggaaacgtggtcgctatggaccttggcgacctgtacccttgcgtaatcctcagggattgccgtgttgtggaattgacgtccgggtatcgctaaacccgttgcaacctccttagtctttccagcgcggccgattggtacgacgagactgcacggagttggtccagttatactatccacagggaaggtacttgtctgcactgagcctacactgctgggtacattagttgtttgctgtgcggattgtgtgggttgctggctatcagggaataaccttggaaatgctgtcgggttttcagctgccaacgagtagaagtgttccttcacttgcgcatagatcttgtccgatagttgttctttgtatttgtctctcttcttataacttggtgcgtcttgtggaaacccgaccttccaacttgtctttgaggacaaaccccttacacgtccagagtgttcagccgtccccaacgccgcagtaagctgatctctctccctccgtgggacgaactgtcctgatctttctttctcgactatctgctgcaaattagtagtcacttcttctatgtctggagtctcgaatagtatgtctccctcatccgagacttgacctgtgctgcgcgcccaaacccagttcttgctacgttcaaccatggggtctaccagcaggggcttaccggccgcggcaaatctttgctcgatctcccgccattgatcgacgtgaccagcgtatccgctcgaccccaatctatggggatatttgttcttcttcgcgagctcggacatttttttcctcaaagccaatgcttcagctgttgtacgatccgcaacaaacgtgtcccagtcagcctgcgatatatgtccataatccgtaaacggtgggagattcttctgaacataatcccgatttagatcggacttccactgtcgccatcgatctcccatctttttaagtgcgtaatctctccccctaacctctgatccaggagggaacacaaaatacttctgcaactcattccagagaagtgtcttgatgttgtcgtccactgtttcccacaacttgacattaatgggacaacgcgtcctgactagagtgccacaggcgttgctgaacttggaccgcactatcggtggctcgatgggcttcccatcctgatcgagagcaatcacgttgtaagtttccttgggtaatttattcttgcttctctcaccacgtctttttttcccactcccgcctgcacttgtagatgtctccgtacgttcaggtgcagacgtagcggtgtccatctcaacttcttgctctgtcctgttcctcccggctttacgtttcgagcggcgtcggactaccatctgcacagaataggtaactctatacaccattaggttcatgtcacatcatagttagggaataatacatggctaacgattttcatcacttacggcctgttcgataggtatgtagtccggatcatcatcgcggggggcgacttgtgttatttccattggaaacgggtcacttggtgtgcgccacgtttcttcactagaagcgcctggatgcttattgctaccggaattttgaggagcgttaccttcttgaggcgctattggtgcgttcgatggaaccttttcgttcgacatcttccaacttgacgtaaaaaaatttgacataagtcccaatttaacgcaatttgacataagtctcaatttgacataagtcccaatttaacataagtccgaattatacataaatctcaatttaacataagtcccaattatacataaatctcaaattaacataggtcccattttagcataagtcacaattaaacagaaatctccatttgacataggtgccaatttaacataagtcacaattatacataaatctcagtttaacaaaaatcacaattatacataaatcccaatataacataagtctcaacttaaacataagtcacattttaacatagctgccaatttaacaaaagtcccaattatacataaatctcaatttaacaaagtcccaattatacataaatcccaatttaacataagtcccaatttaaacataagtcccaatttaaacataaatctccatttaacaatccacaattaaacattctcaaaattatacaatccacaattgcacatatcacaatccacgatgcacaattaaacaatccacaatccacaattgcacatttcacatttctttttttaaaagtaaatgttaccgagcgacggcggggacgacctggcggcggcgacgacctggcggcggcgatggcaacggcgaggggggagaggtccgtgcggcggcgacggcgacctggcggcggcgacggcgacggcgaggggggagaggtcctggcagtggcgtcggcgacggcgaggggcggggcgacttcggggaggagccggcggtagcggggacgacttggcggcggggacgacctggcggcggcgatggcaacggcgaggggggagagttccgtgcggtggcgacggcgacctgccggcggcgacggcgacggcgaggggggagaggtcctggcggcagcgacggcaacggcgaggggggagaggtcctggcggcggcgacggcaacggcgaggggggagaggtcctgacggcggcggcggcggcggcgtggggcggggcgactttggggaggagccggcggtggcggggacgacggcgatggcgacttgggaaattttggcagcctggcggctagggtttcgcgggagccgggacttagaaaattttggctccccgcgctccctatatataggcacagatcatcgcatgcgggcggctttagggaccgcatggaaaaatatctttccatgcggtcgacataagccggccgcatgcgaaaaagatctttccatgcgggctgttaagccggccgcatgcgaaaaagatctttccatgcgggctgttaagccggccgcatgcgaaaaagatctttccatgcgggctgttaagccagccgcatagaaagatctttttaccaaaaaaactcatatttttttttctctataagtaaactgtccatatatatttttttcccaatatttcgccacaattatacattccaaatgtttttggcactaagaaaactcatgaaaattgctcaaaactcgtaatcaaatgttacatgctaatgattacaacataagggggacctaaattcatgcacgtacatttgctaatgattacaacataagggggacctaaattcatgcacgtacatttggaatacaatgagaactaaaggttacgaaataactatgacttaataaccttggcaacaccatctgctcgaacgtacgacatatttgcttcatcgattgttctctcaaccttcttaattcgcataggaagatcagtaaacaatggtacatcgtcgaactggttgtaatcattggggtcttcgatgttgtcgatgccgacgatctgttgctttccggatatgacaatagtttttctttcatctgaagggtccttcacataaaacacctgagccacacgctctgctaaaacccatggatcatccttgtggcctgttttactgtgatcgactatcgttagcccgtagtcatcaacggaaacccctattgtgtctttaacccattcacaacggagcacatggatctggatgtttaggccatagtccagttcccatatttcttgaatggtcccataatacgacctcttttctccactcgtgtcaatcgcttcgacacggatcccactgttttgtgatgtgcttttcatgtccttcgtagtcgtactcaaggtaaatccattgatgtcgtaaccttgccatgaattgacaatacttgaaggcccacatgccaatctttgtaaagtaagttcctccacagaatcaccaactggcaggtttagatctttcaaccacagaggaaagcgacgcttgtgctctcttgatatccaatcattggaccgccctgggaagcaggctttgatttcttctaggtgtcgctcaatgaatggctcaacgatagcgagctgttgaagaacgctgttgtgtgccgcggacacctttttgtaatcattatcgaagaactgcttcctaccaacagtaccccttccagacaatctaccttcatgtcgatgaacaggaatgccaatggcattagcatcctttatgtagtccatacaacactcgactgcctcttcagttgtgtatccctctatcattgatccttccgggtgagcgcgattgcgtacatagcctttgaggatcgacatgtaacgctcataggcccacatctgatgtaagtataatggaccaagttcaataatctgagggacgatgtgaacgatcaaatgctccatcatatctaaaaatgatggtgggaaatacatctcaagctggcatacagtctcgacggcaaatgtctgaagcggacctaattccaaaggatcaaatactttttgcgaaattcgattgaaaaagtagcacaactttgttataaccacctttgtatggactggtttgactgcccttatagcaattggtaggaacactgttagcaacctatgacagtcatgcgcattgtatcccgaaatggacaaatcctttattgatactagcttcctgatgttcgatgcgaaaccagtaggcactctaaccccttgtaaacatttacagaaggcttttttctcatcaagtgtcaacgagtaacaagcaggaggaatctcggtcttcccatttggcagcagtactgggtgaaggtcatgccgtatggacaaatctacaaggtcgttacgtgacttcaatccatccttcgttttactcgggatgtccagcaatgtgccaacggtgctatcaaacacgttcttctcgaggtgcataacatcaattgcatgtcgaatctctaggtccttccagtaatctaagtatttaaagaaaattgagtgcttcttgaaaggcgacgcagtaccgttgtcaccatcagctttcttcctctttactgtcttcttctttccctttccatatacaaccttaatcttctttgttatctcatacacgtatgtaccacctcttgctactggggcagtgtcattctccactgtattatcgaacaatctagccatcttacggtacctatgtctttgtggtaggaaccgtcgatgtcgcatgtacactgtcttcaaagacgacgtcaggtatttgtatgaagttttctccagacatatcagacatccagtcttccctttaatctgcccagataatgaaaagtttgcaggtaggtcattgatggtaacgaatatgattgcacgtagattgaagtgctcccgcttaaactcatcccatagttgtaacccctctttccaaagctcctccatgtcctccatcaaaggctcaaggaaaacatctatgtcgattccaggttggtttggaccttgtatgaggatagtgagtagaatgtactttcgtttctgacatatccatgttggaagattatacattgtgagaaggactggccatgtgctgtgcgagctgcttaagtcaccaaacgggttcattccatcagtgctcaacgcaaaccttacattcctaggatccttagcaaattctgggtgttttgcatcaaatgtcttccactggcgagcgtcggcgggatgtcgaatcataccatctattttccggctctcttgatgccatctcatcaactcagcatcagtcgggtttgagtacagacgcttcaggcggtccttaattggtaggtaccacatcaccattgaaggaatcttcccgcgcttacccttatcagaatctggatcggtacactctgaatctacgggcccattccccgttttataccgacttgtgccacacgttgggcaacattccaattccgcatattctttacggtataatatgcagtgattcttacaagcatgaatcttttctacaccaagagataaaggacatatgagtttcttcgcttgatacgtgttcgatggtacaaagttaggcttaggaagcaacacacgcaacaaactcatcagatcattaaaacttgtgtccgaccatccatgtttagccttcaatctcagaagttcaagcactgaacgcaagactgtgaaatccttatcacatcccttcgtttcatcgtaaagaagatccttcgatgccttctctaatgcttgccaattctccaatcctcgtgacctgcccgctagcacctctggttcaacatggcgtagcatatcctctaaatcaaaaccaccatcgaaatcatcactatcggtggaaacatcgacaatcattctttcacgcgacatgtcttcgattataaaattctctgcctcattcatctcgaaacttaactcttcatcgtcatcttccggattggcgaattccccgtgataggtccaaaccttgtagttggcggtgaatccgtactccattatgtgacccaatatttcaccaggatctaccaacaatttctgattcttgcaatgacggcacggacaaaagatctttgtcatattctccctcaaagcatgctccttagcctgatcaataaatttagatgcttccttaataaatatcggctgcgttctccgcatctcatacatccatgacgaccgatccatctaattatataaaggcaaaaaagttacagataaaaaaatagaccgcaggtatttcatacaaaagtttaaatgcatttgtctcccaaaaaaaatacaacaatacatgtaactagtatgtacaattgattacatgcaaaatttgcccatcaaaacatatattttgaagctagattttgcaaaaaatagttggaacaaaccttgtcaaaatattaaaaaaactccactttccaccaacgaaatataacaaaaatggagccaaatgaagcaagatagagagttcttcacctttcgtatagagttcaagtaaaaatttcgagttgaaaacctccccccctaattggtgcttgctttaggagagagaaagcttcgttttcaaatggtcaagctcgggcctggaggagcatatatggcggatcatcgcatgcggctaatcaacccgccccggggggggcggtttttgcaggcgccgccacaagcggcccgcatggaacctaccgaccccctcgtacagaaaaacgatttttgtagtagtggcagttgcgggaggaccccggcggcggacgacagcggcagacacgctcgatttttgtggttttttttggatttttgttttcgcgtgcggtcgaaatatgcaccgcacatttttcgcgagtggatacgccacccacatggaaaaattggattttcgcagacccttccgagcagacaggccgaaggtccgcacacgaaaaccttttttggcccgtctagaaaaaatatttttctactgatcggatatcccctcgtatatatttttcttccaaattccaaccaaatactttaaaagataccatttgaaaaaaaaatgtcgtcgatatataatgggagaagggttacacgcatggtccatccgtcgatggagacgtacgtacgtaggaggacaggaagctagggcatcaccatcgctggccagctgccagctgcggcgcatcatgcatgatcaacatgcttggccttatatatttcctttgcattttcctcatggacacagtacactagtagtcattaagccgtgaaacaatacttatgcacgggataaatgctactccattatttgacgtacaggtacaaaagcaagacttcaagggcatgcccgatgattcccctaggatccctttttaaatcaactgagctgtgacatacatatgtaaagtaagagatttactaagaaaaaccaaaataactagatcatgtatgagatttggttttacacagcacataagacatcatgagagatgattggtgttaaatagctttagaaaaatgtcattactattcacgatatcagctgagtgccactgaaattttgcaaaattaaaaccgtgccattactgtcatattttccaccccttccatcttccttcttctccccatcaagcggtcgtctacaaagaggccaagccgtgagctccggtggagcgggcgaggctggcggcgccaaagcccatggagcgagagaggtcagaggccgaccagcgagctccgacgaaataggcgaggccgccagcgccaaagcctaaggagcgaggaaagtcaatgacagagaaggatggcgcggtgaggatggcgtcggggacggcggagcaacaagcgatgacggcaataactggcacccgtgaagatcacgaaggcagagcagcaagtgacgacaacggagaccaccatcacctctccaaccacagtaaggagtaggaggtgaagatggcagcagcgcctggattcggctgatgacggtggaggctagatgcggcctcctcgaagctagcacgaggagaaggtgattatgcgacgcttggatccagcctccccagagctcgtgcaaggaggaggtggtgaagatggcggtgatgtcggccggggagcacgcgcgcctgaatctggcctccctggagctcacacgaggaggaggaggtgaagagaatatgacggtgacgcttggatatggcttccctagagctcgtgcaaggagcaggtggtgcagatggcactggcaatgatgccggccagggagcacgcacgcctggattcggcctccccggagctcgcatgaggaggagttgaagatggtgacggcatcggccggtgagcgcaccagggcagtggggggaggagcagtaggcgtggcagccgttcatcgaggaccagcaggcatgaccgaactatagggaggagaagagacgaagagaaggcaggagaggagaagagaaggaagaaggaagaagtcggaaggatttaaaatgtgacggtgatggcacggtttcaattttgaaaaatttcagtggcatctaaccgatatcgcgaatagtaatgatatttatctattatattattataatagctttgaaaggaggtatcacgttcacttgggggctagaaatttccacattaatcagagaaaaatgaaagaagaatccaagtaggaatacaatttaaaaataattgaaatttggaattaaaaataagcaatattgaaagaagagtccatataagaacccaatacaagattaattaaaattcagaataaaaataaaataaaataagaaattagaaaaatgaaaaaagttaaagtagaaataaaatttaaaaataacttagatttggaatttaaaataagagtccagataataattaacccaatatgaaattaattaaaattcggaataaaaaaataactaaaatacgaaattagaaaaaaataacgaagagttcatgtacgaatataatttaaaaataacggtaattcagaattataaataaccaacattgaaagaagagtccatagaagaaaccaatacgagattaattagaattcagaataaaaaataaaataaaatctgaaattagaaaaattaaaagtagagttcaagtaggaataccattttgaaacaacataaagtggaaaagaaaataagaaatataaaaataatagtccgtataaaacacagtacgagatcaagtaaaattcgaaataaaaaacaaattgaaattagaaaaagaaaaataacattttaactaggaatacaatttataaataaataaattgctaatagaaaaataaagactattgaaagaagagaccatctagaacccacgatgagattaattaaaattctgaataaaaataaaaaaattcaaaaaatataaaaacaattataaaagttcaagtaggaatataatttataaaaaaaatatatcggaataaaaaatacaaaattttgaagaaaaatatttatttagaacacaacgatgccaaatgacaataaagatggaagaagcaacatgcctctaaaggagtagagtggtgacagatgacgtgacatctacaaactattaacaaaatcccaaatagaattccaataacgattaataggagggacggcggacagaccgttaagtagcacaatcacatcggttggcgggactttcaaaaggtaaaaaactaaccccaatgataatcgtatccagtattaaaatctcaatgacaataaataggggaggcagcggacgagcagtagagaagtacaattgcaaagccaatgatggtttggcgggacttctagaaagtaaaagatgaatccaaatgataattatgtttgatttttaaaatcctgatgacaataaagagatgaggcaacagacgagttgtagaggagtgcagtgttagtgtttggcgggacttccaagcaacatgcatgaaaaagattagagtggtgacggttgatggcacatctaaaaactattaacaaaaccataaataaaattctaatgatgattaaaaggagggatgacggataggccattaagcagcatggtctcagcggttggcgggacttctaaaaagtaaaaaataaaccccaatgatagtcatgttcaattttacaatctcaatgatagtaaaaagaggaggcaacgggtgagctgtagagaagtacagtggcaaatcagctgacggtttggcgggacatcaagaaagtaaaaattgaatccaaatgataattctgtttgatttttaaaatcctgatgacaataaagggaagaggtaatgggtgggctatggaggagtatagtggcagtgcttgatgagacttctatacgttataaaaattgaaacccaatgagacaataaactctaaaaactataaggttcatctttcaaaggttcgaaggagaatgaatagaagtagtggtagatcgagcaagcaaataaagatgaggtaacaaagaaggggcagcaacttgtgtgacttttaaaacctataaaattagaaacacgaggatgataaaggtttggtctttcatagtattaagacaaagagataaccatcccaaaagtgaaaacctcactcttgtggtaactgattttgaggccagccatctcttcaaagcagtacaagatgaattttgttgccacaatttcggttgtcatcattggcaatgaacaggactgtatcatcaacatattgaactccttcactcttggaagtgtcaaacattgcactaaggcaacactaacaagattagaaatgagagggaacaggggggtctccctatctaagacccaagtcctaaagaagtcagttctttccccattaatatttatgcaaactttccctcccatcacacaggttttaatccagctaatccacttgtttggaaagccccttctcaccattacctctatcagaaagtcgcagtttaccttgtcataagctttctcaaagtctattttcattataatccctttcagcttttgggttcacttttcatggagcacctcatgtattatcacacacccctccatgataaacgtcccaaggatgaaggcaatttgtgtagattttttaattagttaagataagataagatagatagataaagataaacataaagataaattttataatcgaacttatggcaaacatagaattccttttatttagcagggtggagggactggatatgtccatctcaacataagacataccatcatacatccatagtgctggtgacaacattttgagtttgcatcttgcagtgctacaatacgaaaccattctagtgatattattcgcaaatcatcgcaactacgcactagggagttatatatatccttgaattggagcctatagcttcctggaattaatgcagaagacgcaatgacctcgatcaaactaagcaccaacagacgcacatccatgcatgcacgcaacgcatggcccgtcataatggctcggcatagagattgtccggcagcctggtcttgacgatggggaggagagggatcttccgtggcgtggtgagcccgatgatctcctccatgctcagctcgccagcagccactccatcggggaggctccaggagaaggcgtgcagcaggttggcgagggtgagctggatgactttgagaccgaggctgtacccggggcacatctgccagccggagccaaatggcagcagctcgaagtcccaccccttgacgtcaatcccgctccccatgaactataagattgagctcaacacgaatgtcacccctgaccagcgaagatataatgtgcctacaacatctctagttgctgctatttggctagaaggggatgatccggtgagaacttttgataagcatgtgatggtgtgtgccaaaggagagaaacctactatatcaaagcataccatggttgcaatgacctattggcatatcctttatataaccctaacggcgaaaccagatggaatctcaaaatgccgtacgaaacacccaccaatattcctgacggtatggacattgatgcaccaagtgttgcaccaatgggtggtaacgtgcacttcagtgaagaaaacacttttgtcgagcctcctggtaagtacacacctagcttgtatgagaccttgtcaatgcctatatacttttattccattggaattaagtagatttcttgattttgttgcagagaatgatgacgttggtgatactttatacgatgaagacactaatgaggtggagaacaggtcatgcaagcgaagaaagatagatttgtcactgcaagagagtactattgctttaggctataggttaggaggggacttttcaacattattttatttggaggtcgtctctttcagcaatgggccgttgacatgtatgtaaagatagagtctatgcgccttgattggtattctaaccctaagaaccaaaacaagatacgagctgagctgtactaggtgaatgaaataaaattcatattcaataatattaaaccatatcccattcaaaaagcgatgcttacaatgtatgctcattttaccgatactaattttgtagggtgtagtcgatgtgatcaattctggagagacaaggggttcagagataggaacgaggattgtgctacctcggtcttttcctggtggcaatcgcgacatgcaacagcggtttcttaatgcaatggttcttgtccaacattttgggagaccagactacttcatcacgatgacctgtaatccaaactggaaggagataacagaaaatctttatcgtagccaacagccgcaagatcgaccggaccttgttgcaagggtatttagggccaagctacgatacatgttagacttgttcaccaagaaaaagtatttcagtgaggttcaggcatatgctcatgttactgagtttcagaagcggggcctcctacatgaacatatcctgttaaccatgaatccatgcagtaagttaacaaacccagatggttatgataaagttatctgtgcagagataccagataaggaaaaataccctgtgctacatcatctggtcataaagcatatgttgcacatcccgtgaggtgagctaaacaaaaagtgcgcctgcatggtggacagagagtgtcgcttcagctttcctcgaccgttctgtcaagcaacacaacaagggaaggacttgtatccttcatacaggaggagagatgatgggtggcgtgtaaaaattagaggtgcagtgttggacaataggtgggtggtcccatacaatcctggcttgctcatgaggtataattgccacatcaatgttgaagcttgcgccagcatcaaatctgtgaagtacctatataaatatgtataaaaaggccatgactgtgtgtcgttctcagtcgatccatctagagaaatcaacgagatacgccaatatagagatgccagatatgtttcaccgccagaggctatatataggattcttggttttccactattcggtatatatccgacggttttgcagctacaacttcatttgccaaacatgcaatatgtcacctatgatgattctggtaatcttgaggatgtcgtcaactaaccatctaataaaaagacaacacttacagaattttttgaaatgaatcgcaaagacccggaggcaagaaagttactgtacaaggagtttccggagcactatagatgggttgcagggaaaaatgtatggcagaaaagaaaaaccaagacttgccaggttggacagattgtgtatgcgcaccccgcggtgggagaaagatactatcttagggtgcatctgaaccatgttagaggtccaaccttgcatgagaatctaagaacagtatgtggaatcacttacttcacttgtagagaagcatgcgagaagagtgggcttgttgagacagacaggtcacatgacgactgcttgatcgaagcggcatctttccaaatgccatttgcactccgtcgcttgtttgcgattatacttgccttttgtgaggttactgataaatgtgctttgtgcgacaaacataaggagtcaatgtctgaagattatgcccgagataatcgcaacccgatgttagtagagcagatggtgcttagagacatacgggatatacttcatttcatgggaaaggatatctcagactatggtcttcctaagttgactgatataggtaatattttagaggagtgtgttctataatgttgaccttaattgtctttatttttatcatcaatgaattcgtgacgcatgttatgctttcgtcaaccagatgttttttccaatgacacaccgattgaagtcaaagaggagcagtctgtgccaatagacccagagcatctagatatatacaaatatctgaatgatgagcaacgtgcagggtttgatgacatcacacaacatgtattaagaagaagagctaggttttcttcgttcatggtccaggtggcactgggaaaacattcctttacaaggcacttcttgctagggtgcgatctgatgggttaatagccattgcaactacgacatctagtatcgcagcgtcaatattgcccggatgatgtactgctcactcgaggtttaaaatcccaatcaagcttgctcataatagcatgtgtaacttcacaaagcagagtggcaccgcagacctacttcgcagggcatctttgattatttgggatgaagctgaaatgacaaagcgtcaggcagttgagacccttattatggacatttattgccatttggaggaaaggtcattgatttggtggtgatttcagataagttcttcccgtggtgacatgtgggacaagggcacagataattgatgctgaattgtagagatcttatttatggaagaatataaggaagatatgcctttcgcgtaatatgagggcacaatctgacccttggttttcggattatctacttaggattggaaacgggactgaaaacacgatcgcagatgatgacgtccgtctgcctgatgaaattgtcattggttattcggacaatgaagattcagtgaacacattgattgaatatgtgttcccctcgcttgatgacgagagaaatacgacctccgtggaatatatgagcacacgggccatcctctcaacaaaaaatgatttcgtggataagctgaacacgaagatgattgataggtttcctggaaaggaaaagatttacctcagctttgattcagtcgatgatgatccccaaaatagctactctttggactttctgaacacgatcactccaaatggcctccctccacatgagcttaaagtgaaggtcaattgcccttggtcctaacaatggactatgcaacagaacaagactaatggtcaaggcaattcaagacaatgcaattgatgctgagattgttggtggacagcacgccaacaaaagggtattcatcccatgatcccactgtctccctctgatgacatatctcttcctttcaaatttaagaggaagcaattttcaatacgtctcagttttgcaataaccataaataaatcacaaggacaaaccatcccaaatgttgggatctatcttctagaacccgtattttcacaaggtcaattatacgtcgcattgtcaaggggtgtgtgttgatgcgaaaaacacacactcgcctggaagatctgcttaacttcagtgcaggtccaaaaatcttgcctttaggttcgtgagcgtgccagttgatttgatcctgcaaccaacaagaaataaagataggaaaatagcggttaaatccataaatgatagccgatcagccagtcgccgatgacgtatcatttatctttgagccgatgtcatatttgaatcgatcggcagttataaataggcaagaaagaactgcagatatcaatggtatataatactttcgtcgatatatacttaaatcaagtggttaggatagatcggtcgccatgccgagacagtataaatcacttagatcgaaatatatattaacaaggagattataagcaatcacagcatagccaatcagatagatctagcatgtatcgggtaatactccgataccactctatattaagatattaaagcaagcaaaatatatcaaacagaaagcttaatatacctaaatgcaacaagatcttaacataaagggcagatttaacatatcaatcaagcatgtaagatataaggtagttaaatcaggtaagaacggctgaaaccccgataaaaccctaatcggcaaccaaaaagcaggctagagattgagattctaatcatgacttataaggtcaaattcaactgatgcagctataagtatgaaaagaaggaaaatatctagacaatcaagccgttggatgtttcataggatggtggatatcctatataatctaagtcaatattggtatttaacctaatcggctaccttcaacgatagatgttagccgattgaaggttaaataacaatattgtcagagattatatacgatatatgataactcgacgaattacataaacaagattagagtgtcgtaaagatggaagcactaatcccgagaacgcatgccgccataacaagctttacctctagttgaagatcgaaaccgatgcagctcaacccgaaagcaagaactcgtcgaaaataaacaaaagtaaaagggtggcgatacgctgagattgtattgaatgtctgtttttttattacatgggttcgggctctatttatacccgtgatacaagatatgtccgtgccggacacgacatctatctctaacaaactctaaaataccgtaagtctttgcggcagacttttgtccaaacatatctccaaggaaattacatgaaatatcctaattaatagatacaattacctatccgagaactttatctccatcgcggcaatcctcgtgaagcaccttgatcgattctagaagcatcttcgaaatcatcatcatcggaatcggctgcaccacctctaccggctgtatcagctgtcctctgtccgatccatctcagctgacgcagactccagccgatgccttcgcagccgatgcatactctgttcttcgaatcaatctcgttatcgaatccgcttcgatcccaatgtcgaacctggtttataatttaccaaatttggttgtcaacagtgtgtcgtgacaaacaacaaggattttggctaagcctgagaaagaagttgaccctgcagggaagagcaccaagaatatcatctataaagacgttcttgactggtgagcaaaggtaggttcgcaagatcaaaattaatttgaaaacataatccagaagatagtaaattagtaatcagaatgttactcaccattgtcttcttgttttgtacagtacgccatcatctgccagatgtgttcccaactcctccagcaaaggaacacgatctcaatatactgggaaaatatttgaagccgagtagatatgaagaaaaaatatagacaaattttttgtatacattaatagatgcatgcttattaattttttgttctatatcttctgtatggttcatccatacaacttaaatgaatatatatttattttattcacggtataatataaatataggatgtatagaccgtataaaatatcaacaacgtgcaggcattataatgtcgcccatagatataaccatgcgcatgccactcacaaaaaaaggacgtgcatgagatgaataaatattttatatcaaaaccgttgagaaatgaaatgtgtcacaatgaaataaaaaactcacagttcattccattaaaaaatataggtgcatgataatttatataactacgtgtatctaaatgcattacactaatacgtataaaaaatatatctacaagtagtgatctgaaaatatagagaaaaaatattataaacgaaagtagaattattttctttttcttctgtctctcccacatgcttctaatgggaacatactctggctgggcggttgggctgaattcggtccggttggaaaaggttggaaaatgttgatgggctgaatcggcgttgttgaggctcgtgttgctggcgatggggtcaacgccagttaagggcgagcccgtcctctgtcgccttcccgtcgctcgcggaagcaacattaggatttttttagataatggatgtacacagcctcaacaaacttacaagactacatagactcacacccttacataagatttaacaccatctcaagcaactagacccgagcacttaggctctagcacttaggctctagcaacagcaattcttagaaagttaatacaaagtttcaaccataccatacaagaaaacaagagagtattagtctcccaatatttttcttaagttccaccccttcattgcgaaaaagccataaactcttttctctagaatcaagcaaccttctctcactttttggccatcttcctccttaagtagcaaagactattgtgcattaagataactagcgtgtatcgcaaatgagtgcgaaagcaacattagctacatgggtatacaatgagtgcgaaagcaacattagcacggaagcaacattagcaacattagtatacaatgagtgcgaaatcaacattcctagcggcgtacaagattttcttcagtgtatcgcaaatgcaaaacattaggatagttatttatctatggggtgtattctatatatgtaacaaatgctttattttgtgcccgcaacaaataatggaaaaactctatacttctttaacatattttatgcgtatattgcccttttatattgtatacttaagtgattatatataattaagtcttctagagttttactatgcccacgtaatatcatagtactgtactttacatgaaatatatttaacgtacgatatgaatttaattaaagttcaaatacacagatcatataaaaatattttttggaaacatgaaattttttttaaaaatgcagacaaatagaattgcaccgtagtgtttagcacgggtatattactagtacctccctaaatctgattttcaaagggcatgtacctaccgaattaaatttaaaaatatactattcatttatctttttcacataaatattgagaaagcaatttgtttggcaaaaatataccatcaatctcactagactattgagcgaaaatgatgacacaagtgatatagcgctgggacaggcgagaccgcgtggtctcgcagaacaggacaacaagactgatcggtctcgcatatcgaatcagcgacagcgaacgtccatttaattagggattaattaccctgattagtgaataatgaattgaatggaaacggccgtatgacatggactgtctagcagcctctccgtgcgacactgcacggtctcacgctgtgatagtgcgagaccgtccatgtggtcattttcacgtcacggttacgcgggatcaatagtatatttctattgaacaaattacattccgcatattcttgagaaaagatgaacaatatattttcaaatttaattcccgagtaaatcacattggatggacataaactcgttaggtgggtgcaatttaatatataaacttgtaaaacgcttgttttgttgcatggtcttatctaattcgtgcaaactaggaccaaaatgtcttagcaagattaattttaccaagttgatgttgattagtatgtgacgttcaaatatgcagtgagtgcataacacatgctatatttataaacttggtctctactttccttcatcattgaaataatgaatttcatatcttcctatccttgtatcatagctcgattttcatatgttcatcgacaatcactgcctcattctatcttttaattgaactaaatgtatgtttaaattgcaacctttctcagatttatatttacgtctagtatcctaatcagcacctaaattatcaagattaacaatgtaatgtcattttagccctagttcgcacacacttgataagttcgtgcaccaaaataagcgttctacaagttcatgcactagattacactcacctcacaagtttatatacccccaatgcaatttactcttaattccctacctaaccaaatatcttccccgaaggaaatgtgcttacctgatcctaatttccattcagcccctaggacaaatcattttctgatacttaaaatccatcgccaaaagtgtgaagcaccagcttcatttgcctggaacaccccactatctccaacatacctacttgtttctcaagatatctaagcataaactcttttccctagatatctaagcataagtttgttataatttagatgttaaaaaatgaagttgtttttgggcgaagagagtaagtatttagtggggataggaattaagttagcaatggattctcatcactaaggggacactactacacaaataattttcatgtataagcacctcaataagttgcagacagatcacaagtatccgcgtcaggaaaagtcgttctcctattttagctacgacttcttaagagacccacccgcgaaaatctttttcatagactgccctcttagggagcagtataaaaaatagagctatttttctagacgggcctcataagcggccgcacgaaaaaatatattttcacaagcgggccttttaatggcccgtccagaagcctgagttacctcctccgttcctctttaacatacacttcaatttttttcaacttatcccttctatctctccttatctcctctcctctgctcgtactcctaactctctcaaactctcctggtcgggaaagtggcggtggccggcatgagcgcggtaagcacatgggcgtcgatgttggcagtgcgacgccgtcccttttnnccccccccaaaaaccaattagatccaaaagcgggcggttggggctgtccccctcctggatccggtggcagtggcgggagatgaacggttgcggctacggcgtgaggagcccggcggcgggaggagcacaacggctgctgtggcgggaagagcccagtggcagaaggagcaaggcagcggcagcacccggcggcagtgtgtatcagccctccctccagaaccgcgcagcccagccctaccaacgggtgggcccacttacacatgccactccacttatatttttgtccttgcttcatgtaagaggttaacccgggagtgatatggttggagggaataggccttataagttggtttcacccttgctaaactaaaaatttggtacttaacatacgtacactgctctcatggaccatacaggccttatcctaaattggccgggatgtcacacacacacctcctcaaaggacccaacgtcctcgtcggtccaactcacccatatagccaaaaaggcataaaggcaaatgtctaggtacacaccccatcttagcgcatgtctatacatccagtgctggtgccatatgatatgccatttacctcacacaaagcccacatgcgccatgcgccatatgcccgcacaatgactcgtacgagggttggctgtgataccatttgtaatagccctccctccaggatcgtgtagcccagcccactcgacaggcagacctacttacactttcgtcctcgattcgtgtaaaagagttgacctgagagtgatatagatagagggaagaagccttataaattggtttcagctttgggccggaatgtcacacgcggcggcgtgaggagcccagtggcagcagcggcggacggcagcagcaggtggcagcagcgggaggcggattgcggcggcagttgcgggaggaccccggcggcggacgacagcggtagacacgctcgatttttgtggtttttttcggatttttgttttcgcgtgcggtcgaaatatgcaccgcacatttttcgcgagtggatacgccacccgcatggaaaaattggattttcgcagacccttccgagcagacaggccaaaggtccgtacacgaaaaccttttttggcccgtctagaaaaaatatgtttctactgatcggatgtccccttgtatatatttttcttccaaattcaaaccaaatactttaaaagataccatttgaaaaaaaaatgtcgtcgatatataatgggagaggggttacacgcatggtccatccgtcgatggagacgtacgtacgtaggaggacaggaagctagggcatcaccatcgctggccagctgccagctgcggcacatcatgcatgatcaacatgcttggccttatatatttcatttgcattttcctcatggacacagtacactagtagtcattaagccgtgaaacaatacttatgcacgggataaatgctactccattatttgacgtacaggtacaaaagcaagacttcaagggcatgcccgatgattcccctaggatccctttttaaatcaactgagctgtgacatacatatgatttgtgataatgtaaagtatgacggcgatgacacggtttcaattttgaaaaatttcaatggcatccagccaatatcgtgaatagtaatgatatttatcgattatatattattaaaacagctttgaatggaggtatcatgttctctgtggggctagaaatttccacattaatcgaagaaaaataaaagaaaaatccaagtaggaatacaattcaaaaataattgaaatttggaattaaaagtaagcaatattgaaagaagagttcatataagaacccaatacgagattaattaaaattcaaaataaaaataaaataaaatacaaaattagaaaaaagaaaaaagttaaagtagaaataaaatttaaaaataacttagattcggaatttaaaacaagagtccacataataacccaatacgagattatttaaaattcagaataaaaataaaataatataaaatacgaaattagaaaaaaaataaagaagagttcaagtacgaatacaatttaaaaataactgtaatttggaataaaaaatagaataaaatctgaaattagaaatataaaaaatagagttcaagtaggaataccattttgaaacaacagaaaccggagaagaaaataagaaatataaaaagaatagtccatatagaacacagtacgagatcaattaaaatctgaaataaaaaaaattctgaaattagaatatgaaaaataagattttaaataggaatacaatttatagataaataaattgctaatagaaaattaaagactattgaaagaagagaccatctagaacccatgacgagattagttaaaattctgaataaaaataaaataaattccaaaaatagaaaaacaatgataagagttcaactaggaatataatttataaaaaaaatatatcagaataaaaaatatggaattttggaaaaaaaatattcatttggaacacatatggaagtagcaacatacctctaaaggagtagagtggtgatggatgacgagatatcaaaaaactattaacaaaataactaatagaattccaataacgattaattggagggacgacggacagactgttaagcaatacgatctcatcggttggcaggacttccaaaaggtaaaaaattatccccgatgatagtcgcattcaattttaaaatctcaataacaataaataggggaggcagcggacgagccatggagaagtacaattgcaaagccgatgatggtttggcggaacttctagaaagtaaaagatgaatccaaatgataattatgtttgatttttaaattcctgatgacaataaagagatgaggcagtggatgggttgtagaggattatagtggtagcatttcacgggacttccaagcaacatgcctgaaaaagagtagagtggtaataattgatggcacatctaaaaactattaacaaaaccctaaataaaattgtaatgatagttaaaaggagggatgacggatagaccattaagcagcatggtctcggcggctggcgagacttctaaaaagtaaaaaataaaccccaacgatagtcatgttcaattttacaatctcagtgacaataaagagaggaggtagcgggcgagccgtagagaagtatagtggcaaagcagctgacggtttagcgagacatctagaaagtaaaaattgaacccaaacgataattctgttcgatttttaaaatcccgatgacaataaagggaagaggtagcgggtgggctttagagtagtatagtgacagtgtttgatgagacttctatgcattataaaaatgaaacccaatgagacaataaaccctaaaaacaataaggtccaacttttaaaggttccaaggagaatgaatagaagcagtggtaggtcgaacacgggaatgtaaaggtttggtctttcaaagtattaagacaacgagataaccatcccaaaagtgaaaacccggtaattgattttgaagccagccatctcttcaaagcagtacaagatgaattttgttgccacaattttggttgtcatcattggcaatgaagaggactgtatcatcaacatattgaactccttcactcctggaagtgccaatgcagaaggcatcactaacaaggttacaaatgagaggggagagacccaagtcctaaataagtcagttctttcccccattaatatttatgcaaactttccctcccatcacacatgttttaatccagctaatccacttgtttggaaaacccattctcaccattacctgtatcagaaagtcccagttcaccttgtcataagctttctcaaagtctattttcattataatccctttcagctttttggttctcttttcgtggagcacctcatgtattatcacacacccctccatgatgaacctcctagggataaaggcagtttatgtagattttttaattagttaacataagataagataagataagataagatagatagatagatagatagaatagatagataaagataaacataaagatagattttatcatcaaacttatggcaaacatagaatcccttttatttagcagggtggagggactggatatgtccgtcccaacataggacatactatcatacatccatagcgctggtgacaacattttaagcttgcatcttgcagtactacaatacgaaaccattctagtgctattattcgtaaatcatcgcaactatgcactagggagttatatatatccttgaaatggagcctatagcttccaggaattaatgcagaagacgcaatgacctcgatcaaactagacaccaacagacgtacatccatgcatgcaacgcatggcgcgtcattaaggctcggcatagagatggtctggcagcctgggcttgacgacggcgaggagagggatcttccgtggcatggtgagcccgaagatctcctccatgctcagctcgccggcggtgacgccgtcggggaggcaccaggagaaggcgtgcagcaggttggcgagggtgagctggatgaccttgagaccgaggttgtacccggggcacatcctccggcctgagctgaacggcaacagctcgaagtcgcgccccttgacgtcgataccgctccccacgaaccgctccggccggaactgctcaggcgagtcccacaccgacgggtcgcggccgatggtccacgtgttgacgagcacgcgcgtgccagcggggacgtcgtagccggcgacggaggcatcctcacgggacatccggggtaccagcagcggcaccaccgggtgcatacgcatcgtctccttcatgatggcgtggatgtaggggaggtgtggtatgtcaccctccgtcaccaagcggccgacgccgacgatggtgtctagctcctcggtggccttggcgaggatcgccggattcttcaggacctccgacatggcccattccacggtcaccgtactggtgtccgcaccaccagtgacaaggtcctgcgcaaggcatatgccaaatggtgcactgtatgaaaatgtcgtcctaatacttatatgaaaaaatagaataaaaattagacaatctaaatttactatatttatcagaaagaaaagtcaaattcgacatgcacatgaacaaaaaaaatatacctgtgaacacgactatgtttttttttcgtttcaattgtttttctacgcattagttgaatctatagaatccttatccagattagtagtgctgagatatatcgaaaaaattcaaatcgggcgcccgattgattcttaaaaaatttgacagccaagcgtttcagactttcagtttaccatggaaacatggagttataatggtgaaaaaatttcagccactaaaacatttaacttttttgtgaaaaacaatgcagacacgttgaaatatgatgctatcgcgtatgaaacattccatgttaacatattgaaacatatttttctattagaatataaacatgcgatatcttgttgtaaaaatttaattgcaaggaataaaatgttgggatcggatcgtagattagataactagtttagtagaaaaatcgttttgaatgtcactaaatgcatgcaagcgcttgcatggatggagcggagagagtacatacagttagctgcgtgaattttatttaacacagtgaacacacgttgagccatgtctctatcacgtatggaacattaagttctaatggtttcaaagacaagtttttcttttatcagaatataatttatgatatcttaaagatttaattacaacgaatacaacagagcgattggattatagatcggataagtaatttagaagaaaaaagtacttaaaagagagaagaaaggaaggagataaattagctagctgttgtctgttctgccagagagcgtccgattcttatcccgtgaatcgagtggccaattataagtattctcgagatatatcgtatcatgtattagattaacttattacaaaatagaagttacaaaatagaaggaatgcacaaaattttacttcccaagacataaaatggtgagaaaacctcgatatatatcaaattgaattacctgggtaatacccttgataccattcctggtaagctgaacgtcgaggttagggtcatcggcgagctgcaagagaatgtccaccatgtccctggccacaaagccatccccctgtagccgccgtcgctcgtcgtgctcgtcgaggacacggtccaggaaccggtgtatcaacctgttcacattcttcatcctcctgatgtacccctgcaggtccagccaatccagccatgggatgaagtcgccgatgttgagcacgccgttcatcaggaacagctcctccagcatccacttgaactcctccggcgtcgtcatcgccgctccgcctcctgccggctgcttctcgacgtacttctttccgagcaccatgcgcgagatcacgccgagcgccgccattgacaggtggtctctgagctgcacggcgttccccgccgcgccggagccgtgcagctcgcgcagcagcgcgcgcacctcctcgtggcggatgtgctcgagcgactcgagccgcctggcgctgaagagctcggcggcgcacatcttgcgcgcctggcgccagtaggcgccgtagggcgaccaggtgatgtcggtgcagtcgtaggcggtgtacttgccggcggcggtcctggggcggtcggcgaacaccgcgtcgttggtctggaggaagagcttggccatctcgacggaggagccgacgacgacggggcaggagccgaaccagagctgcacgatggggccatggcgcttggatatctcgtggatggagcggtgcggcagcgagctgatgaggttcaggttgccgatgatcggccatggctttggtcctggtggcagcttgtaagctcggcggcggcggagcagaacggcccggaggaggaagacgacggtggcaagcacgacggcaaagaaagtagcccatgatgattgtagttccattacttattggtgattgctgttaatgggtatatagatcgatgttaggcagcgcaatgaaaatataaaagggttagaagaaaacatatcacacaaacttcacgtgcacacttcgtgcacagttgcacaataactagcaaatgccacgaaaaattctataaaaaattgaatatttactcataatagtattacacatatatgcaaagtctcatattcaataattatgttttaaccgtaacaaaaaaattgaaaactttgacaggtaatagtaaaattctatcaggattatatcctttttaaggcaaaaatataatggattcgaaaataagatttcacatgtaggtgtaatattatttgaagtatgtttataatattatctaaattttttacgacatttgctagttggtgtgcacagagtttgcacggaaaacttgtgtgcatataatatattccttggttagaaagggttgtagtacctccgtcttaaaataacttcatttttcattgatttcacacactctaataaaaaacatatgccttttcacttaatcaaactccaatgtaaatgtccactttatctagccataatatatttgttcttaacctttatgaaatccaatacgtacaatagttgcttaaaatataagcttattttgatataatttactccctctgtcccgttttaagtgcagccatgatttttcgtgcccaactttgatcgtccgtcttatttaaaaaaattttgaaaaaaattaaaaacatatgtcatgcataaagtattatttataatttatcatctcataacaataaaaatactaattataaaaaaaatgtaaataagataagcatttaaagttggacacggaaactcctggtttcatttaaaatgagacggatggggtagatgctaaaaatggagttgttttgtgatggagagagtaagtatttagggggataggaattaagttggggatggattttaatccctaaggggatgtcccctcgtatatatttttcttccaaattccaaccaaatactttaaagaaaaccatttgaaaaaaaaaatgacgtcgatgtataatgggaaagggggtacacgcttggtccatccgtccatggagacgtacgtagggggacacgaagctagggcatcaccatcactggccagctgccagctgccagctgcatgcggcacatcctgaccaacatggcttggccttatatatttcccttgtgttttcctcatgtacacagtacattactagtcattaagccgtgaaacagtactttccattatttggcgtactggtagaaaaacaaggcttccatggcatgcccgatgattcccctatacgatccttttttaaatcaaggaaaaattgcatctattcccccactttaaaaaccaattgctgttttaccctcattttttagggattgtagttttaccctcacttttaaatctgaaccaaccgtctaccctcacttgtgataaccgtttggtaggtcccacgttttgtgttaaagaattgcaaaggaaataaaaaaaggttttagaaaataagaaattacctttgtaccctgagggaatggataaggcatgggtgagtctatcctcccaccccctacgtgcgcgcgaggcggcgagggcgaggcgatggccgcgggcgcgcgcgggcgggcgaggcggcggcggcagctgcggtcgcgcgcggaggcagcagccgcatcgcgtgcgggcaggtgaggcggcaagggcgcgcgggcgggcgaggcggcaagggccccgggtgggcgaggcggctgcgggcgcgcacggaggaggagtccgcgggagggcgaggcggcggctacggatgcgcggggtgggccaggcgctgcgggtgcgtgcggaggcggcggtgg

SEQ ID NO: 7173 - DNA, 12237 bp, Oryza sativa
aaggtggcggcgggtagaggagacaccgggggtccttttaaaggggctaggaggcggcggcgaaggcccacggcgaccggcgacgagaaggaaagttcgggaaaaacgaatccgaaacaaactcgaatccacgaatttccaaacgattttagccgatgtttccaaaggagaaaaggtagaggagatcgagaagatcatttcccctctattgattcggccggaaacggaaaggaacggctggatttggaaggaaacggcggcggcggcgcgctagggtttcgggcggcggtggcgcgaggtagacgatgggtccgacaggtgggacccacctgtcagcgacagcgagggcgcgcgcacggcggctgcggactgggtcggctgggccgaggagagaggaaggagttttgggccgactttcggcccaaagccaaaagaagacttttaaaacctttttcaatttaaattatttcttaaatgcaattccatttattaaaaatacttccttagctcaaataaatcccagaaaaatctaggaattatagaattaagcaaagtatttaatgaaattttatctggcccctttttatattggaatttattaattaaaattagatcttctcttcaagacttttaaaataaattctaaaaattccatttaaacaacaatttatatattttgaattttcaaggtgtgacaaacctaccccccttaaacagaatctcgtcctcgagattcggaagaactggcgaacagatgtggatgagctgacttcaattcatcttctcgttcccaagttgactcctcttccgagtgattactccattggactttgcaaaaacggataactcgattcctggttcttctctcattcgtttccaagatacggattggtttctcaacataggtcagatcctcttggacttctatctgttcaagattagcttcttcggtaggtacccttaaacacttcttcaattgcgacacatggaacacattatggactcctgccaaggattgaggtaattccaattgataagcaacctctcctcttctactgacaatcttataaggtcccacaaaacgcggtgccaattttcctttggtgtgaaaacgatgaacacctcgaagaggcgtgacacgaagatacacataatctccttcttcaaaactcaaatctctgcagcgattgtcggcataactcttatgtcgagactgagccactcgcaatctttcttgaatgattttcaccttttcttctgcttcccttaggatatccgtcccgaaaacctgacgttctcccgtttgatcccacaaaagcggagtgcggcacttccgaccatacagtgcttcgtaaggagccatctgtagactagcttgataactgttgttgtacgaaaattctgcataaggtagattcttatcccaacttccaccgaaatctaaagcacaagctctcaacatgtcttccaaaatctgattcaccctttcggtttgtccgtctgtctgcggatgataagcagtactaaagttcagcttagaacccatctcttcctgaagtttcttccaaaaatttgaagtaaactgactgcctcgatcagacactatcttcttagggacaccatgcaaacacacaatccttgccatatacaattccgccaatcgacttctagaataagttgtctttaccggaatgaaatgtgccactttggtaagtctgtcgactattacccaaatagagtcatggcctgatgacgttctgggcaaaccagtgataaaatccataccgatttcttcccatttccattcaggaatcttcaaaggctgcaacaaaccggcgggtttctgatgttctgccttgactcgctgacaaacatcacatactactacgtattctgcgatttcacgcttcatacttgcccaccaaaatctttccttgagatcctggtacatcttggtactaccagggtgaatggagtataaagtatcatgagcttcttgcagaattgcatcttttaaatctttgttgtcggggacacagattctctcacccaaccatacagttccttgctcatcttccaagaaaccaatagcttttcctcttctcatattcttcttgatttcttgaatatcaggatcattaatttgggcttctctaacttgatcaattagagtgggcttcgcttctagggctgcaacgcaacctctactgacaattcccaaatttaatctttcaaattccttgcataattccaacggcaactgtcgtccttccgtagcattgcaatagccttttctgctaagagcgtctgctacaacattagccttccccgggtgataatgaattcccatgtcataatccttaattaattccaaccatctcctttgtctcatgttcagatccggctgagtaaagatatacttcaaactcttgtgatcggtatatacctctgtacgagtaccgaaaagataatgacgccaaattttcaacgcatgaactactacggctaactcaatatcatgagtagggtagttcttctcatgcggacgtaactgacgagatgcataggcaaccaccttcccattttgcatcagaacacaacctaacccaagtttggatgcatcgcaatacacttggaaacccttctttggatcaggtaaaatcaaaataggagctgatattaagcgattcttcaactcttgaaaactccgctcacattcttctgaccacttgtacttcacatcctttcgaagtaatcgtgtcatgggcttagcaatcttggaaaaattctctataaaccttcgataatatcctgcaaggcctaagaaactgcgaatctctgaaactgtctttggttgcttccagttggttacggattccacattactaggatcgatggcaactcctcctgctgagatgacgtgaccaaggaacttcacttcagacaaccaaaattcacacttgctaaacttagcatacagttgatgttctcgtagcttctctagtgcaaggcaaagatgttcttcatgctcttctttggttcgagaatagataagaatatcatcaataaagaccaccacgaacttgtctaagtattccataaacaccttattcatcaagttcacgaagaaagcaggggcattggtaagtccaaaagacataacagtacatcgaacaacccatacctagtggtaaatgctgtcttaggtatatcttcctctttgattctcaactggtgataccctgatcgaagatctatcttggagaaaacagtagcacctttaagctgatcaaacaaatcatcaattctaggtagcggatacttattcttgatagtcacatcgtttagggctcgatagtccacacacatcctctgggtatgatctttcttttccacaaaaataaccggagctccccatggagatgaacttggtctgatgtatcctttctgaagcaaatcgtctacttgcctcttgacttctgccaactcattggctgccattctataaggtctcttatggatcggagttgttcctggtaccaaatctattctgaactctatatcccttttaggcggcataccaggtaaatcatctgggaacacatcggaatactcccggactacaggaatctcttccaaagttatttggttcagtcttgaccttaaagtctcagaagacaatgcatgaacagtcacaactcgaccatcattgctggtgagagttacttttctgttagcacagtctatcacacctttatatctggctaaccagtccatccctaagatgacatcaaggtctttggattctaacaagataagattggccagaaatggtattccttgaatttctattctgacagaggggctacgttgcaaagagagtgcttgattacttggggtactaaccatcaaaggacgtctaagatcttctacttccatcccatgatttcccgcaaaactcatagataagaatgaatgtgtagcaccagaatcgaaaagcactgttgcatgaactgagttaacaaggaacgtacccaaaatcacatctggagcatcttgagcttctgcagcagcaacatgattgacacgggccttcacgcgtcggggcttcggacacttatcagcataatgtcctgggtctccacagttgaaacacaccacggacttgctgccttgctccctcttggcaggttgttgctgtgttggagctgcaacagggcgtggagcttgattacggatattgttgccagcattgttgttgaagaactgacgctgcggacgaacaacagacgaagaacctccctgtggcatagactggggtcctaaagtaagacgcggcctctgattattcccctgttgtgtcttgaattgagcaatccggcgtttcttctgctccatgcgattgtatttgtcctcctgacgaatagccttatccaccaacttctggaaatcagcataatctccagtcatgagtgggtaagaaagctcatcattaagtccttccaagaacttctcctggcgctcttcatcattgcgcacatcttctggagcataacgagccagacgattgaactcgtgcaaatactccgtaacagagcgagatccctgggtgagcgacctgaattccttcttcttgagagacaccactcccgatggtatatgcgtcttccggaaagcagcggtgaattcaagccaagtgataggttcagcagtagtcctgttaaggcggaagtgatcccaccattcagaggcagggccatgcaactgatgtgatgcaaatgagaccttctcctgatcagtgcattgaagcaaatccaacttcttatctatggcatgcaaccaatcaccagcttcaacaggattagtggtgctagagaaaataggcggcctcacacgaagaaattctgctaacttattctgaggagatgcatggttatttccttgattctgaagttgctgcatcatcatattcataagctgagtctgttgagcaagaacttgagcaagagtgggattctctccattgttattgttactggggccattcccgttgctgcgagtgttcaccatcaggcatgggcagggcacaagaagagaaaccggggaaaactacttaggacagagaattactttaacttttattgatcttaactgagtttcattattacaaactgaagactctcacaccactaaactcaccaacttcctaacactcaaaagcaaacaaacgcatgcacttacatcccaccactgatgtaaatcacatgcgagccacacacaagcaaacttaaagcaagcaaactaacacaacgatctaagacaacgacttaacaagtcactctagttcttccgagcatcggaggtcgattgaaggctcgttcgactcgtcttcatcatcttgggttgctacccactcaatcttggaattgttgcgcttggattcttcttcttcatcatcacttatgatgataaccggaggatctgctaaagttggggcaacttctttctccaccacacgaatctttggcgccaattgatagcgagggacaaataaagctctcttccttgcggtaagacgaatcctggccttctgcggcggtgcttctcccttcaactcagctaattccttctccaaacgatccaccttgtcttctaacttgcaaatcttaccacgattccggtcttcacgatcttgagccgctaacacagtctccgcacgactttcatccatagcccacagcatctcaaccaaatgccttgtggtagcatcattctcaattccttcagtctcaaggtagctgccacggtcacttccctggggttggcgaggatggtagcgatactcagtgtcggccaactgatcactgtagcgatcacggagctctcctatggcgatccttgccacctcctgacatgcatggatgtagtttcttcctccagcttcgaacatcactgagggaatatcttcactattactgttcaaggtgactttgactcggcacttctcttcatgacgatcatgacgaatctgagcataaaaaggggcagtctcaaatccaatgacaaaggacatcgtacgcaactcctggacaaaaccatcgacaccaaacaagtactcaggcttgtagcgcggcatctaaagacaagtgaaaggagggagttaagacatttatccaattaatagcacaagtttttagattaatttgaatagagttagaaaatcaaagtaaaaaggtaagtaaataaagtaaaccaagctttgcatgataagttgaaacagttggaaacgaattttgtacttttgaacatcaggtttcaaaagaaagttataaaatcaacatgctaaatttattttattgcagcaagattaaataaaacaacattgtaaaacttttgctgataaatgagccattagtacagtaatagatttacagtactaataacactggaataaattttgaatgagaaccattaaaagagattatgaagtgcatgtgccattagtttggtttaattaaaagagaaagggaggagaacagttctacttttccaatatttttagagggcttctatgggtaaccatttggcataacctagggtcaagggggctctgataccaacttgtcacgcccggaatttctatccaaaattccaaacgcttacatgtatgtgaaccctcgtccagaaatcagccgaggcacacaataacaaattgataatagagtacaattattactctaattaataagcgaataaaatgtcattacagaggtagatagttcctctcaatcaataaaatctaagcagcggaaaataaattaaacggcgcagacgactccactccacaggcagcttgaccaaggctacacctaatcctccacaccatcagcctcattgtagaactcttcctctgatgaatgattgcaaggtgagtatatgacatactcagcaagtcacgcagcaaatatgcaagtgcacaaggataccaaaggatggcatagtagggtttcatttgcaaaagcagcatttagcaaacatttgagaattataaaacagttaagtgataattaaacaatattaatccaacactatacaacataccctgttgcataggcccaaccattctgaacaaccaccccggctgcacagttctatctccaaaccaggaatataccattccaaaccaggagctaatcaaattattaccagttaaagcaccttttattatgatgagaagggtgagactaatcacgaaagacattgttagacccgcccataaccgcgggcacggctattcgaatagttttactctgatcagaggtgtaccactgtacccacaagacacaaccccacatcttgtcaccatgtgcctcaataccaccacggtacctcggaaaggagttgtgacaataccccttgcataacacaatccaccgcagcgcacctttcctggatcataatcacccccttataaacaaggcatggactccccagcgacccccgtgggcttatctccgccacttctcagtctggtgccccgcaatgaaccatgctatacaaaaggtaaagccgttgcccatgctggcttgtggttggcacggttaatgtttcacaaccaaaactcgtgaactggtccttaattgtcatgagcacgaccatcaaaaccatgtgctcacaacccaccattatcaggttttagttggcaaataattaattaacaaatcacgattgaccatcgtgaactatcattaagccatcattaaataatagtgagtcataagttatcccaataatgtgctaatgtttctaagcagggctaagcaattatatctaatatctagctgaactaatataaataaagctcaactagtcaaattataataacccaaggtatcaaggaataagataatcaagaacaaaagggctataacaaacaataggttaattccacccaatgacattcgaaaataaatgcaatagttgaatagaaacaatagctttaaataggatcaacatgctcaaagggttgtttgggatctgtgtgacttgccttgctggccttggaactcttcaaactcttctccggcgaaaacggactctccggaaacgacggaatctaagcagaaaagagcaaaatcaccaaaacagcacataaacaatcatgaacagtacatgtggatatttttaatatgtagatctcaattttagaaaaatttagagacttgaaccaactaaatcggagctaagatgaactagttatgaatttttgaagattaaatcggattaaaacacttaaattgattttaattgaattatgacgcaataatgaattatttttgaaaaaggaaaaagggatttattgcgtcagcgggctagggtttcgcggtggaccgggcgcacggcggcggttcacgcgaacggacggccgagatcgacttgatccaaaacggacggccgagatcgatcggtccacgaccggctcacgggagagggcgacgatgacgtcagcgatgacatcaccaccggcggcggcggctcagcggctcggacggcgcacgctcgccggcgaacggcggcgtttcggcacgaacggaggacaccaacgggtagcggacggcacggcgaactcaccggcgaccaaagcgacggtggacgaccaacggacggcgacggtgacgaggttgaaacggcggcggtcttcggctcgacgacggcgacgatgctccggcggtctccgatggtggcgaagcggcggacgaggacggcgacgacttggcgaccacgacgacggtcttcccgagcgacggcgacgtctggaacggcggcggcgcacggctggagtgacggcggcgacggcggcgctagggcacacggcgctagagtgctacgggcgacgagaggcgaaggcgaaggtggcggcgggtagaggagacaccgggggtccttttaaaggggctaggaggcggcggcgaaggcccacggcgaccggcgacgagaaggaaagttcgggaaaaacgaatccgaaacaaactcgaatccacgaatttccaaacgattttagccgatgtttccaaaggagaaaaggtagaggagatcgagaagatcatttcccctctattgattcggccggaaacggaaaggaacggctggatttggaaggaaacggcggcggcggcgcgctagggtttcgggcggcggtggcgcgaggtagacgatgggtccgacaggtgggacccacctgtcagcgacagcgagggcgcgcgcgcggcggctgcggactgggccggctgggccgaggagagaggaaggagttttgggccgactttcggcccaaagccaaaagaagacttttaaaacctttttcaatttaaattatttcttaaatgaaattccatttattaaaaatacttccttagctcaaataaatcctagaaaaatctaggaattatagaattaagcaaagtatttattgaaattttatctggcccctttttatattggaatttattaattaaaattagatcttctcttcaagacttttaaaataaattctaaaaattccatttaaacaacaatttatatattttgaattttcagggtgtgacactgatcatgagaaagaactccaaacccctttgctatgcgagtaatcaaggaagtgcattctattggagcagtgaacttcacattttctaaccattgcctaatcatacattgcacaggaacaaccttgatctttctaactatggcacaaagaataatcaactcatcctccctaataggtctaagatctcctcaagggaacaaagtcatggcaatccatttatgcatgagcctaagtgtgggactataaatgtcattagttctgagtttcctgcaaattggtgcaccaaaaatatcttcccaaaatctgtttttctcaaaactggaaattatcttctgaaaatcagatctacagacatcatgaaaaccgagaagtgtacttaagcctctccttgtaagctcaaattctttacaaaaaaagacgaaaagaaattccatcttccacttcccgcaaggtataaagaaattgcaaagtaagcaaacgagagcctggctcatctaccacagcaaatttctaccaaccaacaactttccacacagttctaaaatcaacatccatacggatcataggcttggctatgagcaaatgtccggtccttgagcatccggtaggcttgtatttcccgatcaccaacgagctctaggtcggagtcactcaacaaacttggtgcggtgtctacatcctccattgcgatgtcggcggacgagtgagcattcaactcgtcttggtgacggctcaaatgagaaccagatccattcttgaacagacgggaaagtcgtatcttcatctctgcagaaatgagcaaagcacaaaaacagactcgagcgcgggttaaagctagcaagacttctacccgccaaatcttctcacctagataacttgtgtatgcaagagggaaatcaaaatgctagaactaaaatttaagacaatcttgaattagctcaaaatgaatttgggagcaaaagagagtttcagagagagtgaaagtgaattgaattgtgatgaactccctctcccggccaagccacttatataatgcacccataatggctacaactgtgaagtgggacccactagccattacctcccaaaagggggcagccgaccgttgcctggctggttcggccgaacccctggtgggccaagctggacccacattcagccgttggactccaacggtcacatgtgtggggggccacgctgatgatggccgaatactttattattttttcttagaaatttcattttgcaaatttatctcaaaattttaaatcctaatgtaaaactcccttgaaatttaaaacatgctttaatgcaaaaaatcaaaatgatgaaaaataaatatgggatacataccaatttacctattggcaagggcgacgtctttttgagtccgacgagcaagaccgtacctccaaaaaattcagatcattgattttccaccctactccggagctggtgtagtggatgtcgtctttttgacttgccacacctttttggtcttaggtgtgggtggcggctttctgggcgccggctttacaggctgcttgacctgcacaccagttttaactggtgtcttatttggacagggcctactcattgacgcttccttcactaggaagttcttcatgaacgcaatgaggttgtccgtctttggcggtttcacttcgaccactctgatgttttgtggattcggctcatacttgatcttgaccattgagcattgctccatcctcggcctgaacttgaatttcttctccttctcattgatgcaaaaccgaatgtttccggctcctacatcaacgctggcttcagcatttccttgtctgattccatgtcaagcaccacaaaatccactgggatgaagaaatcctagatctttgctggcacatcctcagcgattcccgctgggtagcagaccgacgagtcagccagctggagccgcatcggtgttggtaacaacaccgtgtagttcagcttgtcaaagacgtccttgggcatgacgcttacgcttgctcccaagtcgcagagggactggtcaaagtgttgtgtcccaatcgagcatgtgattgtgggacacctcggatatttcttcttctccgggagccggtctccatatcgtccgcggccggaccgcagccgcctccatgtcgtttgccgccgctgcacctcctcactactacaaatcacattttcccgtatggtcaaaatgcatctttctatgcggaggttttgtccgtctgtaaccaagggtctgcaaaaatgaatattttcgcatgcgggcaaaccaactgtacagaaaaatccatcttcatatgcagttagattaggtggaccgcacggaataatcaaatttttgcgtgcggtccggttatgtcacccgcacagaaaaatcaaataccaaaaaaaatcaaaaatcaaaaaacgaaaccctatccggccggctggcgcgcatgcacgcggagccggcggcgccgcctcatcttcgtcgctcgaggccgccaccggagcttcgcgggggagggcgattgagtcgccgccttcaccgtcgaccgcgccacgaccgcccggccgtcgatgagccattgccgttggccgggccccccgttggccggccgttgttgtgtgcggga

SEQ ID NO: 7174 - DNA, 18584 bp, Oryza sativa
gtcatgtcacttgccatgctggaaaaaaaagaactagagaagtaagtacattaaaaggaaaagagagggatcttgtcaaatgtcttgatattttcatgtgtaaccaatcaaaacaaaaaaaaaactctcaatgtcctgataggctgctaagccacatgttaaattgtaccaaaaaaaaagaaccagtgccaaattgaaacaaaatgtataattgtgaacctgtttgataccccttgcacgaaatcttaaaaaaatcaaacaagatgcaagttgtatcttgttgctaactcattttaatcagcactgaagaatttttagcaaaaaccagcttgcatgaaagttaacatcgacaaaaaaaataataataaaatgttttttgaagctctataactgcaaattaatgtgttgaaccaaaatttgattacagttacatatacttgataaaaatgtcaactacaacatcttggtattgcaaaaattgtgttaactattcgcatgattatagttgcacaaaattataattaaagttgtacaaatttaaaaccaaagttgcacaacatttaaaaatggcaactatagaaacatacggatgcaattgctataggacgatgaaaaaacttgttttagttagtaaataatagtactatgtataccatatttcaaagtgatacgactctattatatatttgtacaaactcagcttatctgcatataagtaaatgtcaaaaacaaacatctttgtgttgcgaaaaaaaatgtattaactattagcatgattatagttgcacaaaaatcataattaaagttgcacgaatcactaaccaaaaagttgtacaacattaaaaaatgacgactgtaggaacaggaaggtgcaatttttgcatataaaaaaagtaacaaaactggatggatatgacattattcaaccacccacatgtccaagctcagcagcaaatcaaaatcttagcagaaggaaatgtactttttttaccctgcagcaagctccacccccccccccccggggtagaatccaacgctccctgaaaacaaaaatcgtagtgagctactacatctgagcatacaatcagtctgaagttgtgcttgtttataaccaaaattaggaaaaaaatcgtatagtagtcagctaaaaaagaattagttgcacaatttaataattgaaattgcatatatttataacataacttgcacgaaatgtatagtattagttgattttgctatttggacaatgctactggtatgtagatggttcaagcgggaaaaacacagtacatgaaaaaaagagaggcacgcttgctgtcgtgtgttgatgagaaaaaaaaaagattcaacataaaaagtagtatgggttgcaaaaagcaaaaacaaatgaaaagttcgacataattactaagaaaacaagttgtctaccaaaaaaagtccccagttgtatgcatgttttcctaaaacacaaacgctatttatcaaagtaaacggaaaaattggctcaaaaaacattaaatgcacaaacttattacacgacttgcacgaaaaatcaaaatggctactacaatagtcagggagtgcaactagcatagataatctcaaaaaaacataatttcaaaaagattactctcctctctcaatgctctgctggtaatctcaaaaagattaaacataattgataggagcagagcctagagttcattttcagggaggcttatctcagattgatcactgatggaatggaagcaaaagtggcttagtatgtcacagttgagcagaactactgttaaaaaaaatacacagcacacaaaaacaaaagatagctttttctgtatacaagcacaaaaaaatctccctgtatagagtgaccactaaaatggactgattaactcaaaccctctatgcacaaaatggatctgacaatgctgagggacaaaaggtaagagcatttgtagggatttaatgaaaatattggttagttgttgagctcaaattgctaccaaatccctaaacccctctctaaaatgccacggcacagaggtcatcactggcctacaggataaaaacgactaaatctagagcaaaaccatgtgtgtgcctaacaaatgaagttagggagaaaaataattagggagaaaaaactaggcagaggcacagcccacctcccaccgactatatcataaacgatgtgcggtaaaaaccctaaaaaaaatttccccaactacaccaaacaaaacatcaaagcacacacatcatgtgggtttcagatctagggatgctttgctcgacattggtccccccatcccgccccctgctactcgtgccctgcaccaactacgccgcacacgggttgatctgttgggtcggatcgtgggttttgttggcgacaaaaaaaggcccacggtctccatgtcttttttaatttgaacaagtatatatattggttatatggaatattttgatttcacatgatgacttaattgttcaaaaatctgagtagtaaaaatatgtgtaaaattatcaagatgctgcaattgcatacaaatctatcgatttcttcatttgcaattatcaaaaagatattggaaaattgttgacctaacttgttctgaattgtgctcccaggtaatcatgaaacatgcagctgttgtctaacaaaaaaaatcataataacttcaaatttcaggagacgtgcaggagtctaaagttgccagatggctggagaatggcatggtaaataatccttaacatatgtttgacctccttaacatatgtttcatgaagaaaaaaaaattcagtaaaatgatttaagctaatatctatttgacctcctctagacatagcttggtgttaacgttactactcagatatatagtcttgtttaggttcacaactagtttcaggaaactgggtgttcaggtattaaatgacaaaaaatataatctgttgtgctgaattaatttttcctctagtctcaggagaggcactggcgtgtgggtttggcaaaaaagaaagctgaaaggagttgatattactcgaggtatttgagaaaaaaaactaaacaaaattatacttacatttgactgatatgaggcatttaatcttgcccctgcatattatctagattaacataaataatatgaattggcacacaaatatattgacctctgaatcttgtacctctgctatgtcaggttttaacaaagtacacatatctgaatatgagaactgtaccttgcagctacaaaacaaactgctacaaaattgcagctagagttcagacaaaattaactattgacaactatctctgtctccaatgacagaactgcttataactatttctaaaaaaaatgacaaaacctatttctctatacattatgtttcaagttgggagcaaaaaactgaagtaagcatgttattcctctaattccagctcggatggtctgtctgatgagtactccataatgagaatgacccaatggtaagcatgtttattcgcaaatttatgggctatatatatccagttattcttcataaatggggaaatgatttacatcaaaagaaaataattagtgagaaaatgaagttagggagaaaataattagtggcaaggtttagaaccaggcagaggtgcagcccacctcctgccgactatatcatacgcgatgtgcagtaaaaaccctaaaaaaattttccctaactacaccgaacaaaacttcaaagcacacacatcatgtggtttcagatccaggatgctttactcgacattgggcaaaatcaactcaaaaacatatacccagtaaactccaaagcatcaaggaatgaaaaaaaactccgcgggattccccccccccctcccttgaaatggtagccaatccagccctaaacaactcacaaaatccacatgatagaaaatctgaagctgaggggatcaggccgtcgcggtgtgagatttgaacaaaaaagagagaagaaaaaacctgaagtgcctcaactcaagcgcgctcgccttcgaaggcacactcgcggtgccttccccggcgccgtccgcggccgctcgcggtgcacagcccacctccctgtgccccccctccccccccgcctccccttccacctcctgccttggaagaatctccggcaccttccgctcgcaggactccgcctccccctgctcgagaaaaacacaaatgctatctactcgagaagcagaagcgctttctagatgagtcacgggtgcgggcggatttttccagagctatttgtgggctgtgggctgtaggctgtgggctgtgggctgcggactttgggcttattagcaagggaaagatgatggcgcgcacaaaatcaagacacataatcgacggtcgatgcgatcgactgatggattaaaatttgaatttggatctctaaactgggtctctaatcgggctctccaacttgaagtacgtccatcagcaaactaatcagacgaacatgccacgcgagaaggcattcaacctgatcaagccccgcgtgcatgtacttacggaacgtgaacgcttggacattatcgcgcgcggctgatcgttgttatttcctcgtaaaaaactttgaaagtgagacaaccttgaatgcgataatttcatgttcaactaatgccaatatttgtaggcaatacgattaatttctttgcttgtcaataatacatgtacatacatacacacacaagcgtacaacaaacaaaaggtgttacaatgcagctctgaaccctcatcgttcatgtccgtgcaacgaagtattgcactcatgctagccctagctttgtctctcctaccaactaccggcgatgtcgcaggctggcactgtcggcctccttgaaccaccggtgccggagtgcttgcgccaccgtcatcctcttctccgggttgcacgtcagaagtccactcaacacctcgaacccagcctccgacaatggcggccggcggagcatcctggcgtcggccggagatgggaagaagccacgaagaaagctgtccggcccgcatcctcccagcagccgctgccccttgtagcctcgccaccgcttgatgtcgttcacgccgaggacgtcgacgatctcgccgagctgctccctgtccgagctcccgcggaacagcggcttccgggcgaggagctccgccatgatgcagccgagcgaccacgcgtcgacgcgctcgtcgtagtccgtcgacccgaggaggatctccggcgcgcagtaccaccgcgtgccgatcgggttggagtagggcggcggtgaggcggtgctctgcgacaggccgaggtcgcagatcttgaggttgccgcgcgcgtcgacgaggacgttgtccggcttgaggtcccggtgcatgaggccggcgtcgtgcatcctcttggcgccggagagcagctgccgcatggcgacgcggacctcgagctccgaccgccgcgtcctcccgccccgctcgcgcctcaagacttgacgcagcgtcggccccacgaactccatgacgaggacggcctcgccatcgtcgcatcggccgtgcgcgcgaggctgcacgatgtaggggtggcccctgcacacctccatggcggcgacctcgcggtcgaagtcggagcggtcgacgagctccccgcagtcgtctcggtacgagcggatgcacttcatggcgacgatctcgccggagcggcagtcgcgcgcgcggtagacgacgccgcatcctcccgaggcgagctcgtcgagcttgacgaagcggcttgtggagattatggatatcccatatctacacggcgatggtatttgggctgaatacaggataccaaatatagatagaatatcttatttgtgtctcgggtttgtttctcaacttgtacatcaaggaaataccttgagacttagtcggctacgactgtattttatctgtatctgcctattccgttagggatatagattatcttttgtaacacggactccttcccatatataggggggtccgggtgcctctaggggcagaggttgattttctccaaatcatataatcaataagacactcggcggattcatccccggacaggaatagggtattacttcttcaataagaaggcctgaacctgtataaatcctttgtctccaaacccatacacttttccagcttgatagccacccccttttattattgccgaaatctagtttcgacagttggcgcgccaggtaggggtagcgtcaagcttttcgccgatcagtgcaatgggtttcgtctccggcatcgacgacctcgtcttcccatccgggcagacgtttcggttcggcagcctcgacttcgtcaccaacaacttcggcaagatctctctccttgactcggagtcaaaccagccgggagagaaccggatttcagtcccgtttggactcccaaacacggctgaaagttacttcaagaccatctcaaccgagtcggcttcaaaccactcgggcgagatcgcatcttctccaacgtcaccagatcaagatgatggggcttacccaccgatcctgatgaggctccccgacgatttggcggccatctccatcacgacagcgtctctatcccgtaggcctaggcggaagtcggcttcaacaccgatttcgcctagcttcagggaagtcggcgtcatcctccaaccactcggcacggtttcgacggatcagctggatggctactacagctctcccaccgtcgactcgcgccccaccgacaccgtggagtatgacgagtttagctctcgctacaacgacccggatctcgacgacttcgacggaagcctagatgacaactacacccctctctacttcggcgtcttcatggccgaaaacgagacggaggagcaacgccaagcccgggagaccgaagcacgtcgcgaaactgagcgtcgccgactggaggaggagcatcaagcacaaggacaagaacgactacggcgtgagcagcaggagcgtgagcggacagtgaaggaggctgaggatcgacggcagcgagctttggaagcagggcgccgagcgcgtgatctcatcggccaacaagatgttgaagggacaccggttttccgcacccctcagcagaacacggttgccgcgatcactctcctcgacaccgtcctcaaggaaaacgagctcaatcaatctaatcacgtcgtcaacatcttgaaccagacgaagaccatgattgcggcttcagtcccagttaactctgaaagcatccacacgccgactggcagccgggtcccacacttccgatctcatgattaccgtcatccaagcctcagcatcaccggcgcaggatccaatcgcaggagcaggggtcacgacgagcggtccgttcactcacctcccgaccatcatagggagcgccgagtggaacggcctcactcaccacctcatcgccgccccgtcgatcttcgcgacacaatcatacagcgccgagcagctcgaggccatcatcattcgccagaccgccacgacgacgaccttgacggagtaccagccttcactgacgacctgcgtcgagtggattggccagccggcttcaagccgactggaatagagaagtatgacggtaccactaacccagaatcgtggcttaccgtctacggtctcgcaatccgcgcagcaggaggagacagcaaagccatggcgaactatttaccagtggctttagcggattccgcccgatcttggctccatggattgacccgtggtacaattggatcttgggctgaattacgcgaccacttcatcgccaactttcaaggcaccttcgagcgtcccggcacacaatacgacctctacaacgttattcagaaatccggagaatcccttcgagattacatccgacgattttccgaacaacgtaacaagatctccgacatcaccgacgacgttatcatcgccgcattcaccaaagggattcgccacgaagaattggtcggcaagttcgggcgtaagcctcccaagacagtcaagcttatgttcgaaaaagccaacgagtatgccaaggccgaagacgccgtcaccgcatcaaagcagtcaggtcccagttggaagccaaacaagggtacgccggctaagggaggaggtggaagtaacaatcataaggaccgcaagcgtaagcctgaggaacttgttgcaaccgccactcactcttctcgacagcgttcgcgcgtcaacacgttcgacaagatcatgaactcccaatgcccgcaccatcctaactccaaccacgtggccaaagattgtttcgtctacaagcagtttgcggagcaatacaccaagactacacggaagaactccgacgaagaacaaagtacgtcgaggaagaaggacgacggcgacaccccggcaggatttcaagaccaccgtaaggagctcaaccatatctttggcggccccctggcttatgagtctaaaaggaagcaaaagttgactgaacgggagatcaacgctgttcagcccgacacgccccattatcttcgatggtcagaaattgcaatcaagtttgaccgctcggatcatcctgaccgagtggtccacccggggcggtaccccctggtactagacccagtggtccgtaacgtcaagcttcgcagaaccctcatcgacggcggcagtgcactcaatatcctcttcgccaagaccttggatgatatgcagattcctcgctccgagctaaaaccaagcaatgcgccttttcacggagtaattccaggattatccgcaactccactcggccagatcaccctcccggtcacttttggcactcgggaaaacttccgcacagagaatatcagctttgaagtcgccgatttcgagacagcataccatgccatactcggacgcccggcgttagccaagtttatggtacatcggaggaagacaagagtactcgggaagagcaggctcaggattctgaacataaaaccagttcgcatgccaccctttgtttgaagtcttgaaaggcattgagaagtacttctggctcagagtccccctcagctggaatccggccccgccgactacacatggcttactcttgtttggttgggggttgagaaagaagattcggcgaaacagagcaaagtggggtttaattcccaagaaggcttcacaaacatggatgaaattggcgatgtggactatggaatttggatttaggtgatgcaagctgattccatagaagcttaatatcccgcggaaaaattttgaggtcggaagagcgaagccgccatagaagaaatgggaaaagactacaacctcgtgtgtatcgggggacggaaaagcctcaccgcacgctggccgccacccgatgatctccttggcaggaagaacgccgtgcgccaccatctccttcaggttctcctccgtcacgtcggatggtgcccattggccttcaaagctttctttctcttccgccatcgattttacccgaatgcactgatttgattcgagggatggctagggagaggtgagggattgaggcggtggatcacgggaaggattttgatgaactttttgaaggtggattcgagtggaatggtgaaccctagtttgccggcgcagctctgtactgtagcagggagtggggaaaatggcgagagttccggcggggaagacgaagtgacgcttggatctcgggatttcttgttaagggtatcggaggtgcaaatgggcttaggcctgaacagtacctcagcccaatacttttgacagcgtggcccattgtgttccttagggacttaggcattttttttgctttggcaatttatgcgcacaatagtgttgcccaatgctgataaaatcctttttatgcggtcatataattctttggaattattgcaatgcaaattaaaaggtgcccgacagaaaggtgttatactgttttttgtcagctttattaggctacaaaagctgtttgggttaacttggaatgacttgtttttaccatagtcatttccttggtatgttatatgcctgctttctttatggtgaatagtcatagcctaggctattagacttattcattaccataatttttataatatttggtgggtaatctttagagtttttattcggatgcctgtcaagtgtgttcattcgtgaaccttttagagtgttaaccactcggattccttttattatggctaaaaagcagtcggctaaaatgcctctttaggcgccgcgtatgcttttgtcatatgacgcacgattgtgctattattttgttctcgactatatgtttagtttgttaactaatcacatagttgggggctacacctaattaggtgcatctattcgatgcaccatattctttgtcttttcgccctttacagtctttgtcttcgccactcggcaggccttggcatgagaagtttgaagcactcggatcattatctttgagaaggctatgatggttgactgcaaaggtcgtgggggctactgtggagattatggatatcccatatctacacggcgatggtatttggactgaatacaggataccaaatatagatagaatatcttatttgtgtctcgggtttgtttctcaacttgtacatcaaggaaataccttgagacttagtcggctacgactgtattttatctgtatctgcctattccgttagggatatagattatcttttgtaacacggactccttcccatatataaggggggtccgggtgcctctaggggcagaggttgattttctccaaatcatataatcaataagacactcggcggattcatccccggacaggaatagggtattacttcttcaataagaaggcctgaacctgtataaatcctttgtctccaaacccatacacttttccagcttgatagccacccccttttattattgccgaaatctagtttcgacacggctgatcacgacggaggaggccgtcgccatcgccatggccgccgagataggtagcctagctagggttttcttttccgtcctctttctttcgtggcactcgagtcgatatgacgcaaatgcaaacgggttcaggaggagagaggtagcaatctatttatggctggctgggctacgcacgtgcgtagcaacatgagtccgatgcggtctcgacgaagtagtcttggcgcgaagccgcgaacgcagtgatgctcgcatgcacacgtattcggactccgagttgaaatcaggggattgatatatttggtgacagagatatatatgttccatttcatgtgtaacgcagctaaacaaggtttttacacgtgtatgcatgcatccgtattccgtgcgtcggtgcgtgcaatttcgccgtggcctgtagataactagcgtgcgcgcgcgtgccaattcatttcacttcgggtttccgaatatgcggggacgcggccgctcgaccagctgtgcaaagggatgaaaacggtcggaatcggtagcatatctttgaaaacgatacttgatcggccggtaattgaccatatttatcatttaaactattgatcagtgtcgacattaatacgatgcagaaaaaaatagaaaaaaacaaaatttaaaaatagcaaaaaagggtacgtataggcggaaacggtaccccttacacggaaacaacgctcggtcgattgggaatttccatgactgtgtgagtcagcctgtgcatatgtagagagcggcgatcgcgccggcgccacttcctggcctccgcatttcgctctcaaccacggcaccaccacccgctcacgttccgccccgcctctcctaggccgggcccacttacatctggtagcttttataggtcatagactgccctcacagaccaacacaagtctttctgcaaactttgtcctcactcgtgcgcacccgggaagattttcccggtcggtcacccatccctaaattgctctaggcttgtcctcactcgtgcgcactcgggaagaatttcctggtcggtcacccatccctaaattgctccaggccaagtacgcttaacctcagagttctttagagatcggcttccagaaaagaagttgcaacttgttgatatgagtattctattaatcctattaagccctgggttaggatgtcacacctccgcttctatctggtagctatgtctcgtgctgccatggcgccatcatccccttgctccccagcccgtcccctccacgtctatctagcacctgcgccgcgcgacgccagggcgccactacgcccactcgcgctccacccgttcacgcccgccacctctgacctctgtgtcacacctccactgtgcgcgtcaccaccgtgccactaccgcctttgtgcagtcgagcgctatatacctgcacctgcgcgacctccatcccattcctgtgccgcaccacgccctgtcttgtccttcggtggctagcctctgctactctatcctccccttctccccatcgtctccatatctgaattgtaaagctttgccaaaagttcatgttaatttgttgagtaaactatatataccactggtccttcaagatgaggccaagtgtcacttaagtccacaattttataattcggcatttagatccatgatcttgtctaagtgaataatcgtgggtccaaagcccatttgacaagattgatttgcctacgtggctccattgtgaccgtatctttgcatttaacctcctctgcacccgatcgaccaacttctcaccaaatatcccctcttctttgttgtttaaatttagggtttcagcggcggcaataggggcggtagtggtgatgtgactaggacagcaacgacgagggaggcaggtagggcggcgccgacaagggtggtggttaggcggattcctgaagcatgccaataggggaagccaatcagccatggctactttaagcaacgggtcttttcaagtgcatagaggaaaaggatcaatctcccgttgattatgtgcccttgttgccttgcaaaacacatctccaaacactgcggaagcgcggacagcccacaatcatcatcgcagcccttggaatcattgcaatcatgcgggggtggatggttgagtgttcgacagagcgtgggagcagtggccacaggtagaggggatatttggaggagaagtgggtgactaggcatgaaagggactaagtaaaatttgtggtcacactagacagccacgtaagccggtgaacccgatcagacgggctttggacttatgatggttcactaaaacatgatcatggacatagaggttgaatttacaagattattaacctaagtaacatcatgccctaactttatgaatcggcggtgtattttactctaattttttagagggggatactaccaagccttgtctcgtagtgtaactttataactacaaataaaacagagttttacatagcaaatacaaaagaaaactaataagcaattacaaatgttgtaatcaatcagcaacttcctacacatacataggagaacatcattccgaaaagcaaaccaccagctatcaaaaatggagtaatattttcaaaactcttcccattttttcttccaaatgtgccaataggctatgaagaaaacataaaagaacccttttcgcttgaaccgaagtattgctaaatccactattttaaaaaaaaattgaaacggatattccaagggatacccaacttctttcagcaccttttactgaaaggacggcttgtttggctgcaaggtacaacactgccatacaactgaaccacaacctattgatcatttgtttgctgcatggtgtaatacccggctggctgtatggcaacactgcactaggcagccgaacaaagccaaaggaaatacagatgcaagagagtttccctttattgtgtagagcaaagaacacaggttaagttagcgtgaagagaggtacaattctttctatcgaacatgtcccttatgttaagacggtctcgaaacaggagctagatgaaggttttgattttcatcccacactcagttttctataaccacaagtttctcttaattcactatcttatatcttacatttgtttgcaaatttctgcaagtcacattaattcacgtttgtgtggaagtttctgttgatatttctcgcccttctgtttgtctctttttttttttttttgctgccatcgcatctgaaactagaccgggtcaacccaccataagagcaccatatatgagttagactatgagtagggttagactaatgtgtgggtcgggttgactgatagcttgcagttttctgcccgattcaactgcacccctaaatataatgacagagccagaaagatttttaaaaccgagtaaaacttaactgtatctagtatttcttacagagattctatggttatttcagttgctaaaaattcgttggaacgtatgatggtcaacctgggcaagtagctgcctgtggtagccggacagtggtcagtggctctgcctcaggtttggctaagctcatattttgtcggcccactactcaatgcatacgaaccatggcatctgggcctaaggcctggagggacatccttaccattttccgatttacgtacattttgctgtgcaaaagacttactccgtaactaccaccattgcagccatgagccgtggcagctaaaccaaagcatgcagtgacgctgaactaggttggaacatggagaccgagtcttatccataattaatatcctgtagcatcttgttcatcctacacaagctaattttcttgagggtaattaagtctgattagccctctaaacttttgcagacgtttgaattacctcatctattcctataccagatattaacatccaaactattgaaacaagacgaaatatatctctctaacacaatcaacgtacagtagtttttgagcctagaaaagtcaacaaatcagtaaaaaaaaatttaaaaaatcttaatctctctctctttcttactctatcgggcagcaggcccatcgatatctagaaagacgaaatgagatttttttttacggtgtttgatctaatggtccacaataaaaggtatcacttaaaaagatatttaagtattgatataggtacttaggtagtaagggtaaaatgataatttttctaagaaatagagaagggcataattatcttcgtattagttctaagtacataagtgccgcatcggtaccttatctccagtatgcctgatgattctccatacattatttacatgttgtcttttcagatttacattcttttcctaagaacatgatcaccggtaatcctccattccgatatttacgtgtttttttaatttaccttttctccctaagaacatgatcatgatatttttaaggttgatgtcatgttcctaataataccatcagataaaatatgactgaatgtttgcgtgattattttaagatttatattttatcacaagaaacatacaacctcggtaaatcaccggttgtaggttcaaatgtaattcatcgtcaatatgctatatttacatggtttgttcaactttgcatattctctccgaatgaacatgaacatagatactataaattcaaagtacaatcttaaaacaaaaaaaaatcaaagtacaacatatgatagtaagtgaagaaggaaatggatcagatatgttttttttttatcatgcagccatgttgtttggggcgaaaaaatgtgtctttttttattattgtgttgatcagagtgcaatcgctacaattgaggaaattcttttaaaaagtatttttctctttaattgtacggtaatcaacaacgttaattactgagatcctgatcctgttctcgcatgctagaaattaggggctaatttggttattattgtttccaacttaatcatcatgcatgcatgtatgcatgctaaaatttaggagctaatttgactgctatgtacgctactttatatagaaacacgcatgtccacttaattttaaatttgtgatgcatgaaaccacacaaaaatacatattcaaatattataaaataataaaatttatttcgaagacaaaatgtatgggaagatttatattttctccactgaacgatacaaaatgtattggagacaaaatgcctcggaagattgacatatttttctactaaacaataccgatcaattcaatttcagccaggtatttgagtaacccaaaatgccaatattttactagataattacttcactgccatcggttacgataacttttattccgtaacttacccttctcttgatcaacggttcatattgatctacctctcaatacctctagatacctcgcaaacactgtaaaagctctcaaagagtaataacagggacagcatacggcagccatgagaaggaggaggacccatcggccacccgcctgctacaacttccttcgctctacggcagtacgccgtacgcatatcggcgcgtcggctctcctccgccttcgcggcggtgttcgtgagagtggaggtgtgcaggcgacgatgcctccgatgcgacggccgaaaattcacggtggcgtacgtcgagttgtgacagcggacggcaatgagggcaggcgcgtggtcctagcagggaaatgtcaccggcggcccgacaccatgaggaaaagagagtgatgtggcctccgtgctccgtgcttcatgccaaattggatctgaccggatgggagctaagctccatgcactcccgtggtggccggggtgcaggcgcggcagtgtttgggcagccaggatgagttatgactctgcatcggtctctcagccatcgtctccgctgatgatgattgttcaattcctcttcgattcccctctcccagcgaaggcgccagcgctttctcccccgaccctctcccaagcacaccactgccagactcgagacacccaccattgagacgtaagtaggtcaaaccacaaattagtgagtaacacacaaattgatcgatctgtggttatctactaatttgatctataagtgtgttcacggattgacccacttacacttctagatacagcaagccaagccacgatatatgaacccgttggttttacccacttatatattttacttataagtgccttcacgggtcagtccacttacacaaccagggttgtgggatccaatagcaaaaataatctggcctacactaaaatggatgtattttggatagatatttcggacgaattttaatcaaatatgaacaaaatttgaatcaaatggagatgaatttaggggataatattgtctcggacctcaccgagatgggcaaatttcaccaaaattcggatctttcggtccgaatcccagaaccctgatccctatttccccattgggctctagcctcaagcccttaccgtcgtcaacactgaagagagcagggaagtggggtgaagaatgacgagagagaaagacatatgcagctagctattttttttaaaaaaaaattgatggctcattctagcacatgggaccaaaaccaccttataaacagcccggcgtagattaagggtgaaagatcgatctgtgaggtcgtcacacctatcttacgccgccgttgatcgcttgccaatggagaagaatagccgatttggtgctgcgggcggacatggcaactctgctgctcgtgggttccatcctgctgcgggcggtcatggcaactctgctcgtgggttccatcctagttttggcggcgggagtcagcaaggtggtagggaccgaggttgaggaaggggagggttcggcggtcgaggtcgccatgatcatcctcaaggtcctcaaggtggaagatggtttggcagtgggcatggttggaacaatgggttcgggatgaatgcaggtccgaacgtcggcaatttcagtggtggtggtcagattggtttcaatcctaacttagggtttcagccacagtttggtgcttccggtagccatggtggtaatccagttggcccttttctgccatcaggtgagcctgtgaccaggggttcatctgtagttggtggcgcattccctgtgggtggcggtgctgctttggctggtgtgtctgtccctgtgccggctggtgctggttgtggtgtacatgcgcaagctggtgctgcatatcctgtgggtggcggcggaggttctggtgctgttcttggtggagatgcggtgcctggtggagctgctttttcagttgctgttgcttccttgccgaaggtcgggggagttcagcctagtggctcagctaatgccgcatcaggtggtgcaatcgctcaggtaactggtggttctggtggtatgtaggggcaaggtgttgccggatcagctaaaggcaagattggtatggatgcttcggtaggtgggtgtattgctcaagtttcagatagtactgtcaagggtgtagctactttgggtgatggtaagggctctactgctgttgcttttggtgcagaaggtagtgtactctcccagatgccaggtgatttgtataacagaggaaaagctaaggttgataacaaagggttaggtaaaccatattgtttcaggtgttacactaaagggcatacaatgcaagaatgttcttccaagttatactgtgaaatttgtgaatga

SEQ ID NO: 7175 - DNA, 5846 bp, Oryza sativa
cggcgagggggcatggaattttgcaggcggcccccttgccgccctccgcaagggcgattttgtactgtgctctatatttttgtataaatatcaatagttatcaaatctttttatattgaaaactatacaagattaaaatctccaagactggtaaaatacaattttattattttttagggcatatttggattgttaccgtacaaatattttattaatttttagggcatatttggattgttagtgccaaatttttcttcacgaccaaatatttggtaaggtaaaattgcatttgatcatatttggtttgctgccaaaatgtaaaattgtagtgaagaatgttctaaataatctcaaatctagattacgtattaccaatgaataggcttccattttcgtgtgttgtgtgctagtgggaaagaagatatgaagaggttgccttcagattgtcaattatatagcgtcgttttcactgcaatatatgtgaactcaatgagatacattattcattagatgtgacaagacgatcacgcgtgggcgtgattcactttatgtaaacaggcagcgccgaaagttgatagtgataactcgagctgccgcttttcatgtgtgctgttgtagactgtgcgcgctactggatctgacactaccgtgcagcgccgaaagtgtgttgtcatgagcataagttgttctagcaccatatgaatgaaaagaactatgtagacgagacaaacacaagtagtactgcagtagtaatagcaaaagtagtactactttacaagtttgtaagccaaaagaaacggtcacataaggactgaagaggtagaacactactgacgaggcctcttacccctatccctcctaccctgcgccctaatgtgcccgtgggagtacgtgagtcggtccgggggtacggcacggccaacccgtcctgcctgtacagatcaacaccatctggaccaaatctaatatttccttcaccgtgaactatctgaaatgtgaccttacttgacattgtgcctgatgaaaacaataactgcgttaacctcgcatttctgtactacgccctaagttacattctctacaatattgttctctaaatttctaaaattacgttacattctccagatcaaactaaactacatcttacaattaacactactgtctatgtctcaattcatactattatattctatgctctggatctacacatatgtgctgtgtgctacaaatgtgctaaaatatatggaactaaaactaaaacgcaacatatatactcaaacataacatattagtacaaatgcaaaagatgtatgggagcatacctgtgatgaattgagcgaaccagcagggcttcgccgctccccttctgctgccctcccctctctctcttttgttttttttggatttttagtgaatataatgaaatttcacagaggagggactgggctttatagggggagaggcaaaaatcgccctcccccagggcggcaagggggccgcctgcaaaattccatgccccctcgccgcccatttgcaggcggcccccccacagtacaaaatcgccctagcggagggcggcaagggggccgcctgcaaaattccatgccccccctcgccgccaatttgcaggcggccccccgcacagtataaaatcgccctagcggagggcggcaagggggccgcctgcaaatttcgttgacggccgtcgcccgagagcgaacggccgtctgccacgtcattttcgccgccctctgagagggcgatttttaaaaatcgccctcccagagggcggtaggcgactccttccgtcaattttcaaaatggaaaattatttttgtaaaacttttaataaaaaaaattataaataaaaaaaattcgtaaacgttgtaccgtgcggtagaccggtagttgatcctcgtttgtatttacaatgcacattatttttttcgtttgtaatcgtgaattgatctgagaataatcatgtccgaaaaaaaaaaacaaagggagttcgtagttgaaagaacctcgcgtgtggttattagcgatcaagtcaaatatcctctgttgtgcaaggttatcaaagatgtttagatgtgggtaccagagtcacaattatcagagtatttagcgacagatcacagacagatcatagtacaaccgtgtacactgcaactgcaatttggcagcgcatgatcaatcaatgtacattcttgattcttctcagagtctcatccatgtgtgcctactgtcaccacgcctcctcaccttcactctgaagattgttacaccgagcgatataaaaaaaaacgaaattaactgcctacaggctacagctattggtagaagagaagcgcatagaagagctggttccacgtgtccggcaggccggggaggcaccagtggctgcagtccgccgagccgccgccggggttggcgcgctgcgccggcgagaggtcgccgctgtacaccgacgggtgcgcgtccttgcgcagcgccgacagcgccgagatgtcgaggaggcgaacggggctcttcatcgaccgcagcgtggcctgtatcacctggtcctgccccgacgtcgcctgcgccgtcgtcgcgttcagccccgccgccgccgccgccgccggggccgtctcgccgtagcagttcttcgacaccgggttggcccactccttcgagctggtcgatcgatccagcggcccacggcacagatcagaacaaaattagatcgcgttgtcagaaaagagagtgaaatacaatacaccattgccacatagtacgagtgtactactgtacacgtgcacgcacatggtaaggtgtctagtgtactgtgtacactgtagagagagatggggtgatggaatcatgaggttgagatgagaatatgagattggctcttgtgagatttacctgtagtgtgtgggggacatggactggtagaagacacgggtcttggctggatcgacgttggcgtccacccagttggcccaggttgccatcccgcgctggaacgccaccatccggtccatgtcctcgtagtaccgcccgtccgcgcccatgtaatcccacctgcatacgtgaagtgaaacgaagctgaagaggaaatctggcgggtgcgtgtggaaaagggcgcgtatcacgacgtttacaataccgtctaactagattcaaaacgatcagaaacgatttgataccgatactgtaatttttgttggaccggagtaaatatcttacaatacatacccctggagcgtgccggtgtgcgtccaccagtggccggagttgaaggagagcacgtcggcgccgcgccacgcctcgccgttcccggagatgtcgtccagccatagcaccttcttcccctgagccacgccgatgtccaccaggtacggcgcgcggtagaacgataccaccaaaccgtactcctgctcgtatacatacgtacgtacgtacgtacttaccatgagtacatctatatgacatttgcagtaagatcatgcaagtgcaatagggaaattaaatacgtacgtaccaggaacttgtacgtgtagagagggtcgacggagacgagctgcgccggcgactgcggcgccgcggcgtgcagcaggcagatgagcgactcccactggttccggcccagcgagtcgccgacgaacatcaccgtcttccccttcatccgcgtcaagaagtccgcgccatcaaacctatagcaaaatcgcgcgtcgatcgctgcagctaattcgcgctctagtcgtataatatgcgttacctgggtagctcgcagccggccggcttccaccggtaccggaggtagtcggagtccggccggccgtacagctggcagttgaactccgcgtcgatgaccgggcagttgtacccggtgtacgccgccgcgccgccgccgccgtcgtcgcggacccagctgccgctgaagacgtcgcagctcacggcggcgtctttccggtggcggcgcgctagcccgaaggagagcgccgaggccggcagcgagaaggcgtgaaggaggaggaggaagacgatggatgtagacacggcgacggcaagaaagccggcgccgtgcttgcagaagagcggcatcgatggcgatgagaattggaggaaaggggaggcgaagccggcctttcccccggccgctttataccgccgtacgctgacgattatgaatcgatcacgagaccagcttagccaagattaatcgtcctacaattcctgctgtcgcaagcaagagaaaaggcaatatagctgccctaattattttgctgtgcgatccaagcaaggaagcgattaaccgattagcagcagctcgtggagaagaatattatcaccaaaccgatggattgattttttttttatcagcgcacggggcagttcacgtgaggggttttgcagatcatctttgtactagttcgcgtagctaagattggaacctgagcctcatatatttggattcgttgccttcgcggctttgccccatggtgcacgtagacggtagacgtacagggaaaaggtttggttttggaattcgtgttcgcatcaatatggaatctgtggaattcgccgggtacgtttatgtttgcagtttgcacgtagcgtagtgtcctagtccgtctcagaggcagcaaacctggggtgacaaaaatggcgcggcagaagtgaagtgtgcgtcaagacaaaacgattggctggagccttggatgtacatggagcttgtccatgtcgttaggcccagttcctgccttggccatcggtagtatatcatgttggatgtcggatcgggcaaaaattcagaagcagcggcggataaagagaacctgtgtgtgtgtggtatatttagcagaacagagtgtctgctagcaaggttgcaggagtaattaaccacggtgattcgtcccctgaacaacgtgacttgattctcccgttcctgtgctctttagatataggagaataaagtgtggagaatatatcttcttgggcgacgctccggtgctttctacttgtagtatatactacaagtagaaataatccaaaccgtcgatttccaagggcatattagtactatgttaggactacagttaggggtaaacttggtattaggaaaatattcgtgatttttattacgtttcaatcttgtatcgcatcgatccttcgctaactttagcactattgccgttgttgccctatttcggtagctctcagccggcgttcatcactgtcgcaacgctctgcttcgctcatgtctgcaggcaatttgtttggtaaatttctcacatggtaaatccttctagtattttggtgcgactccttgatggtattttcgtgaacgaaaatcttctagacttttttctagggaaaattttgctacatgacacttgttatgtgtgattttagcactaagacactgcccaaacttatttttgggggaaaacactccataaacgtggtaatttgccagtgaacaccgcgccgattaaaataatactttccggttggggaggagagagaaaccgcgtgaaatgtcaaaaatgcccttgggcccacatgtcagctctatctcctatctctctcttttctctcacaaatggcgaggacggtggctggcggtggcggtggacgagcgtgcggccgctggagccacccctcgccgtgcccgtgcccgcagcagaaaggggcgtcaccgccacagcgggggagggggacgcgatgtagagccggcgagtttcggggaggacgacgtgaagccaagcgagcacgaggcaggggaaggaacgacgagtgggaggtgggccggctacggagaagaagctcgttggcggccgcgcgagcaagatgca

SEQ ID NO: 7176 - DNA, 5960 bp, Oryza sativa
  unsure (1)..(5960): unsure at all n locations
ctgaagagcaacttaaacattctaagcatgtatactgaacttcagttagtttctttagtcttgcaaaaatattctcagtaaaaaaagacttgtaaaaattgccataagttttttggatgcaaaacttttaaatatattaatagtagtataattataggtaactatattgtaactatactatattacattataagttttatataatttatatggaaaacatacgtaacttttatataacttgtattgtactataactataattcatatataagttataatatagctacaatacatttacactatagttataatatacatatatcgtatagttacattaaaatcatactataatcatactatagttaattatattatttgaaagttttttactttaaaaacttgctacggctctttagcaattccaaaaataactctatatatctaaggctaacatgaaaaaacaaataattgatcgacacgtacttgatcgaggccatggccaattgagagttccttatgaaaagaagttaaaaatccaaaggctagctagcttgcttgtgatctagcggaaatgagaactaactgtgatggcgatgggctgccaacaaataaaaatatatttttttagaaagagagtgcatggatccaagaataatactggtgcagtaggataggcatgtgtatcacgtacatatgctgtatgcccaagcctaggaccagggctagggaagtagacgaatttaagcccggccggccggttgttatcgccgcgtacgggagtttacttgcatgattgagtgctcaagtcaagacaatctagtcctaattaagcttgcattggcctatgagatgaatggcttctggtctctgaaaacctcatcaaacgtctatcattctggccgtggctatgattgcagctagctaccgttctctcgatagataatacggacgatcgacgcatctagcaatgactctgaaatccaggtacttaccatctgcaaaggatctgttatgcgctgcttgtgctaagtcacccaatcgttccccacaacattctcaatggcaactgctcaggtagtgatgagtttcacgcgctctaagcccggcccgcgcacagttaggaggattggccgctatctgagcggtttaaagccaaggagcaagaaaacggatgcgccccgagtaatcgacccgtttcccaagcagagtttcgcgaaacctcccctcgatgtgatagcatcgtcctttgtaacgatcaagactggtaagtccattagtccaaacagttgtccatgtaccagtagaagattcggcagctactgcagcccctgcttcaccttcatatttttcgtggtctatatcatgcgagttatagcagtcctaggaaatggttggttttagaatacacgaaagtgacgaagttgctttgactactgaaccatgcctggatcgtcggagcgaattggatgatcgggccgagggctgccccctcttccccttgctctcctttccttaatattcaccgtcgagtcatcaaagccgtcaactaattcagaggggctcggcgccctttgagtctatagccgccaaatctaaatattccttaagttgtcgtacggcgacgtcagatcgatgcgtctgttaattaaacgttaataacattgatagaagaaggaggttaatttcgtggttaaataacttggacggtattgtacgtcgttgtcgatcggtatcgatttcactctcaatctttacgtcttctctctttttctcgtctttgggtacgatgattaagcatgacgaggacaggtgctgagctgcatttaggttaattnttgcatatatcccccaaaggcccaaggcccccactgcatacaactcgtttaggaacattaattagtggggctggatgtatgagccactcatcagctaataaaatgtatagagattatttaaaatatgcaatcaatacatcttattagttttatgttgtcttaatttttctctatacttgttccatgctatggcatgcagggacggatattgaactataagagtatgatagctagggctgcagccctatttccgaacctaaatatcaattgaaattgcattataaaattttaaaagataaagacaaaattatgtaaattatatcgattgagtcctaggcttaaaaagattccggttccgtcactgattgcatgcataattaactttcacttcaacttggtaacttctacaggtattagcaagggttacaattcgacctttttttctacataaaaagcacaatagattatcaaactggtgacaaaagagagtgagatcgtacttgttgggtatatattaatgaaaatggaggaacaatcaacatctcgctcatttgttgtttagtgggaccaagaaggtctgactggatatattacaaggacacacgtttttttaaaagaaaaatcaaagagttacatgtttctcttttgctctatggataaccaagtaaactcgaaccacttgcatccctcttgccgttttgtatgcttgttacatcaatcctagtgggcatgcattacagtatgttttggatctagcatgggttttctttaaggttaatttgatccatgtcattgcaactatgtcgtattgaaaaaataccactactattcacaaaatcgggtagatgtcactacaatcttctaaaatttgaaccgtgccattccatcacgatttcttttatctccgtcacactttgtgtcaccgcatcttcattctaagtcaatactagtcgtctttgtctccaagtagtaagcccgcaccggaggctggccggcgagctctgggaaggctaggcggtggtcgtgggtggtgatgactccatgcaatggtcgtggacggcacttgctgctccgcgcctatcccttcctccatggcgaggctgcggccagaagacggctgccttcgactatgacgaggcggaggtggaagtgctcctccacgcggcgcagcagatccccttgatgctgaactcatcggctgcttcgacacgctcatgtcccaaccatcggatccgaagccgaagcggcctgatgctctccccaccgccaaggcgggatggacgaaatggaggcgtgttttgcagcgttgaagggggcggcatggctggagaaggaggagacaagatcatggttggcaagctcgggaaggaactctgcatgcgggacaccgagctccgcgctatgcacacactagaggagcacgtccagccgaggagcactctcgccgcgctcaacggcctccacctagatctctagcactggcgttgacgggctagctccgttggatatggccggagcgtcgtgcctcgtcatgtgcgtgctcggcctgcaactggagaatatggtcttgtgcggcaagctcgacttcgccgtgccatctttcggttcgagaacaagttctccggcaggagacagcaagggattgaggagagagagctgtgagggatgtgcacggaggagatcgtcagtgagggacaagcctagagccagcggtggagggatggggctggggacgcgagacgaccatgtgatggggatgatgaaaatcatgatggagtggcacggttctaattttagaagattgtagtggcatctacctggtttcatgaatagtagtgatgttttttcaatacagcacatttgcactggtatggatcaaattaaccattttctttatcaagttaaaatgttgtgtgaacatagattgtttcctttgcaccaactaagaatgcacacaactatatataatttatgagcaccaagattaatttggggattttgttatggtagaccgatactttgtgaaccatccatcttattattctttattgatccgatggttaatgttcatcttacatcataggaggtaagacgtcatctacaaccatgtaaagttaattaatctcaatcttttactacaggaaggaaaggagcgatgtttacttgtgtcactataaaaaaccattactaatacaataagaattaactagtaatttcatttttttattattactagcaatagtacccgtgcgttgcaacgggaaaaacaccatttgatattgtgacaccttgaaaacctcaaataggtaaaaaaaacaagtctaatttgatatattaacaaatagatagaaccgagtctaatttgatgaattagcataggatttaggatttagttttagatttatttttcgagccttcttaggcgtttatccgacggactttaatttaaaacatctgagccacattgtttgataaaatttgcattcggcctaggtcttctcatccggtccaaacttgggctggcccatcttcgtcgagctgagtcaattcgacagcccgcaagctgagcagctgagcgcggcccacatatgcggggacagtccgatgcacttccgcggcccattgggcacagtgtaatcggcggtgccggtctgacgttgggcaaatctgagccgtccgatctaatggatgctccgatcgtccccgtgctagatgaagcgccgaccgggagagaggggcaaaaccctagctcccaaatccctctctcccgatcctatttctctccggcgacgagcgagcagaacaacagcgaaggcagcgacggcagtccggtgagctagtgagcgctcctgcttcgctggctgggtggcgcacccgagggtggtgcaaagttgtgccacggtgttggaggttcggctaggcaagcgcgcaaacggcgctgagcgctgagcggcctggacctttaagattagataagattttcacggacgacgaaagtaaattgaatcaaactttctttttttttgttttatgttttctttcgcccttttttcgttattacagaggacagaaacgattagtagagatagagatagagaagataaagaaatatagtaccatgtcacatataataggattcgattttttttaccgcgtcacatataattctttgtttaatcggacataattcatttttataattgttttccaccctttttttaccgcgtccacggaatcagatttgtttttttgcccggtttttttcacaagattttttttctcccgattcttttttttcgaataggacagattggttttttttttttgcctttcattacacggaatcgtcattgttttttttgcccctttttcgcccggctttttgcccgatttattattttttaatcggacagattgggttttttttcgccgtttctttacacggaataggattcgtttttttcgcccttttttcattcggttttttttcgcccgatttttttttgacgacgatggaaacatttcatattttttaagtagtagagataaagaatcggacagattttttttaattttttttcgtcctttttttaccgcgttgacggagttggattcgtttttgtttatcggacaagttccatttttttccttttttcgccccttttttggatcggacaggtttggttttttttttctttttttcgcccggttttttctggataggacagatttggttttttcgcccggttttccttttttcacctttttttatcggacaggtttggtttttttccttttttccgccatgttttttttcggacaaatttggtttttttcacccgattttttttacggacgatggaagcacctcttattttcttaagttgtagagatagagattaatatttaccagaaccagattacaatattgatttgtctttacttacaatttgtagtagaagttttcaaatattttcggaattttaaggtaatttatttattttcttcactcacagcaatttgaagagatgtttaactatggtctcttctgataatagaatctatgtagaccgttatcttttctaatccaataaaccgaatctttttatactactacaataatat

SEQ ID NO: 7177 - DNA, 32410 bp, Oryza sativa
acgggtcgaccgaatcaatcaacgacgtgacacacatgcgcttggagcagcagttgattcatacatatatatattgtggccggtgacccaaagcatcaccaccacacgtgattactggctagcgagagagctaagtagcttaattagctagatgtcgagttaccgcgtcgtcgtcaaacgctgtacgcgagctgcgattccgccagcgagctaacgtcgagctacaacagatcgtacgtcggtggtgtgtacggttaaattaaccatgctaggagttgctcggcgaaatgtgtgcagaagagcggaatgtgccttagctatccggaccgacacggttggttagctgtaaagtaaagaaaatgacaccgaacaggtgcctgctggtgaaatgttcctttttcttttcaaggcacagtaattggacggcatgttggacgatgaatgaactattgcattgttgattctttttatttatagtagaataaaagataggaatattttgttccaacagtccattttgaactcaaaacactagttggcttttgttgtttgcagatgtgtcacccatacaatccaaaaaaagaagaatatcatcctaccgagcgtgacatggtattggtgagcccattggtctccaagcctaatgtgaatggaaaaagtctaacttaactcccttagtagtggtcgaatttggttagtattccttaactaaaaaggtcaggtatactgtaaccctttaaatattaaaaccgtgcaaaacaactctcctgactgtttttcaaggacagttttcattgacgtgtcatccacgtgaaagttcaatcaccaaaaaaaaaatcaaaaatagacgtggggctctctttcattcccccaaccacgatgagcttgagcttaagctcaaacccagcaccaatggcctggcctcgccctggtctcctcgcacctctttgagctctggcaccgacgagctccttatcctcctgccaccaccactatgagggtgagtacgagcatgacgatgaaggtggccttaaaggtatggcgtcggcacaacactccagtttgatttagagcccattcaaattgatgacatttttaaccataccattatttgataaaattaataattatatggctacatttaatttgttaccaaatattagcaatgtgtatagaattttggtaacatattaagccaatcctactaaaattttggcaatattaccaatttgctaaaattttagtaaagttcattttgacataaatctaaacagacccttaacagttcgaattatatttgggctcaatgaccaaagtgtgagtattttcgattgattgatttatatttatttttaaaaatatttaaaaattcatttcaaagttttacaaaaatatactcatgggcatacaaatcgccttacgatgacgtggcaccccgtgggaggtgtgccatggtgattttgtaagcgacctcctctcagtggtaaatcgccctcgggctgccagcaaaattaccacgatatgccccactcgcggggtgacacgtcacatagattaccttaccgaaggacgatttatatgttccaccttacagtaggccaggaggagtatatttttgcaaaactttgaaactgaactttatttttaaaatattttttttaaaaaaataaatataaaattgaaaaaaaaaacaattttttactgggttttattgggccagcccatcaagcgtatgacaagtgtaatacaatccaaggcccatactccctccgtcaaaaaacgttcaaaccgattacggaatacgtacgtcaaaaacgccctttaaatctcaacctttgaaccgtctttccctcatcattcctttccacgtgagctgaagtcgcaaatttgtacttctttactttaccggcacaagaatacaagatggtgaaatttcgttgaatagacaagtagaaaaaaacacaatgtatatgtctcaaaccaaagaactataaaaagaaaaaaaagcaaggttatagaatattttttgaacctttttatatttatttttaaaaaacatacccaccaaaaacttatactttaaaaaatatatattttttagataatggaatagaatatccctgcctttgctcaaaaagagctaaaacccattattacaaagttgcactaaaaaaaagtgtagttcaataaaacattgagaacacgcacttaaaataagaaattatatatatatagaaaaactattctacacccggggtaactattctatacccctctccctctagcccacctcccctccctccagggggcaaaacctaccccacacctcagtcaaagctcccccaccttggtcaaacccgcccttcactttccccaccacctccactcttctcagctctcgtctcagaacgacgtagtaacgcgatgttcatcgtacagtaacaccatgtcttacgtgcagtaacaatattgaaatgtagtcataatatagttatgacggatctacttttgataagcacattttttctaacatcatggtgcaaacggtttttaaaagtagtacatgatgtgagagatatgacccttcaaagattggttttttaaaaatttggctctccacgagcagtaattctatatcataagtattactgctgatcctctatgcgttactgtaatcacataatatcgttactacatgatgtaataatgattataagtttcttagtagcatagtgtgttactgcgattactttataacgttactgcaagaatatgtatagtaagaaaaaaaaggtgcagtaacatggagagagagacgaattagctcggtttactcatggggcaagggtagagagaaccttcaaagactggtcttttgaaatttaactctccacaagtagtaatactatatcataagtgttattactatctattgtacgttactacaatcccatcataacgttattatgaaagtgtggtaaatattataagttttgtagtaacaaagcgtcttactgcaattcttgaatagtattactgcataaacttgtggtcacgtgtatctgccatgcagtaacactcacacttttgtgtagtaacaaaaatatggttcgcatgtagacttttaactcatatatttttgttttgattcctagtttactacaatttcaccacgatgttactatcaaaagtgcagtaacatcctatatgttttgcagtaacgtgacgtgttactatacttatacgataatgttactactaaaacatagtaacttgttatgggttttgtaataacatatatatttctcttctacttagcttcctacaactatggaactttatgtgtcctgtagagttgtaacagtttatatgtttttacagtaatcgagtgtgttactaccatttcttctcgaagatttgtcttttgaaattcatctctccataagtagtaatactaaatacttattgttactactttttattgtgtgttactaccattccattatgacgttactctatgtgtgcagtaacaactataatttttacagtaacagtgcatgttactgcaatttcttaatagcgttactgcaataacatatggtaacaaccaaacacaagtacctaccacccactttgaactagtaaaatgtaagtgcaagtgatatcttttgaattcacatctttaaacaataatatctctcacaccacatattatatttttgaaccgtttgcaccgtaatgctttaaaaaaagagctctataaaactagatccgtcatgactatattttaactatattttattagtgttactgtaagtaagctacagcgttactgcacggtggtcgtcatgttactccaccgttcgtacgagacaagaacaacaaataggtggacgtgggaggaagttagcacacgggtttgaccgacgtggcagcgatttgaccgtcctttgaccatgctttgactgggggtgggaggtgggttttaagcccaataaaaaaaagggagaggtgggttgggctcttgagggggaggggggtatagaataggtgtagaatagtcttggctgttttgtactcccgggagtacatacaccctcccctgatagtggatcatccaataggatccaatttaccggattgaacaacaaaatgattaataaataaatgatgtaattaacaatcggggatgcatgcatgcaactaataatttaaaaattagtccgcctgttgcatgctacgtattcagtgcaccttttttttttcttcataatattcggtatatatgtaccagagccaacgttgaaaacgcctttttttagtatccggtatatactatgtgtttatgtgtatgattcagtatgtacaccgtattagatttttggttgttggactatatgcatttttttaatatccagtttgtacatacttgatttttttttaggtatggcacatacttttttatgttagtaacagcatatacctttttaaattaggagagcagtatatacctttttttaatccggtatatactggactagatcatgtactggttggttgtagatactacgtaccgctttaatttctttgtaggattcagtatatactagaccaaatactgtttttttaggtacgatagctcccttttttcagggagagtagtagtctttaagtagcagcgcatactattttattttagtacatactgtttttaaacttagtagaagtatatacttgttttaacttagtatcaatatataacttcttttaattagctagtaccagtatatgctacatacttgtcaattactagtatatactttttatgagtatataatgttcttaaacttagtagccgtatatattttttttatagtaagttagcaggagtgcatactgtttttaaacttagtagcagtatataccttttttaacttagtaacagtatataccttttttttaagttagtaccagtatatagtttctcatactagtatatacattttgatgagtatattttttgaacaaacataaagatgtttgataggaaaaataagtcaaaacgacttgtaatataaaacgaagggagtagtataggtattttttttccacataatagtacgtaccatttttgtcttatagaatagaacaatacgtaaatttggtatgtgtagggttgctaattatgaatatactgtattagtcaatgattgataaagaagcgtcgtcaatcactagcaaagtatcgggttgctgcattctgaataaagctaaatgaatgaaatacgctagaagtgcactgaattccgaatagacattctacatgcaggctaacaaatcggttagcatcgacgggatcacgccaaacacgcgcccgagagcgaaacgagtattcatgtgtcagcttactggatcaacggaatcacggactcagcaccgtcgccagacgaccgtacatgctggagtgtcctgttgtcagcaccatctatgcccacgatagatgtgtctcgcatgtgcatgcaccaaacaaatgcattcatcagaggcttaatcattctatcaacgtcatacttcatgtctgcatcctcgtctgcaaacaataacagagatatacccaatagaaaaaggaaaaggaagagtatgtattatcgttctataggaaaaaattaatcaaacaaaactggaagaaggaagaaagggcttgccttgatcgttgcacgggcttgatcgatgccagccgcatgaccacagtggcttgccgaaatattgatggcgtccttgttaaggtcaccggtgctagcttcgatcggtcagccaaggtgaagccaccgccgcctccgcgtagataggaagagccgatggattgatgccgtgataccgtcgccacaagggccggcaccgcctaggaacgccgtgttgctgcagatgaatgccgccgcatcccagcaaatcaccgatggatgttgccgccggcgtggttgctcgatccccaatggatcgtgccatacctccgcttcgagtcgccggtagctagcgctcgatccgaatacaacggagagattgccgtcgcggatgggatgggaaccaagggatttatacgatctgttcagaaccgaccaattagtgcgggataattaaacattataggagaatattctttaaagaaatggaaacgggtccggtgagtgcatccggtaacagggttgatcgtgggtggctactgatcaacggtggatgggagcaggtgtgtgtgtgtgtatatatatatatataatttgtttggcgtgacacgacaacacgcagtggttgtgccattgttgtcttgccacaccaaatccatctagttggtatgtcaaaggttcagatttagaaaaatgttctagggggaatttatttaaaaattaaaaaggttaaaaaaataccattctagctagcgtggcaaaacccttactacaccagtctagcattattctaccacatcagctagaatagcatgaccaaaatgtttaaatttgaaaacaagttttcatagtctttaaaaataagatttaaaaggttcaataaaggaaaaaaaataaatctaaacagagatagatgctttgcctctgcaagcgcccaaattatgacctcttctttaattttcgccaacaaagctattgcaaaaaaatcttatgatagaacgctttctgatttctctccctccgtatctcttagacctaggatgtcaggaggatgagagagctcaacccctgtgtaagtccttgcaggtgaggagtgtttcctaccaatcatggaccatcgtgctggtcttctagagtgtactactaagactgtgtttagttccttccaaaattggaagtctgggttgaaattgatacgatgtgactgaaaaattgtgtgtgtatgacatattgatgtgatggaaaaagttggaagtttggatctaaacacagcctaagtttgagttgttagcatgagatccaggtaacaggcatgtcccagatttttctcgtgtacttgaactcaacaagaaggtggaagaacgtttaagtgtgtggctgtacagtgggtaacaagtgttgtttggccatccacaaattgctatcatgtctgacgtttacactctgttttgcacgattaattaggccaaaaaaaatgtatttctttggtgcccaggacttccagatgatcatatcatagttatcgttgatacacaatggtaattctgaccaactttatgtcttggcacgggtcctacgagtgtaccagaaaaggttaccaacactgcacaattgcgagacatagccgcatgccacgaaatcctgtcactcggccagagtaatcgtggtaaattgtgagtgagagcaggccatgctgagtgtccgacactggaactcttctttgagaaaggaaaaaaaaaggcgaataatgcatgatgccgatggaataatacagacgttttctctgacctgagtgtggatgatacgcttcaaatctggaggataaagggggaagtttcaccgacaaagacaaaaggattcccatggcccaatggccgactggaaggaagggtgaagacataatacagtatcacaattacacattttttttgacgcaaaacaattacagaattacatgaatgatatgtgctaatcacaattacatctttttcttttgtcttcttccttttgcagtatgcggcagagctgtgcaattagcctccgcgagaattcagagataaagttctgtttatgatagagacgtgaagtatttgagatccactgccttttgcaagaattcagagatacccctatacggtagtactattgctcgtactgtatagaaattgacgatcaagtcgacatcatttgtgagaaccaggagaaaaaaaaagaattgggatcccaaaaatatttgtatgcgtatcgatcgaaattgagtggccaaatcttggatctgacaaaggacatgacgcacattatcttccatgcttattgtggatcactatctctggcatgctgtctgctgcccccttgcaaatagaagtgagcagcagccacaaaagccgaagatttttcttcgggagcatgaagagccttggcccttggtgagctgaaactgaatttgggccaatcgtgaaaactgacaataatcaacttggatcccacttcgaaccaccaccattcgatgtccacgagcacaacgaaatgttcattgacagagacggagcattttcaattcgtcgaaaacgatctctcacacgcgggccattagaaaacaaagcatttatacatgagtgttttaaatattgattcattttctgtggcaattagcacctcctgcgtgccaactgccactgccaaagaagggcatctccatttttgtactatcaggatcatgtcacggtcatgacagctgagacgtcagcggcacactggcctgtgcagtgtacatactccgggagaatggcatcagtaagcaatttttctcgctctttactgtattatatatcttgtcgaaagaatcacatgtttgttacatcagaggtgatctccgtcttcaatcattcgaaagaattacacatgtatgctcctttacaatgataatgctttgaaattctaggctcaacgcccaggaggctggtcagatgttaagcccaggctcctgagaaatcgaaaaataagctagagactaatgttctgtcaatccgagctttgtgcagaagaactagttttcaagtcagtttggtagtacactacgtctccggtgtcactaacatagtggtcgctgtttaagctctttgctagcacaccaagtaagtggaatgggaggggagctgatttctctggctctttgtagtattttcccagcactggttttgctgcctcagtctgcaagttaggtccaaaccaacataacttagtaggcgattcttgcaaaataattcattaaaacagcaagagtggcggatggcttcttaccgcctcaacaagatggtaatgtgggatttgtgggaaaagatgatgaatgacatgggttccaatgtcatggtgtacgttgttgatccacccgtagtcccgatcaagtgttgtcaatcctccgcgcagatagctccactcctaatagagcaaaagaaaatgtgagctcattaaaaatatataaactccaaaatagtgaaaagtatttgataatctgcacttcattctacgtaggaaaatggttaaaaaaaggaactactgttttgatatgtccattagcatttcactctggaaggagacaaaaggggctctttcaagtacttgaccacaaggaatctgaggtttgtagcgttcgctccttgcttatggttggaagtaaaggatacatttggcatttagccataaggcgatacataactaccaagcatgtagacaacagcagtaccatattggctacaaacgctgcatgatgcactaccactatttttttgaaatttttttcaaggtaagtcaaaaatataataattgcatgctttatatcagacaggatacgcccacgcatatactccattttataggataccattaagctatgcgtatggaccttttggtttatataataatcatcactttgccgacctaatatacaatggagagagggctaaaaggagagaccacaattcctctaaaagcctagaaactaccgcattaaccggagaaagagagagagatatacaactttgaatctaagataatagtgggaacatattataatggtgtagaccaaatcatttagttgtatttccagaactagatggaagagtggtatatcaattcggcttgttacctttaaagtcttagcttagtttctacatgcagtaccaatgtcgaataatgaaactttccatcatttaacaaacaaaaatggactatctcctagtttttcaacattaagtggccatccttgaatcatttacaaatagcaaacccatacaattaataatattatttacctttccacggtaccaaggaagcttgtcctcatggccatgatggtgcaaatatgtgacaaaatcaagccacataacaaatatctgcataagggtttacaaaatgtgaacacatacatcaccagacactcccatcaatccaaattatcattttgcagaaactaataaaaatatcatgctcttaccacgtatggaacagcatagagctttaacattttgaggggccccatcacaaaggtcagaccagcaagaatcccaaccattgccagccaggatgcagttgatgttatcacatccttcttctcatttggttggaacagatcactgcttgggttgaagtgtgaaccttttttccctggactccttgcaaactgcatagacatgaaccccaaaccaggaatttagtatgatattacaaaataagaacctctaatacagttgataatgaatgtcaagaagctcttggcctaaccaagtataatgggaatgccagcatgggaaacggcatggtgaacctcaatttcttcgtcatatagtccaggctattgtacagcctctcagacagctgcaggttgtcacgattagagaaccatcgagcaaaattgcagaattcctcatgaaccaaccaaaaacaaagacctaccggttgccaggactcgtctttctcgacatgaccgtggttctggtggtgcgtcctgtggctaatcctcctgaaattggatcgaaataatgtgagatgctgccttccttagcttcaacaacaattcctgtccaaaacgaaagaaccaggaatacatgaagcgcgctcatcttaccagccgtggtatgggacaaggatggaggagtggagtatgtgtccaaccacgctgttcaacttggcgttgcttgagaagctcccatggccactgcaaagacaccgagtagggaaggaagggtcaacgatccgggctgcaaaagctaaaacccacagaaaagaaaaaaaaatccaatctctaggatggaggcaggggcgtaccagtcgtgacccagcacgaagagcgcccagaacatggtgccctgcgcggcccagtagagcggccagacgagccagctgtcgacgcgcgcggcggcggcggcgaggccgagcaccacgacgacgtcgcgcagcacgtagctcatggacctccaggggtccttcacccagcagtgcttggggatggccgcgcggatctccgcgagcccgaacggcggcggcgccccggggtcgaacccgtctccgtcccctcctacctcccccgccgccggcttcggccgccgccaacgaacccctggcctcctcctccaccacctcctcccctttattatcctcctcgacgacggaggtgaggcgggtgggggcggaaaacgcggagcgcccactcgcggtggatggctccccccgcggcggcggcggacacggggcggcgcggccccccggcgaggctggaaggcgccggcagcgcaatggcgccgcgcccgcgcaggcggagcggcgtgaggccgcagcactcggagaggacgagccgtgccatcgcctccgccgccaccgacggtagcagccgctgcccctgacggcttacacggatttcctttctgatttttctgctctgcgttcgcggatgggccttgctgtgcgggtagtggtggtgatgggattaagagaagtccacgatttttatactgccattgccagccacggaccggaccgggccgccgtgaagcgcgtgggggggttcgcgcgccggtgaaccgaaggggacgacgcggtgcggtcgactcggactcgggtcagacgagaagacggtagctgtcacgtgtgaatttggcgtgcgacgccgccccgcttttaactcgtgggttgactgactggtttaattaatttagcgctgtggcgattatattccaggaattagcggttcgatcgatctaatgcatgtgtgtgaaagccgtaggtttggtgtggatttgtggaattatcggatgttgcacgatgcgtctttctcactgctaattaagatagtttagtttagcacgtacgtacggtattgtatacgtggcaatacagtagtacgtttggtatgcatgggtggtcaaaggtggattgcagcagtgagtcaaccaagtctatggtatgtggtgtcaactttggcacaaaactttttcaaaaaaaggaaaaacaaacgctctctcgctcatgtatgcagcataagttcagtgcttggacgggttagactaatggaacacattccacgtttcgtttcaatcgaaaaggagtcagcgtacatatataattaatgtctgtgtcatgatcattgagattgtaataggaacgcttatgcatttttgcgtgttggtgtagaatgtatgtactagatcattatcctaagtgcactaaaaaattgattgttgcatatgtataccgtgatagacaacgcaataaacctgtctgctgcaactaattcatccaaaccttctcttgcacatgtggattagttacatcacagttcagattataaattgcggcataattagaaattctctggtcccgaaatataaacatgcccaaaatatgaacattcttataaaatggcctaagaatgttcaattaaatgccacctgagtaatgtcacattagaatgttacatcactgtttccaaggatgccacatgagtaacaaggcatttagttgatgattaaaatagcttatcatgttggctttgacccaatagcaatatagattgtgctacaaattttgtatttttgtggtcataaattatgagaatctatataagagcttccaccgccatcaaagcccttactatcaaaataccaaaatataaaaatattctattttttatgcaagcttttggaaaaaaaatacaaagcaagaataaatcgttgcttgatcttttatctcgcacataatgcaacacccaattgtcatcataccgatcgatcttttatctcgcactatgtttcatggattgggatgaactttgaagtaagcatgaagtctaaacatttttaattatacgtagtgttacgttgaaagttagtcttacgtttagtttactgttaaacttttgttaataaagatggttcaaagtatatctcattctataaactatcattgttattttccatttaaaaaataggattagctaccctctccatttcaaaatatagtaaacctaagactaagatggacaaatcataatgatatgaatctaaacaagccctatatccaaatttatattattataatgtgtctagttttctaaattactatattttggtacagaaagagtaggaggtaagtaaatgtatttttggagggggggaagaaatgcgttcacacggtaaaacttctttatgctgatggttaattaaatgttttaggtgtcatctgtctacgtcaataagatctttgatgacacacattagtacagtgtggtacaactgtatatacatccttcgtccaaaaaagagtatgaaagcaattaaacagtccttgatctgatctctacaccatcgacccaagagaaaatttgatttatatactatcatgggaagggagcttgtaccacgaaatagaacatttcaaaatgttatgcctccctttaacctgatgcattcatacttggagaagaaaccacgtaatccctttttggtatcctttcctcgagactctttcgtcgtatcatcggaaaaaagaagggagagatttgccttgaaaaggaatgaacaagtcagagaactcaaatggcatacgacgacgatgtgaagatagtacactaatcaaatgcgatccagtccatgctagtactttatctgtctcctattaaatttatttttgggtccttacatttatttcaaaataaattcatttctactataattattatatcgaagttggtaaaagtaaaaaaacatttgtgtttaaagcagataaaataagagatagttatattattgtttgataaaatagtaatattctaatttcttttatgtgtgtggaattgataaaaataaatttatttggacttgctactactcactccacttgaaggttcgcttttatactggtcgatcgcgccacgcttagaagcacactaggggttgttttggtttaaagtcctaccaaaattttgttaatgctaaatcttggacaagttttggcactaccaaaattttggtaggattatgttgtttaactctattgaattggtaagatttggcctcaatccaaatagctaacgagtactgttcaaaactaccaaataattggtagggcaagaattggtttcaatccaaacataccctagtactccctctgttttttaatagatgacgctgttgactttttctcacacgtttgatcattcatcttattcgaaaattttatacaaatgtataagatataaatcacacttaaagtactataagtgataaaacaactcataccaaaataaattataattatgtaaattttttaaataagacgaatggtcaaacatatgagaaaaagtcaacggcgtcatctattaaaaaacggaggtagtattactactactcatttcgctttcgaaaatggaaaaggcagggccgcaccgggaggggtgggcccggtgctccaggcggtggccgcgtacgtggagcaggaggcgtccacgtcgacgagagctgcgcgcgcatatgggtggcttctgccatgcggatggcgtggcatcttctaccgccgttgatcttctaaccgacggcgctgcggcgatctggattctggaccaccgggggggggggggcttggccgaccgagtggccgcggggaaaaagcggtgagcgcatgtgtgatgcttttttttcctttcgatttcgacgtggacgtgaaccggatcggatcgtggaaaatccatttgctagtcacccaatcacacccgtcgtcattaggacctgattaagacctcgattagattaattaacccatgtggcaaactggcaaaattgatagtgcaggtcgtaacatgtcctctcaagcggccggtcgcctcgcctggctatgttgccatttgtgcgccaagccattgcgaacctcacttgcgttgtcgcgcggttggacgctttgtggtcggcagcaacggagagcgcgggggcgatatccgctgttatgacggcccggtcctaccatgcatcactagaggggccacaagataatccggcagtggactccggccaagagtttaagaacccgtttagaatggtgttattttgaattatatctttttaaagaaactgataaagacgtgagtgtatttagtttgttactaaactttaagtaatatttggcaataacacatttaatctattctaataaaatttagcaatgttgttaaaattttagtattatcaaattttgaaaaagtttatttggaagtactctgaacagctcctaatataggactcatgtaataaccagcccaaactaattagaaaggctggaccgcagggtagaggactaaacgaggaccaaagacctcagctccgtccaagccaacaacgtgcatcacgtaaaactatatgtttttttagtggacggagaaggggttgttgcttgttggtccgtggtccatggccggtgcggtgcggtgcggtgcgccttgccttggcgtcgtcgttggttaatcacgcttatgtcctcctgcccgcgtggattttagcaagaaatcgctccgaatcgcggcaggatcgcatctgtggccggcaggaggacacgaggtcctcgtgctcctgcggccaccatccatccaatcccgataatgaaatccctcctcattggtcaaatccatggtttcatgcgtgctcccccctcagctactagtacagtttatttatacattgtctaccaaatccacacgacattcctacaagttaaaaaatatacagtagcatttctttctgcatgacaatttaacaggaagatatgacctttctgtctaacaacagcaatggtgtggtattactgtacccgacaacgaaccgttcataggccccgtcccgtcctgattctgttgtccattccgcatgccattcttcagatctcgcctcgaataaaatcaggacttcaggagcatcttatgcaacgccaacgccaacgtagaccataacatacgtacacctttcatgcccctatcactctatcaggaccctgtgcaggtagtgtgaccgggccggatataagtgaacacggagagactagagagagctgcgagtaaacgggggcgccttacccacacttatcaatgggcgtccaatcagagggcgcgagcagcaaccggtagctgctgcgatatcgtgtcctctcccggcgcctctcatcacgccgtctcctcgtacatcctgctgattacgacaagcgagagagggggagaggctggatggtcagttggtcaccagccatccaaatcgtccataaacagtactatgtgctatctctcagtactcttgatggagattggaggcagataacatcgctgcacaagtgaaagcacgttgctctgctttgctttcattaactatgcgttagctggtagtacaaagtagttcaaaggaaatgataagctcaaaggtggtactacacattactgtcatcggttggttggtaatcaaggtggtttaggccatcaaggtctcaacgtaatacaagttatggccacagaaaccatgtaggccaaaatggtaaggagcatagggaaggcgatcgtatgaaaagatggcagaaagcccaaccagggatcatggcttccaccatttcttgttctccatggattttgcgatctgatgagcaagggaggcaaaattctctgactcgttctgaagttcggcggattcttggcttattctctgccaagtaaagaaccagaatcagttctttgtgttcaactgttcatagacgaaaggagaaaacaacttgatgcaaaaaaaaaggatggggaagtcgtttacagcaagtttctcgccccgttccttgagcttatcttttgcatgagctgcagctgcagcagcatcctgaaatgagcattcagggttagtcaggttaacaaatcagaggtgatcaattcgctatttcgctgcattggtgaaactagaaaaggaaaagtaccccgccaaatttgtatttggtgaggatctcttgggtgcttttcattcttggtttctcaacatcgcttgatccgtcaaatagtttctccctttccgtctctagcaaacagttaacattgcaatcagaagaagagtacctttttttaagaaaatttgagaagaagagtacatttatatatttcgaattgccagaaatcgcagcgctacctgttttggttttcttactaaacaaagaccttggggttgatgctggtgctggtcttgcttcatcgtcaatctttatgtcgtctgcaatgtactcttagttacatttcttgttaaatatgaacgagatagagagatagagagggcgcgcaccaattgccaattctcctgttggattatgggtgttacccattgacaattccacaaaatggattttgaagaaaaacacctagaactgttcaccttaggtttatccagcgcaacttcctttcagcttcttgatttctcttatgatgccacaagagtctaagagagccagctgctgtatcatgcattagaaaattcaagtcaaggcaacatacagaatatttcaacagatgctgcatgaacataataatgtcaagcatggaaatgattgtggaatcctgagatatagaccgtgcaatagaaacgcagcaagtacctgaagccgttctcagaaaaaaaaaatgcaaattaagacccagagcaacgtgagaataaacacaggaatttcacatcaaccagagagatgaaaggaattaggaagagtcttgcagattacgaccacatttggtcaccttgaattgtgtgttgccacggaaagcttggtgtttatttttggacaccacacttcagggttctccgttatttttccatttttaacaaccgaacaaggctggaaaacctgctgtatagagctgtagcccatttctgttgcagaaaggtaccgagaacagccaaaaatggctattgggcaacggcataaacattaaaaacgacgaagaaagcttccttcaagtttatcacaagctatgaaaatacatgaacctggactagtcgaaggtggcaaactgatactcgtgcgatggcactgcgagagatcggatggatggtaacaaaaacaaaagacagacgaccttcgactagtccaggttcgcaccatgaaaaagccaaaatattcactagtctgaactctgggtcgtgtaagctactcatttagaacatacatttgcagttttgcatactatcatccaagcagtcaattactaataggaagaaatctggcgttacagattaacttcagtttacaggatcagaaggccaactgccgttcattacctattgagaatgattaccaaccatgtatccatggctcatcacaagatctactgagaatgtgtactgaaaaaaaaaaggaacttggggctgcttaatttgaggtgttagtctacagggcaagttggctcttatagatgtactacttgctgaggttcttttttccgttgagttctgagaaggattacaaatttaggggtgggggtggttcatgttagtgtcattggtataaacaaagaattatatgagaccacacaaacgaggcttagagcaaaactgcttcccatttgctttcaccaaggctaccactccagccgtcaaacccgcacagataatggaggtgatgaagtgttgtgcattccgtccaactgctggttagatgagatcacaaatgtaaaaacaatccatcacactacgggaacttcttaagtgaaaacaagtacgaggaggcacaccttgactaagagtgaatgtggtggcagtaatcccaccaactatgattgctgaagccacaggaagatactgcaatcaaacaatattagtaatccccagtatcgaaatgaacatgctaattattaaggcagaaaaaaaatgaaaatgctgattaccgttgcagattcaaatccaccattttgaaaaggagaagagatgcctttgctgactgtatagtaaccgctgataaggtctagagcatcctgaagatgagtaatgaagtattaaaatttaaaagaagccagcaagagcacattttgtagaatataaactgcagcaagcagaagattttaacatagatggtttagcatgacaacaacaggagttacaacagataattacttcaaatggtttgtttgaacgttaaattaaagttgtatataataaggtacatccataaaactgttactagaccatgcaaagattagttaagtgctcagacgaactgtgtgcattacaaatcaatacaagaaacacctgaaaggatcattcactgataaaatatgatttgacaagaccaaatattagggaagcaatttactatgtatatcagaactggcagtggatatcacttacttgtctcactccgtcatgaaaattattcaaataatatcgtgaaagagcactcatgccatctttaatcaatccaggtaatgtctgccttccatacctgtgttattaagttgttgccatggatttaacaatacaaacgcaccacagttgataaacaaattattgttgtaacaataaatgctaaaaagttacctcactaggtccccctttagtgcataagaaccagcatattccaggcttagctcatctccatgttcaacccacactgtgaaagtatgactacaatatatgtaaaccatcttggtttctatagtaaacaaaaaggaaccttactttttttaaaggtgtcactaatgtctccagattgggaaatgctgccagatgatgatagagcccccatgcgctgcagctgtaagtccaacgattttctagcaaggaagctctggaaagcaaaagaaaagtgttaaaaacggattagtgttaatatagtcaatagatcactaaacatactacataacaccattttcagtatttacatttatcatcctcaacattagtaatgaaatattatatcacggtgcatgctcagtttaatcccatgggatcattgagaacaatgctaaataatttccctgctcactattttgctgaaggaatgctcattagagtgaagtggcaaattatggcatgtgaaaatgtgaaatacacattgctaagtaccaactaacatgtatctatccaaatcaattcaggacatgcttgagctatgcaatggatctgacttagcaactcacaccttggctccatatcatagaaattcaacttaactagagccatatgcatcagtgcattagcaatctgaaggattgacgagatagaagaatagaactgttagcatgacatgcaaaggtctaaggagtaagggctatcacaatatagctggaagttattacctttgtttcaaaaataatcatgatatttgttaacttgattcacagaaatgacaaaacatacctgagttacatttgtacggtccagacaatctatgcaattggatctaactatgccgctttgctccaggaatatctctcctttggagttgataagaaaatatctgctcagctggccccgaaattaatcaagagcaaattacttgccatagttaaaccttcagtagttgaaataaatcttaaagtagtctcatcaggaacaagagataagcgtaaatgttggctatttaaaggtgtttaaaaattacccttgtttctgaatagcttcttcaatttgattgtatagaacttgcagattatcaaagttccctccacgacagatatgatggaaatcaaaatgcacatacctgtagataaagtgaacatcagcataaaatgataattttatatacatgctaatcctgttaatcccagaaagatattttatcacttttataatcacaaatcaatagaaggatatcttatgattttcacgaaacatcaagcacctgatgttaggaatcctctccatttcagcagcaaatgcattgcttaaatttccttcatctccttgctgaaaccaaacaaacctagttagatgaactgtcttctgtcctcgataacctaaaataaataatttactagatctagattaatgtatatgcactaccaactgatgagaaaacatgaggcacgacacctcaagccaaagtgtgcaatacccaatatgtttattaagcttcatataagttggattatacaggattgaaattggtttgttgcactttatttttcatggaaaaaggtcatttacacaatttacttatccatatttttttaaaaaaaagtgtgaaatttcttcaaggcaaacatatttccttttgaatgttcatttcactaatttctagattggaaattaagcaaatagagaacagaatatcatagcacacaaggttcagctatttctaaccaagcaaagagactacatggatacaagttcatgtaatttagctcatactgtgaacacagcactaaatcatcaatcgtcataccgtcgacaactaagtttgataaacttcacagttgcattacagtgttcagttattactatattagataaactaatatttcaacatcaacatgagcacaggacttaccttatctgtcaaatcaacaacaactgtgtccccatatctttgtgaaagatcatgaaagtggcgttggacaaccttcggctgtaagcagtacaagtttgtaagagatctacagataatcagtgtgaaaggtcatttaagaggtatcaaactaaaaggcagtaaattcctaccgtttcctcatgttcaattatgttgagacatggtttgtagcttaaatccactatttgctcccagagaagtggaatggagcctcgaacctaacaagggagtgaataagattgtgaggcactggaaatgggacaacatcaaactaaatgacactccaaacttgtacacattccttaaagggctataaacgatatacaccacaattatgcataacacaaatgaaagtaactgtaagatattatatgaagcctataatatttgaatgaggataagaaattatgtaacattggattacagggggaggagagtctatcttattcttgttcatattgaacaatatgaatttatgaccaattttatcacattgaacaccacaattattttgttgatatagattgatgacattctttctttgggaatcaacttgatagtatgtataaaaaatatgaataccaacatacaatctagcactgatatccattgaatctatttctatattaataattaagatctcttgtcaataatccatgatcatccagcaacaagaaatttcatttgtagtatcaagaagccacctgtataaatgaagacatcaaaccttcatactctgccagctgttctgtctcaacaaaattagctgtggctccttcaagatttgcacctctcctccacattcttgttcctgcgttgaatgcacgtaaatgcaatacaagttggaaaagcatcattatgtttgtataaagtaactcatactacaactttccaattgaaacatcacaggtgagaaaaaagtacaacctagacgcctgttgcatctacgtgagaacaacgttattctgacaggtgcctcctttaaggaaaattgcgctgtctgaaaacgttaaatagtcaaggatatagcaaattgctaaagcatgtttctctgctgatgattgaaaaacaatgagcactgtatcacacattttcaacaactaaacacagataatccgtatatcctatactgtcctcctgggtaccaaaagtccaaaacagagaaaccgatgttacatgtaaaaggtaaatgctcaatacacaccagtgaaaagtagagataagaataaaaaaataagcagtgaaaatatctgagattttggatatttccttggaccagtgggatgataaattcatcaagctgcaaaaagaaaaaagggagaaaaataagcaaagatgtaaaaaaggaaataaataaataaatgttttaatttagtcaaacatgattacttttgcttcaataaactcctctagcaaatttttgttccaaacgaaacgtgggtcagcctgaaatataaacttaaagaactgtcaggaaacagagtaaagatgaatgattataagtaacataaccaaaaaaaaaaactagtatagttttctgacttagcatgtctccaattattatgctcactgtggctgttgcaagtcaagcttcaaacagtacagtgcaatcgagcatacataatgatagataaagtctctgtattaaatgcatcagcagtcaggtctgtgtgcagaagctgctctaacaaatgcacacatcccgttcatcaaatccttttgtataattaagaaatgtataaagtaatggtagttagaacagatatagctagcacttaacagtataccaaaatcagctcaatcaagaatcaataaaattcacaatgccaacagaacagattaaatgataaaagtagttgttccctctcttcctttttgactgacaattaagaatccatgaggtcaaacattctaaatttacctcctcttaaaactatcaaagttggatgtatgagaactacatcagtaaattcatcattaagaatacttccatagcattataggatttataaactctaacgacaatatatttacaaaaagtaatgctcaaagatattctttttctcaagcatggacaggagaaaattacacctgaaaagtaatggtcaaaattgcatctgatttgtttagatgttacatctccacatcccaagtccttacacagttcaggctttgcatttttgttacattttgcaacacaagatttcagccatttatatgagttcagttaatcagacttacaaatgcaaaaaacaatgcaagtttaattggaaagagtattataaataacttaagagaacaaccataaagattttctcaaagataacagccataatgactcaaatacccaggaaaatagtatgtactaaattatggagtgaatcatcactaacctgtttccagagtggcttatgtacccgcccagcaggcaactttgatgccctctgcaagctacgaagtaataactcataagacagaaaataactagtgacaaagtttattgcaaggatgtgaacagatagatattttagttgacctatccacagtcatgcataacttgatacttacttcagtgtcaaatccctgtcataagagtaataaagcccatgagtagtttctgcgattttcaggagagacatgaaatatgcctcatcccttttctgcaataagatggcatacacaaattatgatactgtgaccaaaaataccagataaagataaacaatgcccaaacaatgtggataaaattggatgctaactactcaattttgtcatacttcttgtgcagttaaatgctttatagcctcgttgcagcataagaatttcatcgagttcacattgtaaacaggggatccctgatatgaaccagcgtccctttgagaagtgatgacaagtacatagcttcctgataaaaaaaaagggaaagtggaaagcctgctgcataaaattataatttccaaaaaaaaaaggacagaaaattagcaattataacatggagaactttacaaaaagacataaggaaatcattttcctttatcaaatacttccaagcgaaaaatatttccagatttttatctaccagatataagtttgattatcttcagcagtgcaatgtatgctcaattattgagcaaatggattttgtatgctgcactgtcatactctcagcaaaacagtaattagttgcactgtaaaagtgagtatttggattttattttttgttggaccaataaattttctaataatccttttttatatttttcctgacaatgtggaattagtatgtataataaaaactacattcaagtgtaaaacctagaatgaatctaattgaaatgcagaagtttcccagcatacagttagtgctaggcaaatatctaaatttgaagacaccaacaagtattagtaattaattaccgaataggaggttcaagtgtcagaccatgtgattttgtatggtggaactttcattagcacgatgtaatttaaactgaaattgcttgtcaagcactgggtgaataaacttgagttaaacagtaatgattaatataagtacatggctaaatggagggaaaacaagcacatctaagcaaacaatcatcatccatatgtttctccctatgaggaaaatatgagtacagcaagataaatcagttccatgtgcaaatttagatcagatcactattgtgcaggcaaaaactacaaacgaagctatccaaatcgtacgtgagaaaaaccacaagctatatagaaatggtgactcaccggcgagcaacctgatcacgccagccactccgtaaatcttcgacaccctacaatcgcttcccgcagccgcttcctctgcacgcgaacaaatgcacaggttagtaaaaccaccatcggttcacgagcccagcactcaaaccaaccaacaaaaccggaacatagccgcgatttgttttcccctttgctttgcacggaacgattccggcggcggcgcgcttcacggtgaggggaggagtagtaagtggtaacctgcggagagggggcggagggagccgttggagcgggagacggcgaaggcgccgccgccgtcgaccgagcggatcacgtagcggtcgcggaactcccgcagctcgagctcgcggctgcaggcgccggggcggaggggctcctcggcgagcagcggcgcctcgtcggcggcatccgtcgccatcggcggcgaggcgcgtggcgtgtgtgtgtgcgcgctcggtttacgtttggatcggtggcccggccccccggatccgtgacgggagaaggaaaaggggaacgagaaatggctgattgcacgtggtcccttgggtttatttggtgggggctcagatcagttggggatcggggtgggagggacccgcagcaggtttacattacagtcagtattaccgtgcttaccgcgggtacggtaatataaatatcatggtaatcttcttacatttaaataaatttaaaaaataatttgattttttgataaattttatacggttttttcacagttactgcgcggtaaccgtgcttaccgtcgaggcgcggtaaccccggccccggcggtttgggaaccccgcagactgcaatgtttcatgtcttacacttccgtccccaggctcatcaataatcgtctaatttggacaggtttcattcaaaaatttaaaagagacggaaatgagcagcacattcctaatctcaaataatcgtgttgaatagcggtagagctgcctgcatcgtgggtagaactacggatatgtggtgtatatgagaacatcggtgacaatatttagggtaagcggagtaggagacgaagtagctaagatgagaagaggtgataaggccgttaaactcatccagtaatagagatggcctcgaaggttatctcattggatgtagcagtatatgaggaggatcaactaagaatggtagaggcggtatcacttagagtttagggaagaaaaatataactaagaaagaaggtggatagctgatttttattggttgtgtgaacattacatagcactttgatatgattttgaggttatttggccaatatcatgttaggttctacgcacatattaaagtgtgattagttttgtgttgttaaaaagaattgagtccatttaatctatgcagtgctattgtctactttgaattaattcccgactatctcatctcacatcaaacatgcattattaccacagaattttgtttcgtctatatattgagaataaggtattgtttgatcgagagccacacttctgaccaccgaattagtatagtattttgttgttgctataattatggtgtgccacacttttcaaggaattggagccatttgtcatgtcttattttcataccacagctcaccgcaatgtgtggtttgtcatcacacttggcaaaactttccgagcatatataagctagataaccaggtctatttcaagcatgcatccagtcatccatcctctgattatcacatttgcaaaccatgattcagtgatacacacagataaatatagtggttgattttgtttagctatagtgctatactactagtccgatgaggtgttatcattcaaaggctcaaaacacaataataacgaaagaaacacgatattttgtaatgggattgaaattaacatacttccaccatcccaaaacatttgttattctatattatttagcataaattaagatttaagaaaaaatattatattatcccttaataaatattatgtagttgaaagttaaggataatcatgggtagatttgggataaatttaactgaaagatgattgatttaacatgtactccgtattaaagtttgtagcgacaactattttaagacaaaatttgaatactaaaatgacaactattgtagaatggaggtagtacatccccaacatcagctctctctctctctccttcacattattatgggagcaatgagcacttaataaaaccgtgacactgaaaatcgcacttaccaatgttcttgtgctctcgagaaatcatcagttggtattgaattttttatttattcaaatattttttaaaaaaattcaaagtattacatatccatccactaatgttcctggggaggacgatttttatgacatggcacatggttgttagctcgtactaacggctacgcgaaggagggttggctattttttaggtagcccccttgcaaccttccacgtgacaattatcatgcgctaacatctatatgccatttcagtaaaaaaaaaaacatctatatgccatgctataaaagatgtactcggatgagtttcttttagtatgtattactttgaaaaaaaatattttgctcctttctcgcaggccaggaaggcctcgtcgcatggtcgatggccctgctgtgcaggctcctttcgtgtcatcgtgtgccggttgacgaaccgagtaggaaaggaaaaagtacaccggaggtccctcaacttgtcatcgagttacgtaatcgtccccaaaccgcaaaaccggatatttgatatctctcaacttacaaaaccgttcactttaggtccttcggcgattttgaacccggttttatccgacgtgacggctgattcagcgtgggacccacttgggcctcacatgtcaggctgccacatcacaccccccctctctctctttcccctcctctcccttcctcttcttcctcctctctctctcaattttctcctcaacggaaagccagccagcgggtggggagagggtcgtcggggcaaggcgggagaggaggtccggcggcgggcgacgaggcggtggaggcggggccgggcgacgctgcggtgggcgtcgacgggcgccgcggcggggggcgacgaggcggtggaggcggagccgggcgacgcggtggtgggcgttgacgggcgccgctgcgggggacgacgagtcggcgtaggcagggccgggcgacgcagcggtgggcgtcgatgggcgccgcggtgggcattgcggtggtggacgcagagacaaaggcgggcccgggcgctgcggcggtgagtgcagaggcgggcaccgcggcggttggcacagaggcgtgcgtcgcagcggtggatgcggaggcgggcgccgcggcgattggcacggaggcgcgtgtcgcagcgatgggtgtggaggcggcctggctatggggacgactgcttccccgttttcttcaccaagaccaagtgcacgtcggcgccgacgtggtcctagcactcctcgatgggttcctcttcgccgctgcaccgacgggctttgcttcgacccttcgctcctccacgctcggccgccgcgtcctcgaccttggtggctcacggcgtggccggtggtcagcaggggagaagaacggcggcggcgttcggtggtgaagacgggctgaggtcggggagaccggaggccgccgccgccgccgtgctccccctgtcctcttcgatctccccccgtgctcccgccgctgccacccttcccttctcccgcgtcgccggccgccggacatcctctccagccttgccctggcgaccgtctccccacccgccggccggctgcccattgaggtgaaaagtgagagagaaaggaggaagggagaggaggggagagagagagggggtgtgacgtggcagcctgacaagtggggcccacgtgggttccacgctgactcagtcgccccgtcggctaaaaccgggataaaaaccaccgaaggatctgaacgattgagggatgttatatatccggttttgcggtttggggacgattttgtaactcgatgacaagttgagggaccttcggtgtactttttccgagtaggaaacggacgattgtgacatccacggaaatccgtggaattcggccatggcccataggtggtgggctgtactgctgtggccattcgacgctgggctgtggcctatgggtgtcccgtcccgcgcgcaccgacaggcgcggccccagcccataggtgttcgagagcctttcgctgttgggcttttccgcactgctggaaccagttcttgacagtggacttgtaggaaagaggatcagtcgaactcgactccgtacttgactgcttctgattgaagctttggttcttaactattccatggataaacaggatcggctctgtttaaacactcgcgttcatgcattactcaagaatttgatggtgatttatctgtgggtgagggtaactatatactccctccgtcaaaaaaaacttaacttctagagtccaatttatcttcagcacataaaacgagaagttatatcccttaaatatcatttacctacctatcactattactacattttctattgatgagggttatttgggtcatttttactccccactaaatttgccttgggatgttaggaatctttttttttaggacagagggagtacgagttattgatagaaatagatggactcatagaatgagtgctttcgtcactttgttccatttccacccaagtacgggaaatgagaggccatgctaactctcagttttaattccttgttttgttctttgataaggtatcggataataaatctacaaagaaaagaaaatactacttgcctcactatcaaactggtgtccatatatggagttggaatctgggtttaaagaagggaaggggcggaggaaagatggccaatctttttttttctttttactgtcatagtgaattggcgcccttctgcaagaaaggcacgtaaatccttatcacctttgcaaaaaatgtgaatgttctgtcttcctcagggagtataaatttggagaccaaaaggaggctggttgacgaagtcataaaggagtctcactccggtgctttttacttggaagtgctttctacttggagtagaaagtaatttggatcgttgatctcatttaatccaaggtttcagatttatttctactaccacctcacttaagggtagtaaaatcatggagggtattattgtctatgaaaaaaatatttgcggaagggtacaatcatcttttacattcactaaccctagccgggctctttcctccgtcatttgttcctcacgccgctgcccgaagagaagtcccaaatcgcatccggcgccgacgccgagcgaccccgcctcgtggctcctcccttcccccgccattgccgcctcagccgaccttgccggctccaacgtcctcgcctcgtccgccgccctcacctctttaccagaaaatactagtatcctacaactcacaactgaattgtgaactagtatattgaaaaatttatagtaattccattacagctaacaaatgtgttctgttgagtaccctgatgaagtccactccctcgtgtcgtaggcaagcctcacagcattgttacctcttatctggcatccatttcctgcaccgtgcatgttgtttggagttgagtttactcatgttattattgaaattggatacaggatgatatcctataactccgatgcctctgcaacgcatctccggatcaactttcgggtaaacagctacttatcttacctgtggcctgactaacattagttgctcataatattttctatcttatcttacaattattgctgtgaagcactcctatttgtttagtttcttgagggaggctcgaagctgtttctaatcttatcaagactagagaagaaaggagaataaccagatgccaatgcgaggctcaaggagtgttgtcccatattacctctgactttaattgtactattttacaagtcatatttttatgtgacctcaactgtgcttacatgtttattgatccaatgcctctctgacttctttgatgttggctcgaaactgggataaggttgtaattttgcacataggaaaacctaggaccttgaattgtatagttttaaaatcatgtttttatctgatctcaactatgcttacatgttctggtgcccttgtgacgtcatgttcggtgaatgagtgcaagtgctatctatacagttgctccgtgtgcatgtgtaaatgtcaatggttccacaaaacagttgatcagtaaaaaagcagctctttctgagattggacgatgtcaccccaatgacctatcggtagtgtactacacatggtccaattttgaacaggataatggtaatgttttgagtgttgctaacgccagatggtctttagaaaaagggaaattttgctataggatacttgttatgtgtggttttagctctatgacactgcccaaactcatttttgggggaaaacactccatacttttgggggaaaacattccataaacatggtaatttgccagtggacaccgcgacgattaaaataatactttccggttggggaggagagagaaatcgcgtgaaatgtcaaaaataccattgggcccacatgtcaggtctatctcctatctctctcctcatctctctcttttctctcgcgcagccagccggcgactcttcccagcgcgtcgcagccagccaggtcctcccctcgtcgcggccggtcgacgagcatctcgtccggcgtgcaccatagccggtcatgtcctccccgtgtgcgtggctgccgacgagctttttctccgtagccggccatccttccacaagtcggtccctccccctgtcttgctcgcgcggctgcccatgagcttctcct

SEQ ID NO: 7178 - DNA, 30569 bp, Oryza sativa
  unsure (1)..(30569): unsure at all n locations
tggcctatgagatgaatggcttctggtctctgaaaacctcatcaaacgtctatcattctggccgtggctatgattgcagctagctaccgttctctcgatagataatacggacgatcgacgcatctagcaatgactctgaaatccaggtacttaccatctgcaaaggatctgttatgcgctgcttgtgctaagtcacccaatcgttccccacaacattctcaatggcaactgctcaggtagtgatgagtttcacgcgctctaagcccggcccgcgcacagttaggaggattggccgctatctgagcggtttaaagccaaggagcaagaaaacggatgcgccccgagtaatcgacccgtttcccaagcagagtttcgcgaaacctcccctcgatgtgatagcatcgtcctttgtaacgatcaagactggtaagtccattagtccaaacagttgtccatgtaccagtagaagattcggcagctactgcagcccctgcttcaccttcatatttttcgtggtctatatcatgcgagttatagcagtcctaggaaatggttggttttagaatacacgaaagtgacgaagttgctttgactactgaaccatgcctggatcgtcggagcgaattggatgatcgggccgagggctgccccctcttccccttgctctcctttccttaatattcaccgtcgagtcatcaaagccgtcaactaattcagaggggctcggcgccctttgagtctatagccgccaaatctaaatattccttaagttgtcgtacggcgacgtcagatcgatgcgtctgttaattaaacgttaataacattgatagaagaaggaggttaatttcgtggttaattaacttggacggtattgtacgtcgttgtcgatcggtatcgatttcactctcaatctttacgtcttctctctttttctcgtctttgggtacgatgattaagcatgacgaggacaggtgctgagctgcatttaggttaatttttgcatatatcccccaagggccaaggcccccactgcataacaactcgtttaggaacattaattagtggggctggatgtatgagccactcatcagctaataaaatgtatagtagattatttaaaatatgcaatcaatacatcttattagttttatgttgtcttaatttttctctatacttgttccatgctatggcatgcagggacggatattgaactataagagtatgatagctagggctgcagccctatttccgaacctaaatatcaattgaaattgcattataaaattttaaaagataaagacaaaattatgtaaattatatcgattgagtcctaggcttaaaaagattccggttccgtcactgattgcatgcataattaactttcacttcaacttggtaacttctacaggtattagcaagggttacaattcgacctttttttctacataaaaagcacaatagattatcaaactggtgacaaaagagagtgagatcgtacttgttgggtatatattaatgaaaatggaggaacaatcaacatctcgctcatttgttgtttagtgggaccaagaaggtctgactggatatattacaaggacacacgtttttttaaaagaaaaatcaaagagttacatgtttctcttttgctctatggataaccaagtaaactcgaaccacttgcatccctcttgccgttttgtatgcttgttacatcaatcctagtgggcatgcattacagtatgttttggatctagcatgggttttctttaaggttaatttgatccatgtcattgcaactatgtcgtattgaaaaaataccactactattcacaaaatcgggtagatgtcactacaatcttctaaaatttgaaccgtgccattccatcacgatttcttttatctccgtcacactttgtgtcaccgcatcttcattctaagtcaatactagtcgtctttgtctccaagtagtaagcccgcaccggaggctggccggcgagctctgggaaggctaggcggtggtcgtgggtggtgatgactccatgcaatggtcgtggacggcacttgctgctccgcgcctatcccttcctccatggcgaggctgcggccagaagacggctgccttcgactatgacgaggcggaggtggaagtgctcctccacgcggcgcagcagatccccttgatgctgaactcatcggctgcttcgacacgctcatgtcccaaccatcggatccgaagccgaagcggcctgatgctctccccaccgccaaggcgggatggacgaaatggaggcgtgttttgcagcgttgaagggggcggcatggctggagaaggaggagacaagatcatggttggcaagctcgggaaggaactctgcatgcgggacaccgagctccgcgctatgcacacactagaggagcacgtccagccgaggagcactctcgccgcgctcaacggcctccacctagatctctagcactggcgttgacgggctagctccgttggatatggccggagcgtcgtgcctcgtcatgtgcgtgctcggcctgcaactggagaatatggtcttgtgcggcaagctcgacttcgccgtgccatctttcggttcgagaacaagttctccggcaggagacagcaagggattgaggagagagagctgtgagggatgtggacggaggagatcgtcagtgagggacaagcctagagccagcggtggaggtgcgggacaccgagctctgcgctatgcacacactagaagagcacgtccagacgaggagcactctcgccgcgctcaacggcctccacctagatctctagcactggcgctgacgggctagctccgttggatatggccggagcgtcgtgcctcgtcatgtgcgtgctcggcctgcaattggagaatatggtcttgtgcggcaagctcgacttcgccgtgccatctttcggtccgagaacaagttctctggcgggagacggcaggggattgaggagagggagctgtgagggatgtggacggaggagatcgtcagtgagggacaagcctggagccagcggtggagggatggggctggggacgcgagacgaccatgtgatggggatgatgaaaatcatgatggagtggcacggttctaattttagaagattgtagtggcatctacctggtttcatgaatagtagtgatgttttttcaatacagcacatttgcactggtatggatcaaattaaccattttctttatcaagttaaaatgttgtgtgaacatagattgtttcctttgcaccaactaagaatgcacacaactatatataatttatgagcaccaagattaatttggggattttgttatggtagaccgatactttgtgaaccatccatcttattattctttattgatccgatggttaatgttcatcttacatcataggaggtaagacgtcatctacaaccatgtaaagttaattaatctcaatcttttactacaggaaggaaaggagcgatgtttacttgtgtcactataaaaaaccattactaatacaataagaattaactagtaatttcatttttttattattactagcaatagtacccgtgcgttgcaacgggaaaaacaccatttgatattgtgacaccttgaaaacctcaaataggtaaaaaaaacaagtctaatttgatatattaacaaatagatagaaccgagtctaatttgatgaattagcataggatttaggatttagttttagatttatttttcgagccttcttaggcgtttatccgacggactttaatttaaaacatctgagccacattgtttgataaaatttgcattcggcctaggtcttctcatccggtccaaacttgggctggcccatcttcgtcgagctgagtcaattcgacagcccgcaagctgagcagctgagcgcggcccacatatgcggggacagtccgatgcacttccgcggcccattgggcacagtgtaatcggcggtgccggtctgacgttgggcaaatctgagccgtccgatctaatggatgctccgatcgtccccgtgctagatgaagcgccgaccgggagagaggggcaaaaccctagctcccaaatccctctctcccgatcctatttctctccggcgacgagcgagcagaacaacagcgaaggcagcgacggcagtccggtgagctagtgagcgctcctgcttcgctggctgggtggcgcacccgagggtggtgcaaagttgtgccacggtgttggaggttcggctaggcaagcgcgcaaacggcgctgagcgctgagcggcctggacctttaagattagataagattttcacggacgacgaaagtaaattgaatcaaactttctttttttttgttttatgttttctttcgcccttttttcgttattacagaggacagaaacgattagtagagatagagatagagaagataaagaaatatagtaccatgtcacatataataggattcgattttttttaccgcgtcacatataattctttgtttaatcggacataattcatttttataattgttttccaccctttttttaccgcgtccacggaatcagatttgtttttttgcccggtttttttcacaagattttttttctcccgattcttttttttcgaataggacagattggttttttttttttgcctttcattacacggaatcgtcattgttttttttgccccttttttcgcccggctttttgcccgatttcttattttttaatcggacagattgggttttttttcgcccttttctttacacggaataggattcgtttttttcgcccttttttcattcggttttttttcgcccgatttttttttgcacgaacgatggaaacatttcatattttttaagtagtagagataaagaatcggacagattttttttaattttttttcgtcctttttttaccgcgttgacggagttggattcgtttttgtttatcggacaagttccatttttttccttttttcgccccttttttggatcggacaggtttggttttttttttctttttttcgcccggttttttctggataggacagatttggttttttcgcccggttttccttttttcacctttttttatcggacaggtttggtttttttccttttttccgccatgttttttttcggacaaatttggtttttttcacccgattttttttacggacgatggaagcacctcttattttcttaagttgtagagatagagattaatatttaccagaaccagattacaatattgatttgtctttacttacaatttgtagtagaagttttcaaatattttcggaattttaaggtaatttatttattttcttcactcacagcaatttgaagagatgtttaactatggtctcttctgataatagaatctatgtagaccgtttatcttttctaatccaataaaccgaatctttttatactactacaataatattttttatatatgtagtatagaactcataaatagtaaaatgagcgttgttcaactggttaggtctattttgatggaaccagtctatctgggttcaaattctaaatttgagatggatgctcacatttacggccaattattctttcagtggtaggcgatttacccgtcagagacgtccgtgatgacggctataatctcaagatatatcggtccatttttcggaggtgctcataagggtagggtatatgtgtatgtgttcatagaggtgcgcgcgttatgaacgcccgtgtttggattgtgttttaaaaaaaattcataaattaaaggccacctcaaaggtactcgatgatctatacagactatactcgtataatccactctgaccttcgcccccctatggttacctatttgattacctcattcctgactactgaaaccatctttacttctctcttagcgcaacttccagtggatatatcaaactctaaacaaagtgttttaaaatgtacagtagtactgtggaagtgttctaaaacaaatttagtgatgtaactttcgtatatcgaacactccatgtacaaagttttgaacgtttgaccttttgcattctaaaacgttaatcaaaagaaaaacatacaaacagtacaactatttctaagtatgattgtgttctaatccactaccatatccaccaaattaaatgtgttctcaatattggtccaatttttcaaaatccagagaaacatcacacaattttggcaggcacaagaaacagagtattgtttgtgaagggaattttgttaagggcatggccacatataattctttgtagcttaaaaccctaacttttcccttggaacattcaagtgatcaaacaactggtgacccgatgtttttaaagattggccgacctattttaattcagaacgagaagataacttgtgttgttagctggattataggccattatgcttattaacgataaaatataaaacttttatacatatattgtcagtaacttaacagctagtgttgaataataaactacgaggagaaaaacattaaaatcaacttaaaaacaatagttaaattttaaattttaaaaatcatggctaataagccgaagagcaaacgatacaaagattttgcttgcgaggcatatgatggcacattcgctccttgtgataaggggaggcaggaacaaactttcattagttgtatcatgagacaacttcacttccaatgcatccggcatccctagacaccaagggcggcaagcgagggaaatgcatgaaagcggagatgaatgggacacaagcagttaattaggcacatcgctttcggtttgggcattgtgcgagggccgctctcgaataggcagcctgtgccgttgtctgttcttcacataacacccgttcttttcgatagcaactcgtttattttttttaaagagaatccatttctagctttcttcacctcgcttgattgtaaaatccatcgatcagaactgtctcacttttgtttctttcacggttcaccgtggatcctggctaaaataactaaagcaaattggcgaactggtttagttcaaggtctctgtacccagccgaagtataacagaaaatgtgaaactgcatcctacagtttacaagctgagatgtacttggtactgcagtggtaagaggaggtatttagcttcctcgcaaaaccagaatcccgtcagtgatatgtgtaaactcgaaataatgataaccctattggttagctgattaaactagaaataatgagctgcatgggtcttaacgagtcgagtagtatattttagtgcaaatgataaccccatcagtaatctgtgtaattaagcaagctaaaattaagctgaggtgccgtagctaaacgtaatacttcctcaatcccagtttgatcatctctaatagcaaagataatactccctccaacccaaattaattatcatatatatttattcaccaagactaaagataatttaaatcacatcaatcaggacaccatacacacattctcccacattacatgtatcgaaacatcatgctaaaagcaaggataataatagagctcacttcctactattagggcacccataatggttatctataggctctctacaagagatccatatcagcatattttcctatttgaaagatattaaataaagagagagagatcaaagctatctactaacttgaagatagtctatagagaaaaacgaggcaatgtattagagagctatagatacccatatagacatattattgaggtggtttactattaatctagtctattgctgagatgtacatgttttatagagagcatcttactttaccattgcgggtgctcttagctaatcttaaagccaacacatataatagattagctataaggttggctacaattttcttctcatctctctatgtctcacttatacattaattgcatttgtcttggagcttgtgttaagctagctcttgcatgagagccaacacccttaattttttgttatatctctcctccacataagcttatagtagccttatagctcactattatacttgctctaagagcaagtttaatagtatagcccactactagctctatatcatctatagtcaatgtaatagccaattcatacaatagttgcttactatactattaatatttggttccacctatcatacacacattacatcttggagtccatactgtagctggctatagatctgtagcccgctgctcttctctctctttctttatctctctaaaatatgtttatagctagcttatagactgctactatacccgctctaataacaccatagcatgtacacattctccaatgctgcattaattgtgttccgatgaaatacgagtccatacggttatatcagagtaagtacaatagcaggctataagccagcataactacataacgagaagaaaagagaagagagaataaagcgggctacatatttatagctagctgcaaaatggactccaagacgttgtgtgtatatgagaggtgggaccgggtattaatggtgtagtatatttttatagataactattgtatgaatgggttattagattagctatagataatttggagctaatatttagctatcatgaccaatttgagaaaatttgaattgcattatatgataatcaatttaggaaggagggagtaatggactataaggtaactatatacttatatgaataagagagataataaaaaaaataaaagatgttggctcttatataggagctagctttgcacgtgttccaagacaaatacgctgaatgcataagtgaaagtaaaagagaggcaaagaaaatttaaaaacgcccttatagctaattattatatatgttggttttaaaatagactaataggtggcagttaactctactattaagcaaaagacaccaagactaaggatgctaaaatattcatcattcttaaattaatctttatcggttaaggtgctatatcattttgtgtcccgtagttttactcatgctttaaatactgtatgtcattgtgcaaaaaaaaagttagtcttagttacatacgacgtattcaatgatatatatttacttttgcgcaaataaaagaaaagatacttgttaagagatgatcaaaataggataggatagaggaagtgcaatatatgatttttctattaatccatgatgagagagagatactttagaaaattcactcggcggatcatcgaatctccctaccatcagcccaacgacacgttaatcacacagccaagatgctctcaataatggccccatttgccccacgacgcaaatttcccaacgatggaaaacaaaactggttaatcacattcgcataacaaaccatcgatccatcgcatcacatggcagcagagcgcagcggccggccattggtgaatccggcggtcccccgtgcgggatgctcaaattcatcccagaaactgaacaagtatgtccacgttcatcggcaagtccagattcatagatatttccagattcattgtaatctagtactaaatgtagtaacatattatagttccgatccgtaaatatatctagattcattgtattagtaagtgtcacatctaatactccctccatctagttttgatagacatatttttaaatctgaaaaatttatttttgatagccatattttaatctaatcacttaccatcttaatgattttctcggatttaatgcgtggctctccattcttgcacacaagattggctagatgggcatcgagaaatataaatattaatgaatcgtttgtttacaaggaataactagtagtatatttaaatatatgataagcataattacttatttttgtcattgtggcaagataaaatatgactatgaaaaatagatagatgaagcattatagcaagtttaatagtatagccaactactaacttcaaattatttatagtcaatgtaagcaagttcatacaatagttgcttactatattattaatacatggtcccacctatcatacatacattacacatcttggagtccgtgatctagttgactacagatttatagtccacctctctctatttttatctctttaaaatatgtttatagctagcttatgatctgctgttggtctgctgttgcagctgctcttaagagagggagtagcccccaccaacccctccccacggtgcagggctcaccctcctgtccccagcctcacggcacccttgatccgtgatccgacggcccgatccgtggcatgacgcgcgcgccgggccccacgctgactagaccgccgcatccgaatccccaagaggggattatcctctcgcgcacgaggccgctcgaaccggcgcccgccacgtgctccccccggcgtcgcagacgcgaggccccggagccgcgcgcgccggctataaattctcgtcccgcatctcagcagcgcacagcatcacactccccacccatacgcatccatccaccgtctcaatctcggtagtaatcctcgcggcctcgccgttagttccaccaccgggcgccaccatgtgcgggatcctggccgtgctcggcgccgccgactggtcgcaggcgaagagggctcacgtcctctcctgctcccgcaggcaagcacgccacacacccccgcccgcgcgctgtacatgcacaatatcttaattctcttatccatattttagccggacgcatgcatgatgatcatcgatcacgagggtgatgggtgatgaacgtgccggtgcgacacatgcgtgcgtacgtgttcactgttccggtcaccaacttgtcatgcacccaccggctttaccgctcttgaacttgctatagtgaagaggcgtagggatcatggggggtgtggtggttgttgtggttttgtccttgtttatgtatttttgtctctttgtgaggggttcgcataggaatcgtaaggatatgagacagtaataacaaaggaccgacccagaaaaaaggaacacgggaatcttcgttgtgcattaagacccatgggtttagatgttatttttcgctgttgccgtgatgcgtatacttgcatggttcttttggggacggattggttctttctgaccgggagacttggtccggtgtgatattgtaggctgaagcacaggggacccgactggtccgggttgtaccagtgcgagggaaacttcctcgctcagcagcgtctcgccatcgtctccccgctctccggcgaccagccgctgtacaacgcggaccggaccatcgtcgtcgtggtaagagaactaactcatccatcaatccatcgtcagttcgtcacatgtgacaagagctgtcacgtctatctagtttgctgtttactaaaccttttgtgctgggtggggatcgaattgaaggccaatggagagatctacaaccacaagaagatcaggaagcagttcgcctccaagcacacgttcagcaccggcagcgactgcgaggtcatcatcccgctggtgagaccgaaatccgcccctgcggaacgtaatcaaggagatgaaaacgattaaacgtagctggatgtactgatactgacgttactgcttttcgctgttgtgtgatgtctccaaaagtatgaggagtacggcgaggacttcgtcgacatgctggacggcgtgttcgccttcgtcctctacgacacccgcaccaagacgtacatggccgcccgcgacgccatcggcgtcaaccccctctacatcggcaggggcagcgacggtacgtacgccgccgtgtaccactctgcttcaattcttcacgtctctgctgtgaccggaaccgagagagagagacttgacttgagttcactgatgatgtttcatctgtttttctcgtcttcttccttggctgtcgccgtcatgcacaggcgccgtctggatatcgtccgagatgaaggcgctgaacgaggactgcgtggagttcgagatcttccctccgggccacctctactccagcgccgccggcgggctccggcggtggtacaagccgcagtggttcgccgagaacgtcccggcgacgccgtaccagccactcctcctcagagaggccttcgagaaggtgccaagctataacacactgacgagagctagctaggagagatggccttgtacggtagcgtgatggtgaccgacacctctgacactgaccgtgacgtacttgctctgctccgctgcctttgcaggccgtcatcaagaggctcatgaccgacgtgcccttcggcgtcctcctctccggcggcctcgactcctccctcgtcgccgcggtgaccaagcgccacctcatcaagactgaagccgccgagaagttcggagctgagctccattccttcgtcgttggccttgaggtctgtggctttgcccatagtttttgggacgacttatcttgttatgtcgtcttctctaagaaccatggaaagtgattttttttttggcttgttcttggacgtttcagggttcccctgacctgatagctgcacgagaggtcgctgaccacctaggaaccatccatcacgagttccacttcactgtccaggtaaaatgaaaagaataaaaatgtaggagtagctgtccagtgcaatgatcgacctgacagaatatccagcttgaacagctcacaaaaaataaaacatgtctcctaagcaaaatttcagataattaaagattccaatcagaattcgtaaggcaaaattttgccccaaaccatatctcatatggataacggctgggtcagaaaactgacagaaagatgaaatatttggcctttcttaggatggcatcgacgcgatcgaggaggtcatctaccacgacgagacgtacgacgtgacgacgatacgggccagcacgccgatgttcctgnnnnnnnnnnnnnnnnnnnnnnnnnnnnnnnnnnnnnnnnnnnnnnnnnnnnnnnnnnnnnnnnnnnnnnnnnnnnnnnnnnnnnnnnnnttcgcccccaacaaggaagagttccacaaggagacctgccgcaaggtagcaaccgctgacactacaaccgcgactaacagaagctgttgctgaaattcctttctgatgctggcacgaaactgtctctgaattttctgactctgatgtacgtgcaacgcaggtgaaagcacttcatcannnnnnnnnnnnnnnnnnnnnnnnnnnnnnnnnnnnnnnnnnnnnnnnnnnnnnnnnnnnnnnnnnnnnnnnggagttcatcaacgtcgccatgagcatggaccctgagtggaagatggtaaatttctcgtcttacatgaggggaaacagctgatgttatgttatagtcccatttctgctgatcagaatgtgttgacaatttatttgtgtgcacgcagtacaatgctgatcttggtcgcatcgagaagtgggttatgaggaaggcgttcgacgacgaggagcatccttacctgccgaaggtagaaatggcagttcttttttgtttcttcagatgcaatggtaattttgtccgtgttctgaactaatacttctgaaattctccacagcacatactgtacaagcagaaagagcagtnncaatgatagcgtcggctacactggatcgatggcctgaaggctttcaccgagcagcaggtactaattaccgaccatttccctgtgtcctgtcctataaatcgcctaattaaattgacccccgtttactctgtcatttcttcaggtcagtgatgaaatgatgaagaacgctgccaaagtgtacccgcacaacacgcccgtcaacaaggaggcgtactactaccgcatgatatttgagaggctcttcccgcaggtgactgatgtgtattcaagcgttgtacagtacagtgtagtactactacacttgtactagtactaatttggaaccgtgtgctgacacatggtgaaacgcgaatcttgatgcaggaatcggcgagggagacggtgccgtggggcccgagcatcgcgtgcagcacgccggcggcgatcgagtgggtggagcagtggaaggcgtcgcacgacccatccggccggctgatcgcctcccacaactccgcctccgcctccgccaaccacaccaaccacgcaaacgccaacgccaacggcaacagcaacggcaaggccaacggcaactgcgcgatggcggccaacgggacgaacggcgtcggcctggttgtggccaacgggacagccaacgggaagatggaagcataacgctcgaagctggccggccggacggccattgatcgcgctagccgatgagatcgtcgacggccgtgtggtgtacactaaaaaaggataaagctagtactagtaggtgtgcgtgttttctcaccaatcgcccatgacgttggcgcgttctgtagtactacccgtgtacgtgcgtgtttgttgccgctgctgttgtaccgtctccccttgtcgttgtacgtgtgcgagagagaccgatccaagtatgtggagagtgatcgatcactcatccgaactcatccttgaaacgatacaccgtaattaatatatctcctcatttttcgctgtcattatccgtatcctttgtccgctagctgctaccactagtcactagtgggcttgcgttgcgttgcgtgcttgtgacttgtgagagccgagaggctaggctacaagtgggcgtagaggagtcggttccatgtgtccggcacgccggggatgcaccagtggatgcagtcggtgtagcgctgcggatcggtcttctcctcgtcggtgacgaggaggccgccggtctcggtgtagacggagacgtgggcgtcgacgcggtgctccgtgagctgggtgatgttgagcagcgtgacgggggtcctcatcctgcccagcacgtcggacatcacctccatcatccgacggtcggagccgctgcctcggtagccccgctgcgtgatcggccacgtctcgttgtagcacctgattcctccttcccttccccagtcctcgctcctggcacacggtacacgatattttaattacacccttatcaatcatcgagcaagttggagaggatgagtatgaatgtatgatgtgtgtgcctcatgtgcgtggtggagatggacatgaagaagacgcgggtggtggcgggatcgacgttggagtcgacccagttggcccacgtcttgaggcccagccggtacgccacccaggcgtccagctcctcgtacccatcgtccccgaacgatccccacctaagaaagacgtgtcgtgtcggtgtcacggggtgtggggttatttttgcttgttggacggcatcgagatttatcgttcgagtgacgggtggcttacaccgatttgatcctgtagccggtcatccaccagacgtagctgtcgaagacgaggatgtcggcgcggcgccagtgcttgccgtgctcctcgatggcgtcgacgtgcaggacgcggccgcccgcgcccagcgcgatgttccggtccgagttggactccaccaggaacggcgcccagtagaactcgatggacgcgttgtactcctgcgtgcagatttgcagttagccgagagctaattcgaggccttctctctgccggcggccagcgccgtcgtcgtcaagcgggtagggacgtactttgacggtgtagacggagagggtgcggctgcgctccatggacttggcgcccggggtgtccgggacggcggagttgacgaggcagacgaaggagagccactggcccagctgcagcgagtcgcccacgaacatgatccgcttcccccgcagcttctccagcatggacacagggtcaaacctgccatggtacacgatccggtccattattcttcagcaaagtgccaatgttggcccagcccaattacaatggaaaaagaggatactgtggaaggaaagattatagggaatatctttacggccctgttcgagaacccaacggagcggagataaagttttgaattttcatgacatgcttcttaaatggctaaacggtgcgtttcatacgaaaattttctgtatgaaagttgttctaaaatatcaaattaatccatttatcaagtttgtaataattaaaagtcaattaatcacaagttattactgtctcgttttacgtaaaacacttaattttcatcttcaggagattcaaagagagcctacgtcgtttaattgcatcctaaatcgtaataccagaaatctttacccttcatctttgcaaaaccattcaaatcgggtcccatagcagtattaaaggctgctttgactaacatagcttcctagccaacaaaaaataataattaaaagacatgtgggggcccacatgttagggtatgtaacatcccgcctcccccaagccgggtccacttacatctgatagcttcggtcacccatcccaaattgctctaggccaagcacgcttaaccctagagttctttggagattggcttccggaaaagaagttgcaacttgttgatatgagtattctattaatcctattaagccctaggccgggatgttacaccctcacccccttaagagagatcgacgcccccgtcgatcaaccctaggccaggaacgtcctctcttggccacgtccatgtgtccagtgccagcgcatgtgccatgctgtgtaaccactcccggtctacaccagccgcgcaactgcgacacacgcgagagtcggctctgataccattttgtaacgtcccgcctcccccaggccgggcccacttacatctgatagctttcataggtcatagactgccctcacagaccaaatatcttttctgcacactttgtcctcactcatgtgcacccgggaagaatttcccggtcggtcacccatcccaaattgctccaggccaagcacgcttaaccctggagttctttggagattggcttccggaaaagaagttgcagatatgagtattctattaattctattaagccctaggccgggatgttacagggtatttctatttcctccaaatccaaagcggcggccagcgctgataggaggagggggcagtggcggcaccttgccttgttacggccaagacggtgggagagaggagacgaggtgatggcgatagcatggaccagatccggtgtcgacaacgccctatcgaagaagaggcggcggaggtcggtccgagaaggaaccgacggtggagggtggctgacaacccagaggctagagaagagcgtcgagaccagtgtcctagcgaacggagaaggctgagtaggcgagggccttccaccaggaatgggcttggtggtggaggccgtcaactcgtggcggtgtcgggtagcttggaccggcggagttcctgatagggctggtacgtggagatgaggtcttgcaacccccaagcggcctcctccaaatcggcagctacctcgccttcccacgaacgactcgctggctcccttgcttgccacctattctcctccttggatcaccagcgatccctcgtcgtcgatcgttgacctcccacctctactgcctctcgcagataggctcgccgaccaccatccctctccccgttagcgagcttgaagagagagaaaaggtaggtggggaagagaggagaggtggaagtctacttagatgtgagccccatatatttttagttttttttactaggatgccacatctatactatcttaggacttgagttgaacggttttgcaaaggtgaggagtgaagatttctagtattacgatttatagggatgccaattaaactcgatgtaaagatgagggatgacaagtggacttattccagattatggggaccttggaaagaggcactaggagtatgacactgatgaacttcaaaatgccaaaaaggaaaggggaaaaaaaagcatagctgaataatctgagattataccaaattaagcaccactgaaattagcgcatacggttgcttgctgacctcgggagaaggcagtcatcaagatgccaatcccagtataggtagtcgctgtccggcctgccgttcctctggcaagagtcctgcctgtcaacgtatgggcacgtctggtccgtgtaaggcagtttcttggacctgtcgtacgcccagtacccatccgtcacgctgcaccgggtcgcgttgaacgccatcttcggcgctggcggcggcgttgccgttgctggttcgaccgagagcaccgctggcggcggcggctgatcagcagagagcaacgccgacgtcctcatcacggtccgcagcgacgttctcttcttctccttgtctgtcaccttctccttgacctctgaaaagatcaacaactgtcaactggagcactataacatgtacgctgcagaaggtggagctaggcgcaatgcatggatgcaaatatgcattgcaatctgcaactacgtcgataagtttatgccacagattgcattagtgttgtgagtgatgattagtgatgggtttaccagtgagaccccggaggtcctctgtaaagatgatgcccgcgagagccagcccgccgatgatcgccaccaccactgacagtggggcccgccccttcacgcgcttcattgcgggaagctgaaccatgtgagctcactacgtgcaggcagaggcactgatggttggcttcttccagagtgagctgaggtttctgtgattgcagcttcaggtgctttagtagcagattattggtacctaatggtgctcatgccggtgcaactgcagcaagaaatgtaattaaagtgagggaattatatgactgtactgtcagggacagagctggtgcactaggcacttgctttttaacgacctatttcacttgagtaggagtgaagcaaaggcaatatttggagttgagacagccaaccgaagcgtgagcatcttttactgtatttcactgtcgttgtcaacccgaaaggtgctgaaggatactgctttgaagtagaagtactaggcattatacgtgctaactaatctgatactgttccaacaaattgtgttctcaacgcctgcatcaaaaactgcttattggccctgagccactgagtgtttgcccaactgcttctgctgtagtgggcaggggcagcaagtttcagacctgagtggttcgaaagctgcagatcactaaatcatgctttgcacttatggaagaattgtacgatatcatcgttcaattatactgcctgttcagcgcccgatttatttatttaatcggttatattatgtggtaatgtagttgccttcatgctgtgccgtgtaccactcgagacttcgatctccatccgagaaaagtccaggtttggtccctcaactcaactatggcattgttcgtatggtctatccactttttttttattagagaagggcatttatacccgggcctctatatccaaccagatatatgcagtatttttaaattaggaacttagcctttaaataacccaatctaaatttatttgaactgtcagtacaacccctagactgcatgccctttcacatggtctatccactatacgaagctcttcattgttgatctctcagttcttgaaatcaactatatttcatccttagacctaaatcagggtagtttgtggtgtcacgtggcatctaattagcaattttaagtaaattgtgggattttctagatttcaggcgtgtgaaaattgataaattccatatacctaaagttgtatattgctaagctgaaaattacagatgctgcgaaaatatgtaactttagttcaatttaattttaatttagttgttatatttcgttttactttgttttttattaagtttgaattttgttcaagtagtttatttcgtgtataatattatatgataaaataatttattgtttaacctttcatctaaaaaagaggcatttttttaaaaaaataatgagtaataggagaatgatgagaaccattgaattatcattcaagggaagaaaaaggtggctgaaaattttgaaaaatctaggcacatcaaacgtaaaacattcccataactcgtatatataggatattggtgagaaagaagaaaatgagatgatgttgtcaggtagttttgtagagtttacttcgttttagtttttgttattatctataactatgttgatgtcagtggcgaatacaggatgtaaattgagggggtgctagtgtaaaaatataatgtgattaaaacaaataaagatatatcaactaaagtattttccaatgaataccaaaagcgcatatgatcaaaacaattttctctattttgatttgtgtctatcttaaaatattcataaaaatctgtgaatatattgttttgtatactcagagtatattctattttaccagtttggacagtagaagcagggaggaagcctgcatctttgccgtctgggaattttcttcagtaatgactaactagacttgttaatgattaattaggggcagggattagagctgggtctggcgcaccaaccagccccaacagtggatccgccactggttgatgtcatcactgttcactcatatgaattccatgtaggcatcataaaaaaccatctcagtttagatacagagataaaatgtgaatagttttgagagttaaagggaccagtggtgaatagttttgtagctaagggaccaaacactactaaaaataaaatatttttgcatgcggttgaaacctatttttccatgcggctggggccgtccgtctgctcggaaaggtatacgaaaatagcaattttttcatgcgagtgatgcacccacatgtaaaaatatgttttttacgtgtggatgcttatgtggtccgcccgcaaaaacaaaaacaatgcaaaaaaatataaatataaatcccaaaaatcgaaaatcgaaaccctagacatgataccccccactccttcgccatcgtcgttggatccgtcccggtcgacctactgttgtgcacccttcagtcatcgagagagaagaagccaagcgagagaggaaggagaggcggtgggatctgcgcgatcggaggccgagcccgccgtccccgagcccactgccgctcccgtcgtcgtcgagcccgtcaccgctagatctgctccggccggatccacgatcgacagatctgctagccatcgggattgaagacgatgagggagaggaaggagaggcggcaggatctgcgtagttggaggtcgagcccgccgcagccgctcgtcctcaccgacgtcaccggtactcccgcagcctcctgagccctcgttgccaccgccgctcgttcttgtcgccagcccgagtaggaagtgggagaggagggaagaagttggagagaaagggtggagaaaaataagtggggagacagaaggtgaggagatgataatggaactttggaaaattttaaaatatgctgtaagggaagagaggagggaggtcaaacttgtagataggtctttttcgtatgcggctacttaggaggccgcctgaaaaaataattatattttcgcagaagggcctcctaagcaactgttcgcatgcgacccttcaactaatccccggggaacgatttttgcaagcgagaacggttatgattcgtctacaacttaatgatggtcttgtctagaaaaatcaattctgtagtagtgaaaatcgtcccaaaactatatttgggggaacaaatttggacttatctctgttgtttataggttagacttttggagggagaagtatcgatcatgtatactatgtgttatttatgcatataaggtagtactatatatattatattaacgtacgctcctaggagctataaacgcattgtagttttgatatgatgttcgaccgatctgttggagagatcttggtatgttgtttgcttcgatgctttactgatcgattgggcctgttttacattttactttatgatgggggcctataacatacaaccatcttccaaagttgtgctttaggccggtacaagtatttttttttcatgtgattcttggtcagtgatcaatgatcagcgaacacacagcacttcaactaaaagctaattatttgcaggcaccattaaaatggatgtagtcaccaacagcaacctaatgagatttaccgatttatttataatctttttgttgtttaaacttgtgttgaggcattcacagtgatgagtgcacattcatcttgtatctattccatattatcgtgcgaaactcacaacacagtaaggcaagactttccctattttctaacgccataggccacatatctctaactcagtaggcacataaaaaataacatcaaaagtagcatgacgacaataaattagatagcatgaataatttttttacgagcttctttaacatatatacagtgagttatacttttaaaaaaaaatcgttgtaatacatggtcattatgctagtgttaggaaacaaagaagaaaattgaacgatactacaaatctccttatgagatttgcaggaaaaaatatatatatacacaaacttaagacaacatacttgacacgttctttcatattatcaggaccaataatcataacatctcttgatcaacatcaaactaaaaagtattctactggtacagttactacaatagtggaaaactcggatgagtcttctctgaaatgcccattagtcgtagggctcacatatcaaccactaaaagttagatatagagaacgatacataattagaggatccatttccagaaaactgcgtgccccttgctgcattttttattagttcaggtttgtgattttctttggcaacgaaaagatttggccattgccaattctccttttcgttgtaaggtgcatgtttggattattgcatttcttttggatatggagttgctgatattttgtttggtgttaaagagatactaaaattttggttacaaaccaaacaaatatatatatttttagaaacaaggaacaaaacacatcgtcaggtatccggccaatcgaccatgacacaaacaacgtcaaacgtagaaatgatcgaagattcggaatctggttagctggggcctaaggaaacaacgcttcaaatctacggaactggtaaagtaaaccagacaattattctctctctagctaactaattcctgtaggactgtacccaacaaaatagataggtcaaccgaatgatcaccagtgcacgtacttactccgtacaaggtttagtcgatcttgatgacaccagactcattcgatctcatttagttgctgttgctactactcaacttcagtctgcagactacagtacttcactgtacctcctacttgtttgcttgtctcagcccctctgtttagatgagactaaaacttttaaaacttttaagttcatatcatatcggatattttgatattaattataaatattaaatgtagactattaataaaactcatccataatcttggactaattcgcgagacgaatctattaagtctaattaattcatgattagcctatgtgatgctacagtaaatattctctaattatagattaattagacataaaaaatttgactcgcaaattagcttttatttatgtaattagttttgtaaatagtctatatttaatactctaaattagtgtctaaatataaagactaaagttaagtccatggatccaaacaccacctgagttgctagcgaataaggccgtgtttaattcaccctcaacttccaactttccatcacatcacatcatatctaaaacttttctacacatataaacttttaacttttttctaaactttcaactttccctaaactttcaacttttttcagaaactaaacacagcataagggtagatggtaaatcttactcaggtgctgacaaattgactgatcaaatccctgcggatactcccccgtggacgtgagtggcgagacatcacacgagagaatgcgtggtggtatgctcctctctgatttgcatgcgttctgtttttttttctcaaaatacttctctttgttctcctctctctctacccgcatcattggagccagaatttcgcgaaatggttcatccgctgtgtttagatccaaagtttgcctctaaactttacatttttctatcacatcaacctgtcatacacacaacttttcagtcacatcatctctaattttatctaaaatttaaactttagatggaactaaacacagcctagtatttttcttccggaacgcggctcgatttgtgaagtggcaagagagcgcgaggaacccggaaagggagccggcgcgcgtgctcgaatcgaatctctatgaaggccggattttccgttgatggcccaaaatcagcccattattttccgcagcccgtttgcggcgcgcgtgccaggcctgggccgtagtaggccgaatattttgcaactgttgacttagcacagataggtgggccttcgggtgtaaacgttggaattttttttatttttaattttttttattaaaagttttacaaaaatattttccattttgaaaattgacggaagtactcgcctaccgccctctgggaaggcgatttttaaaaatcgccctcccaaagggcggccaaaatgacgtggcagacgggccgttcctttcgggcgacggccgtcaacgaaaattgcaggcggcccccttgccggcctccgcgagggcgattttgtactgtgcgggggcaaatgggcggcaagggggcatggaattttgcaggcggcccccttgccgccctccgcaagggcgattttgtactgtgctctatatttttgtataaatatcaatagttatcaaatctttttatattgaaaactatacaagattaaaatctccaagactggtaaaatacaattttattattttttagggcatatttggattgttaccgtacaaatattttattaatttttagggcatatttggattgttagtgccaaatttttcttcacgaccaaatatttggtaaggtaaaattgcatttgatcatatttggtttgctgccaaaatgtaaaattgtagtgaagaatgttctaaataatctcaaatctagattacgtattaccaatgaataggcttccattttcgtgtgttgtgtgctagtgggaaagaagatatgaagaggttgccttcaaattgtcaattatatagcgtcgttttcactgcaatatatgtgaactcaatgagatacattattcattagatgtgacaagacgatcacgcgtgggcgtgattcactttatgtaaacaggcagcgccgaaagttgatagtgataactcgagctgccgcttttcatgtgtgctgttgtagactgtgcgcgctactggatctgacactaccgtgcagcgccgaaagtgtgttgtcatgagcataagttgttctagcaccatatgaatgaaaagaactatgtagacgagacaaacacaagtagtactgcagtagtaatagcaaaagtagtactactttacaagtttgtaagccaaaagaaacggtcacataaggactgaagaggtagaacactactgacgaggcctcttacccctatccctcctaccctgcgccctaatgtgcccgtgggagtacgtgagtcggtccgggggtacggcacggccaacccgtcctgcctgtacagatcaacaccatctggaccaaatctaatatttccttcaccgtgaactatctgaaatgtgaccttacttgacattgtgcctgatgaaaacaataactgcgttaacctcgcatttctgtactacgccctaagttacattctctacaatattgttctctaaatttctaaaattacgttacattctccagatcaaactaaactacatcttacaattaacactactgtctatgtctcaattcatactattatattctatgctctggatctacacatatgtgctgtgtgctacaaatgtgctaaaatatatggaactaaaactaaaacgcaacatatatactcaaacataacatattagtacaaatgcaaaagatgtatgggagcatacctgtgatgaattgagcgaaccagcagggcttcgccgctccccttctgctgccctcccctctctctcttttgttttttttggatttttagtgaatataatgaaatttcacagaggagggactgggctttatagggggagaggcaaaaatcgccctcccccagggcggcaagggggccgcctgcaaaattccatgccccccctcgccgccaatttgcaggcggccccccgcacagtataaaatcgccctagcggagggcggcaagggggccgcctgcaaatttcgttgacggccgtcgcccgagagcgaacggccgtctgccacgtcattttcgccgccctctgagagggcgatttttaaaaatcgccctcccagagggcggtaggcgactccttccgtcaattttcaaaatggaaaattatttttgtaaaacttttaataaaaaaaattataaataaaaaaaattcgtaaacgttgtaccgtgcggtagaccggtagttgatcctcgtttgtatttacaatgcacattatttttttcgtttgtaatcgtgaattgatctgagaataatcatgtccgaaaaaaaaaaacaaagggagttcgtagttgaaagaacctcgcgtgtggttattagcgatcaagtcaaatatcctctgttgtgcaaggttatcaaagatgtttagatgtgggtaccagagtcacaattatcagagtatttagcgacagatcacagacagatcatagtacaaccgtgtacactgcaactgcaatttggcagcgcatgatcaatcaatgtacattcttgattcttctcagagtctcatccatgtgtgcctactgtcaccacgcctcctcaccttcactctgaagattgttacaccgagcgatataaaaaaaaacgaaattaactgcctacaggctacagctattggtagaagagaagcgcatagaagagctggttccacgtgtccggcaggccggggaggcaccagtggctgcagtccgccgagccgccgccggggttggcgcgctgcgccggcgagaggtcgccgctgtacaccgacgggtgcgcgtccttgcgcagcgccgacagcgccgagatgtcgaggaggcgaacggggctcttcatcgaccgcagcgtggcctgtatcacctggtcctgccccgacgtcgcctgcgccgtcgtcgcgttcagccccgccgccgccgccgccgccggggccgtctcgccgtagcagttcttcgacaccgggttggcccactccttcgagctggtcgatcgatccagcggcccacggcacagatcagaacaaaattagatcgcgttgtcagaaaagagagtgaaatacaatacaccattgccacatagtacgagtgtactactgtacacgtgcacgcacatggtaaggtgtctagtgtactgtgtacactgtagagagagatggggtgatggaatcatgaggttgagatgagaatatgagattggctcttgtgagatttacctgtagtgtgtgggggacatggactggtagaagacacgggtcttggctggatcgacgttggcgtccacccagttggcccaggttgccatcccgcgctggaacgccaccatccggtccatgtcctcgtagtaccgcccgtccgcgcccatgtaatcccacctgcatacgtgaagtgaaacgaagctgaagaggaaatctggcgggtgcgtgtggaaaagggcgcgtatcacgacgtttacaataccgtctaactagattcaaaacgatcagaaacgatttgataccgatactgtaatttttgttggaccggagtaaatatcttacaatacatacccctggagcgtgccggtgtgcgtccaccagtggccggagttgaaggagagcacgtcggcgccgcgccacgcctcgccgttcccggagatgtcgtccagccatagcaccttcttcccctgagccacgccgatgtccaccaggtacggcgcgcggtagaacgataccaccaaaccgtactcctgctcgtatacatacgtacgtacgtacgtacttaccatgagtacatctatatgacatttgcagtaagatcatgcaagtgcaatagggaaattaaatacgtacgtaccaggaacttgtacgtgtagagagggtcgacgagacgagctgcgccggcgactgcggcgccgcggcgtgcagcaggcagatgagcgactcccactggttccggcccagcgagtcgccgacgaacatcaccgtcttccccttcatccgcgtcaagaagtccgcgccatcaaacctatagcaaaatcgcgcgtcgatcgctgcagctaattcgcgctctagtcgtataatatgcgttacctgggtagctcgcagccggccggcttccaccggtaccggaggtagtcggagtccggccggccgtacagctggcagttgaactccgcgtcgatgaccgggcagttgtacccggtgtacgccgccgcgccgccgccgccgtcgtcgcggacccagctgccgctgaagacgtcgcagctcacggcggcgtctttccggtggcggcgcgctagcccgaaggagagcgccgaggccggcagcgagaaggcgtgaaggaggaggaggaagacgatggatgtagacacggcgacggcaagaaagccggcgccgtgcttgcagaagagcggcatcgatggcgatgagaattggaggaaaggggaggcgaagccggcctttcccccggccgctttataccgccgtacgctgacgattatgaatcgatcacgagaccagcttagccaagattaatcgtcctacaattcctgctgtcgcaagcaagagaaaaggcaatatagctgccctaattattttgctgtgcgatccaagcaaggaagcgattaaccgattagcagcagctcgtggagaagaatattatcaccaaaccgatggattgattttttttttatcagcgcacggggcagttcacgtgaggggttttgcagatcatctttgtactagttcgcgtagctaagattggaacctgagcctcatatatttggattcgttgccttcgcggctttgccccatggtgcacgtagacggtagacgtacagggaaaaggtttggttttggaattcgtgttcgcatcaatatggaatctgtggaattcgccgggtacgtttatgtttgcagtttgcacgtagcgtagtgtcctagtccgtctcagaggcagcaaacctggggtgacaaaaatggcgcggcagaagtgaagtgtgcgtcaagacaaaacgattggctggagccttggatgtacatggagcttgtccatgtcgttaggcccagttcctgccttggccatcggtagtatatcatgttggatgtcggatcgggccaaaattcagaagcagcggcggataaaaagaacctgtgtgtgtgtggtatatttagcagaacagagtgtctgctagcaaggttgcaggagtaattaaccacggtgattcgtcccctgaacaacgtgacttgattctcccgttcctgtgctctttagatataggagaataaagtgtggagaatatatcttcttgggcgacgctccggtgctttctacttgtagtatatactacaagtagaaataatccaaaccgtcgatttccaagggcatattagtactatgttaggactacagttaggggtaaacttggtattaggaaaatattcgtgatttttattacgtttcaatcttgtatcgcatcgatccttcgctaactttagcactattgccgttgttgccctatttcggtagctctcagccggcgttcatcactgtcgcaacgctctgcttcgctcatgtctgcaggcaatttgtttggtaaatttctcacatggtaaatccttctagtattttggtgcgactccttgatggtattttcgtgaacgaaaatcttctagacttttttctagggaaaattttgctacatgacacttgttatgtgtgattttagcactaagacactgcccaaacttatttttgggggaaaacactccataaacgtggtaatttgccagtgaacaccgcgccgattaaaataatactttccggttggggaggagagagaaaccgcgtgaaatgtcaaaaatgcccttgggcccacatgtcagctctatctcctatctctctcttttctctcacaaatggcgaggacggtggctggcggtggcggtggacgagcgtgcggccgctggagccacccctcgccgtgcccgtgcccgcagcagaaaggggcgtcaccgccacagcgggggagggggacgcgatgtaaagccggcgagtttcggggaggacgacgtgaagccaagcgagcacgaggcaggggaaggaacgacgagtgggaggtgggccggctacggagaagaagctcgttggcggccgcgcgagcaagatgcacgggagggacaaatgggcgagaggatggctggctgcggaggagaagcttatcggcagccgcgcgagcaagacaggggagggaccgacttgtgggaggatggccggctacggagaaaaagctcgtccgcagccacgcacacggggaggacatgac

SEQ ID NO: 7179 - DNA, 9925 bp, Oryza sativa
cttcgagcttctgccgcgcggcgccgtcaccgcgcggtccgagggccccgtgccaccgcatgcagaggccatcgcctcctcctcctcctccttgagccactggaggtcggcgtgcacggcggctcgcagggcagcggggcatccactgcggcggccgccaccaccacgacggcatgcgccatccccgcagcgccgacgaaagaggaaggagatggagaggggaagacgagggatggaggggaatgggagggagatcgaaggggaacacgtggacgcctccggtcgcgcgccgccgtgcatgccgaccgtcggcgcacccccacgcggcgccgcacaccgcccactgtccccgtgccatcctgtgcgcttgcgctcgagataaagaaagagagagatagaggcagtatgaagaggaggagagaagaagagtggttgggctgacaagtgggtcccatgtcttttttatttgttttggctgactagactgccacgtatgcgtccacgtaggaccaaaaccgccctggatcgacttaggggggtaattcgtccggtttataaagtttagggttaaaaataactggtattggagtttaacggggtaaatcggacgaccgcaattgttcaggggtaattcatactttttcctatttattattaatttggtggtcatgttattgtcagccgccatattatttttacagctctattgtgtttgacccacattatagctcagcaattagattaaaaaaccatccaagtgtgttaacaaatttgaaaaacaacaccaaggtatttcatgggcctcacatgttatttaattttttttgacttggatgtcacgtcagtgaaaacaaccatatgtaaacatgagttgatggttttgctatgatggggatgaagatttttggtattgcaatttaggtgagggacgtggagtggacttattcctattatatacaaaagcttaataagggctgctggggtcattttctccacatcaggtttgctcgagtagagcatttcgctgccaccaccggtgccggctgctcctccaatgcccaccgctgccagtgaactcgaggtatgtggttcgagtgtccattgtagaatgctagtatgtggtgcggccgtgtggtccctcttctttgctggttacgatgtgagatcgctttgggctcttggtgtctggttgttgcacaccgtgtttgtagttatgcttcaatggaccaacagaggaactttcgctgtttctgtgaaatgatgtttctcagctcagaataatgtatgtttgccatgttagtaatactgtgggtcccagcatcacgtagtagtaacttttgatacactccacagtgtttaatacctactatggtaaatcaggtagatgcgccacaaacaaaaatcattgataccaagcatcaacagtgcacaaataatatattttacttgcttgttgccggtagtaagtatactatctggtagcttttactacgtaccacaatgtataactgctgggtacgaaagaatagtgtttattaccagcttttccactacatcgtggatgtgttaacaccaaaatttgataagattctttagcggattcggttaaggaatgagcgcaatcagctgatgaaaacttattgttggtatttcttaacgacattactagaaatataattcccagcaatggcgcataaatcttctgctttattatggttatagagttcatctgcaagcacacggatataccattgtagcatttcacccgagagaattccaagggtatcgtatttattttatcctgtgggaagatcatgtagagagaactcgactaataatttatatattacttgtgataatcatattctaagcaggggatgagataatctaaggatagagtgacacacaagcattaactactcattctcataatatattatctaagctaagtggatagaaaagagaaaaataatctaatcctatacttctaatatacatagtatacatacattctagttaactgatatactagccaataccctctatccgatgccctcctggtacttcgagaagccacccctgactaccgagttccttacgacagcccgtcatgatcatacaaccggggctaaatacggaggaatacactccccagggaattaacttaggattatataccggcggcgcggaggaatacccgtactgagctatcaccatcagcagcccacctctcatccgtaatatataaccccaaataatgatatcccctaatctagacaccacgtctaaactaccagatattactctaatatcatcgtcatgacatagagtaattacataagcaaacattatacccgcaccaaagcatctcccagataagctagccgtatattcagtataacatgaacataataatgtaatgtaggtacttatatactcggaaagtatttcaataccataaatgtatttagaagagtattctaataaaagtacaaagcttacaaaagagaagagaaaagctactagagccatacccgaactcttccgaagacttttggactcctgatttctactctattcctattccaccagctagatactactaatctaaatttgagagaaatgagagagctattgcttgaggtgtgtgagtgaagtgagaaggtgaagtccttttataggcaggtatgacggttgtaaccgttgtgaaatatctgaagtacaccgcaacagctatcaggacaatatatggaccgtccctgccaaaccccacatccaacggtggagagggaggatcggccgaacctcctggttcggtcgaaccaggggccggcccaacctggcacaaaatcagcaggtggcctcctccgttgcttcacttcatagacttgcaaattttggcccaattcatcatgtcaattctgagttcttggcctattcacacataagtctgattctcgacatcgtccgattgatttatcatttgagttgatgttgattctcctccactttgtggttattctctgcaaaaggttagtatacctaataccagtggaatattattattctaacatatttatggattacaagcatcactagttctcctctattttggtaatattgatggtcgaaactgatcgataacgaccgtcaacacttatccagaagagaccaagttcgaggaggaatcgtgaagaccacggaatgatagtttaattccatctattaattaggcaagatatagtaattttccttttatgtttagaaaatatttatcgagtgtctgatcagcacttgtaattttccttttatcattagaaaagtgtgtttaatgtccgatcgggactcttaacggcctatgggtataaatatgtgtacccggggtcattgtaatctatctccaaagatcaacacaatctactttcggcatatcgccacccttttattttcgatgagttcttgtttcaagttgggctgcatcaacttcgatctccgatgagggataaggcttgttatggcggcttgcattgtcgggattagtgcttcaattgcttgaacactctaattttatccatgtaagacgtcgagttattatatacattattgttggaggcatgtcacgagggccttcgaccggacctgccgaaaccatccaaccgacgaggaaacaagccaggggcgtcgggttcgaccaaggcaaaggcatatggcgaaagccatgtggtgaagcatgtgggcgaagaccaaagccccgtatccaaacttcgcaatcgagaggatcacatgggcgaaaggcacatggcgaaggttatgtggcgaagcacgacggcttcgcccaagctggaatctatgcaaaggaggaggactagatggctgctaggcccatggggccccgttcgccatgactaggccagcctaattggcacattagagcccataagtgtaatagacactgtgtgcccttactaatatccctataataagggtatccatgtaaattcccctgtacaatctaaaccatagaaggtgtaagcctgtactaaggctataaatagccccctagggcaatgtaacgggggatcccaaatttttttttcaagtcaatatattgttttactgttcaaaacatccaaccaatttccttgttcttcgacgtgacgcagttgtcattcgacaacaattatatataatctagattgatagcgttttcttcttgcatcgaccgatctccatttagggttttgtcgatattggctagattactttttttggcttagattatataatgtttgcaccaccctgaaaattagtcaaaggcttgattgtccagatattatatttcttttcatacttagtgttgcatcagttaagattgatctactaagtcgtgcttagaaccataatctctagcttgcttcttaattgccaataagggttttatcgggtttcagccgatgagttatctggacgttgtatcggcttatatggattacatccaagttggattgagccgattgcagcaaaggtttcattgattatctaattgtttggatttaatgacatcggacctccagccaatgtatgttttaaccttcggattagatcagtgcttattccatcatatcgttattagccgattggtttatactggtttacattgttctgttgttacattatcattagccaactgtttctatatcatcatttactcaagcattagaatatacattggatatatagccaattatttcaaaaccctatcgacatcggctttttgatttgcaatctatataacttgtcagttgcaggatcaaattgactggcacgcccgcatctcatcaatattttggacctgcactggagctaagcagatctcctaggccgttgcgttcgtcgacttaattcgagccaacatagatctggcaccatcggccaagcgtgaatttttcgtcaacaggattcccatcattttgcatacttttggtgtaacgtcccgcctctcccaggctaggcctgcttgcatctgatagctttcataggtcataaactgccctcacagaccaacacaagtcttttctgcacactttgtcctcactcgtgtgcacccgggaagaatttcccggtcggtcacccataggtcatagactgccctcacagaccaacacaagtcttttctacacactttatcctcgctcgtgtgcacttggaaaatttcttttctgcacactttgtcctcactcgtgtgcacccgggaagaatttcccggtcggttacccatcccaaattgctccaggagccaacatagatcctctcccaggccgggcccgcttacatctgatagctttcataggtcatagactgccctcacagaccaacacaagtcttttctgcacactttgtcctcactcgtgtgcacacgggaagaatttctctaggccaagcacgcttaaccctagagttctttggaaatcgacttccggaaaagaagttgcaacttgttgatatgagtattctattaatcctattaagccttgggctgggatgttacatcctcacccccttaagagagatcgacttacaaattgttgatatgagtattctattaatcctattaagccctgggctgggatgttacatcctcagccccttaagagagattgacgcccccgtcgacgacgggggggatgggatgttacatcctcacccccttaagagagatcgacgccccggtcgatcaacccgatgggggggctgggatgttacatcctcacccccttaagagagatcgacgcccccatcgatcatcgacgcccccgtcgatcaaccccggccaggaacgttctcttggccacgtccgtgtgtccagtgccaacgtatgtatcatgctgtctgaccactccgggtccacaccagccatgcgcaccatgcccactttgtcctcactcgtgtgcacccgggaagaatttggcaccatgcccactttgtcctcactcgtgtgcacccgggaagtgaagttctttataaattggcttccggaaaagaaattgcaacttgttgatatgagtattttattaattctattaagccgtaggctgggatgttacatttggtttccaactaccagtgtaagttgagaaataattagcgatattggcttattagatatttctctgtcgctgacagtacaagtgtacagcagcaactgaacaaagaattactacatgtaaggtaacatttgacagatctttgctttgttccaagtctaatttttataagtgatatgttattgtacaaccctcgggtgtgtccaatttttgttttttacgtaatggtgttatcaacacaccgttgacagcccttaaatatcattgggaattttttatgtctactactcggattgcagtggtgcacatggatggcttgcgtggttctagccgtcagaggctgtccttggtctcatcagcctcagccaatcagtcatcaatttgctttatgagcccttaatgctcctgctttactcacctgcatcttttgtatttttgtgtttcaattctggtataactctcatttcctaacaacttcatctcttggaaatctgacctgtgcgcacatttccaatttatttttttacccaacagaattttagttgagttaaaatggtctcttacgtaccataagcattgcccagtgatgatggttaattgccaatgcaatcaagatcattagtgcattgcattcaaattacaaacttgaagtcgttccaaaatccatgtagtcttattgaaacatatgacttacttcagctcctggatcttaaaactgttggaattaatgaatgggtcttagcccactcgaagattaattctttggaaaatcacaaaagcccacctcatgggatggcatgcatgtggagtttagtaccaccttgcttattctaggagagggggacctccttaaaagggaggatgccctcctagccacttgaagcatgtgtggtggagagaagaggggaaacacacgcgcgcgctcgctcgcctcgcctggcctggcctggcctggcctgggcagggcaggcggcgcgcgtgcacgacgtacgcgtcgaatggtccgaaaaattggctcctcacccttgcgcagatgcagcctctttttgcagttttgtcttgctgcaaattcggattcgtttttgttttggaaacgttccgaaaaatccgatgcgtgcaaacggcgtggagtccggataagttacgcgcgacttatccggttcggttacgcgcagtagagatcgtgcgggcgccctgatcaagcgacctttctctatataaaccgacccgccgtcttcacgcaatatatgcgaaaatcaatctagggtttgcctcctactctgtactgcgccgtcgctcgtagactactccatcccgctcgccggcgtgcaccagcgatcgggagagcaggtctccggaacctctgcctttgacgtcctgcaccgggagaaggcggcaataaggtttttgggaagcgcttcgcgcgactgctccctgttcgttcgcgacggctcgccttcctcttcgctcgcgtgtttcgtgccttcgtagacacctgcgaaaagtttcgaccaagcagccggtcttttcgtcacctcggtacgtgttcaatatgttgcgcatatttgatctgttcatgtttttctgcgtagtttacatgtgtagatctaatgatgcgttcatgctagttttcatctgtaatgtcatgacttatttatggaataaattaaatcattatatgcccataatctcaacattccaaaaaccttattataggcactgtgattttactatggctggttttgccgatgcactgaggccggataaattcaccggtgtgcattttaagagatggcagatcagggtcactctgtggctgacagctatgaaatgcttctgggtgagtactggcaaacctgaaggagttcttactgctgaacagcagaagcaattcgaggaagccactactctctttgtgggatgcattcttagcgttcttggcgatcgtctggtcgaggtgtatatgcatatgaccgacgctaaggagttgtgggatgcactgaatactaaattcggtgctactgatgctagcaatgatctgtatatcatggagcagtttcatgactacaaaatggctgacaaccgttctgtagtcgaacaggctcatgagatacaaaccatggctaaggaactcgaactccttaagtgtgtcttacccgacaaatttgtggccgggtgcattattgcaaaactacctccatcttggaggagtttcggtactgcactcaaacacaagagacaggaatactccgttgaggggttgattgcgtctcttgatgttgaggagaaagctcgggaaaaagatgccgcgtctaagggcgatggtgggcagtccagtgccaatgttgtgcacaaggcccagaacaagagcaaggggaaatacaaagctcagcagaccaccaacttcaagaagcagaagaagaacaacaacaatcctaatcaggatgagaggacttgctttgtgtgtggccaagttggtcatctggctaggaagtgtccacaacgcaaggggatgaaggcacctgcagggcagacttctaagtctgctaatgtgaccattggcaacactggagatggaagcgggtatggtaatttacctactgttttttcagttaatcaatctactaattggtgggttgatactggggccaatgtacatgtttgtgctgacatctcattgttttcttcttatcaggtcgcacggggttccaccgtcctaatggggaatgggtcacatgcttctgttcatggtgttggcacggtagatctgaagtttacttcgggaaagatcgtgcagctgaagaacgtgcagcatgtcccttctatcgacaggaatcttgttagtggctcccgtctgactagagacggatttaagttggtttttgagtctaataaagtagtcgtgtctaaacatggatattttattggtaaaggttatgagtgcggaggcctgttccgcttttccctttctgatttctgcaataagtctgtgaaccatatttgtggcagtgtggatgatgaggctaatgtttggcattcacgtttatgtcatattaattttggcttgatgtctcggctttccagcatgtgtttaattcctaagttttccattgtcaaaggttctaagtgccatagttgtgtgcaatcgaagcaacctcgcaagcctcacaaggctgccgaggagagaaacttggcaccactagaactcctacattcagatctttgtgaaatgaatggggtgttgacgaagggtggaaaacgatatttcatgacattgattgatgatgctactagattttgctatgtgtacttgttgaaaacgaaagacgaggctctagactattttaaaatttataaggcagaggttgaaaatcaacttgacagaaagataaaaaggcttaggtctgatcgtggtggagagtttttctcgaacgagtttgacttattctgtgaggaacatggcatcatacatgagaggacgcctccctattctcccgagtctaatgggattgctgaaaggaagaaccgcacactgactgacttggtgaatgccatgttggacaccgcgggactgcctaaggcatggtggggggaggcattgttgacctcaaatcatgtgttaaacagagttcctaacagaaataaggacaaaacaccatatgagatatggattggtagaaaaccatcactttcttatttgcgcacatgggggtgcttggcgaaagtcaatgtaccaataacgaagaagcgcaaacttggacctaagactgtggactgtgtttttctgggatatgctcatcatagcattgcctatagatttt

SEQ ID NO: 7180 - DNA, 2284 bp, Oryza sativa
ccccttttaagagacccacttctttagctctcttaattaacaaagcaagcatatcagctactatgttaaaaagaattggtgatagcagatcccgttgcctaagacctttgtatgtttgaaaattgttgccattttgatcatttacttttataccaacatgaccaccttgaataaaagaagctatccactcacaccatttaggagagaaacccttcaccctcaacgtttgttgtacaaaggaccattttactttatcataagctttttcaaaatcaatcttaaagattacaccgcttttgtctttacgatgtaattcatgcatagtctcatgtaaaataaccactccttccataatatttctacctggaataaaggccgtttgagtgggactaataactttttgagcaactcccattattctattcgttgcaactttggtaaaaatcttaaaactcacatttagtaaacatataggtctatattgttgaatcttaatagcgtcaacacacttaggcagcagaataattgtgccaaaattaagagaaaacaaaggtagagtacccctatggaaatcattaaaaagctccaacaagtcatttttaataacattccaaaaaagttggtaaaactctgccggaaaaccatccggccccggtgctttattatgctctatctaaaaaacagcctccttaatctccttttcagagaaaggttgcgttaaagcttcattctccaactgagagacttgcgggacatccactattctattctcatcaaattgcagagaagagtcttcaggaggactaaataaacctttataaaaagtggtaatatgcgcttttaaattcgcatcaccatttattatttgatcgccatcctgtaattgaaaaattctagttttcctatgctttccatttgcaaccaaatgaaaatactttgtattagaatcaccatccaaaatatctttagttttagctctcagataccactttatttcctcttctctcagaattgaagaaagcctattcctataaaaccatctaatatcaatttcctcttgagtcaaaaggacattttctgcctttttatctagcaatttaaccttatccaataaatcttttttctcttttttataatataccactcgtgtgcttagcccatcccctcaagtgttgccttaaacgacgtatttttgcttgtcagcgctccataggagagtctccttcatctacactatcccaaacctctctcaccatatcaacaaaaccctcacgtaaaagccacccaagttcaaacttaaaacaaggttgagcattactttgagaagatgaatttgtgtttaaaagtaaaggagtgtgattagaaatatctctgttaagtgcaaccaccgaggctaaaggaaaattatgttcccactctgtcgacattaagactctatcaagcttctcataagttgggtttgctaaattatttgcccaagtaaaatttcttccagacatctgcaactccataaggcacaacccatcaataatagcattaaaaagaaagggccatcggtcatcaaaattgctattacttttttcattagggctgcgtaaaatattaaaatcaccaccaataagaattggtaaggtttcacgagagcacatattgactaattcagcaagaaacttatccttattctcgttttgagccagcccataaaccaaaactaaggcccatttaaacttgtcagctctattacataaatgaaatttaacataaaaatcaccctcatcaattaaaccaacatcaaaattaagtaaattgatgcctaacaacaaaccaccagacctaccactaggagccttacaatgccacaagaaatctttaccagcacaaaggtttttaagtgtgcccggagcaaaatctttcttaacagtctcagacaaagcaataaaatccaactgatgttctttagttaggtcagaaataaatttgtgtttttttgggtatttgaacccatcacaattccaaaagatacctttcattaagactattttttttccttcttatttttaccttttttcccctttttcttggagttagaaggagaatccctagaatctaaggtggtctgaagacaattatcacagtccccacctgaatccattacctcctccataatttcactacataaatgttgcagtaagaaattatcatcaaaatgatcatctactaaatcaccatcaacattattggaaaaacctttagtagttgacaaccgtacatgatcacttaatct

SEQ ID NO: 7181 - DNA, 15750 bp, Oryza sativa
atgcaaagttcaatgctaggtgtgtgtcaaaatacgctttgaattatatggttactaagtattatatttgtatatctttcaacaataggtatgggacatggggtatatgctttacctatggggcattctttgcaataagaggactaattgctgctggcagaaattatgagaacagccaagctatcaggaatggatgcaagttcctattgtcaaagcagcttagtgcaggtggatggggtgagcactacagttcaagtgaaattgaggtaaatattaattttgttgtaacctagttagtttaactatgtaaacactatgtaagttagtatgctgcaatagttatattaaaattaatggttagagtggtatgaccaactttaaattaaaaaaacagtcggtactactatataaatgaatatgtttagtacattgtaacatagttagtttaactatctaaacgttgtataagttagtatgctacataagttataaaaattaatggttagagtggtatgaccaactttaaattaaaaacgcagtcggtactactatataaaggaatacatttagtacaccaacctttttatatgtacaaaactagatcattatctccccttacaggtgcccccctctccttccctcctgcgcccctcctttctttttctgtttctcgatcactctccactctcgtgccccctcctcccttccatttttccttctgttttctcttttctcgatcgccctcccttctccttttcttctcgcccttctctctttttttttcttctgctttttctcttttctcgatcaccctcccttctccttttcttttctgctttttctcttttctcgatcaccctcccttctctcttttttttcttctgctttttctcttttctcgatcaccctcccttctccttttcttttctgctttttctcttttctcgatcacccttctcttttttttcttctgtttttctcttctctcgatcgccctcccttttccttttcttttatttttcttttatgctttttctctttacccttttctttctgctttttctcttttctcgatcaccctctctcctcccgcacccctcccttctccttttttatatttttctcttttctagaaaataaaaaataaattggtaaattcaagattcgaacccatgatctcatagttcatagtatgttcctctaaccaatccataaattgattctatttgttttcaggattattgtttttttatctcactttgtgagaaaggaaaatggtgatcgattctaatctctttcactaccatcgtagaacaaaatagatatgttattatgaaactcataacacatgttactatgttccaatagtaaccttattgtagaagtatagtaacacgtcacgttactgcagaagatataagatgttactgcacttttggtagtagcatcgtggtgaaattgtagtaaactaggaaccgaaacaaaaatgtatggattaaaaatctcacatgctaaacatacttgttactgcacaaaagtagaagtgttactgtttggccgatacacgttaccacatgtttatacagtcacattacccaaaaattgcagcaagacacgttgctactacaaaacttattgtctttacaacacttttacattaacatcgtgatgggattgtagtaacgtacagcaagcagtactaataagtaatgctatagtattactatctgtgcagagtcaaattccaaaaaagctaagctttgaagaacaatatgtctcatgtgatatatcatggtagcaaaaaagtgtttatcagaagtagatctgtcatgactatatttcaaatatatttgagtgttgttacaacacatcaaacagaaggttactgcacgatggccatcgtgttactacatagttccgcgagattagagctgagaaaagatgggtggttggcggagttagcaggcgggttgactgaggtgggaagtagtgtcgaatagttttgctatatatagttaatgccccagttaattttactatatatatatatttatgtgcttagtttgagttcatatttatgtctaccattactttaacaacgatttcaaacaggtctatgttgatagtgggagtcctcatgcagtgaacacctccttggcaatgttagctttactttactctggacaggtctgtttgtcaactgttcgtttgatttggcacaacaatttctcatattcatgtgattttttaaccattaatgttatgaatagattgaacgagatccaacaccattatatcgtgctgcaaaacaattaattagcatgcaacttgaaacaggagagttcccccaacaagtaagttttgggatgatattaatgttctgaatgcacttttataagatggattgtacaatttaatttgtctagttagcagatatttgttcgttgaatgaaaaggaatggagttgcagagtgttcaccactaattttttttctctagatggagagcacaaaacacattaaaataacaaaattgaagtacaacaaattttgtatatcgaagtcctagataagaaagtagaaaagtagagtaggcacaaatcgtttacaaaagacaaaatgcatatgaaaaaaaagtttgattgaactttccgacaattaaattgattactagcattgaaatatgctcccaactcatatatttgtgcaacttgaatgatcatgtgaaaatgtataaatggctttccaacaaaaagcaattttcagatgtaagcttcgcaaaaagtttcatccagtgctgattttttttgccaaagctagcacaaactcataaactagtttttaagtatttttggcttaatatccatcttacttgtttatatttggctttgattgaaggaacatgttggatgcttcaattcttcactttacttcaattacccgaactaccgcaacttatatcccatttgggctctcggagaattctggcaccgacttgttgcaagcaaggactgaagaaggcagccatgcacatacttatgtgatgacaatccacactacatttgttctctacaaatttgtgcaattattgaagagtgcagtatagaaagtacattgcaagttatggcgattattgtatgaacacaatgttaccctaaaaaatatcaaatttataagcaccaaacccgaagtcacatgtgctgtaccaaggacgtagctctgaaataaataatttgttactgatagaaccattcgtccgatggaagtcttgtatacaactagagaattcatagtttgccaaaattatgacgcataactacatttaattcatagttgtagttcaaaaagttttagtgttgttttcattcatactagtttaacttttgatatatacgtatgtaatgatgtttcccagtctagaagtaaaaatgccgctttcatcacatcctgtggttcctatattagagaagaaaatgtgctgaaggcagaaatacagagagaaaatagacgcaaccctgcaaccaaagccatagggaattacatatagtgatttggtttcttgtgtggaatataggcagcacgagcagatcggcacttctccatcattccacatctcctgtaaatggccatcagagagagagagtgtgtgtttatatatatatatatatatatatatatatatatatatatatatatatatatatatatatatatatatatatatagacacacacacacatatgtgtgtatgtagctctgaacgattcggaaatccgcagtcattagatatagttatggttgatgttgctgtttaatatctcgagcagtgaaggacctaattataatattgagatatggtgtgagcaatcaaattagtgaggaatggagaatgacataacaacatacagacatgattgacaaatcagaagcagctagaagtgcatagtggtggaggcggaggcttgtctctcctccaggaagcagggttcagtggcgcacatgcgaggtggttgggcgagggagatgaaacatgagtggagcggcaccatgaccacacgcgacgctgaattctagcagcgagcatcacgttcaactctatgcacgcctttggagttggaggggagagggtgagaaagaagatggaacagctctcccccgcaaggcccgtcgacatggccagcttgcattgattacggcgccgctacaagaggacatccgtctagcaagagcacacatagttgttcatgaggttttggttagggggcctcctagacaacatctcgagggagaaaagtgatgatgagcactgacgccgccgtctgtcgacatatcaaggagaaccaagacaaaggttttcacccgacagcccacccaagagagagggcgcggctcgacaacgcccccaaaaggaaaaacgattcctcttgagagaaaagcgatgatgagcactgacgccgccgtctgtcgacatctcaaggagaaccaagacaaaggttttcaccctacagcccacccaagagagagggcgcggctcgacaacgcccccaagaggaaaaacgattcctaaaacgtcgttgttgccggcccggcaatactgggctaggttttacatctgccgcctactcctgacgtcccacggttaacgcaccaatgcttcactaccgacggtactctatcggcacgtggtcacagctgaagtgacttcgctgcccccccccaatatatttatttcacgattatgggaaaagacaagagtatacacatcatatgcatacactcgtaaatatattcctaaccagtattcacctagacgctagtcggtggtcagttgaagactagtcagttactagtaggtgattctaatatatccaccaataaaattttgcacacacgtagctatctatttgatatgttactgatgattaaaagaaatataaaattgaggtttcataagagactcaaggtgaatatctttgaagtgattaattaggtattttaaaatattctaatatattttaaaatttaaatgattaaaatatatttgaagtgacttcgaatgtttggacatatgcatgaagtattaaatataaacgataaaaaactaattacacatattgcgtgtaaattgttcacgaatcttttaaatctaattgctctatgatttgaccatgtggtgctatagtaaatatttgctaatgacagattaattaggcttaaataaaattttaaattgaagtcacaggaggtgatatctctttgagggattaaatccattcccgtttaacatgccaatatatttatttcacgattatgggaaaagacaagagtatacacatcatatgcatacactcgtaaatatattcctaaccagtattcacctagacgctagtcggtggtcagttgaagactagtcagttactagtaggtgattctaatatatccaacaataaaattttgcacacacgtagctatctatttgatatgttactgatgattaaaagaaatataaaattgaggtttcataagagactcaaggtggaacgtgattttgacttttgtacgagaagatataaatggcccagaaagttttgcttttcttcaaccgggagtattccagcttttctgaaaagaaaaaggacaaaaacatggactaaagcaaatatatagaagctgattgaatgttttggactttataacttgtctccacacccaagtcgtagaatctttactgattgaatgctatcactcgtcatttccacaagcctaacctgtaggaacaattaattatgtttgacttaatttgtgatatactaaaaggaagcttttgtataaatccaccttataaaatgactaatttccacatcccaattgctcccagaacataaccaatacggggaacaagggaataccggaccatatctgcttttgcgccatgacaatctcactcgaattacagggacctacacataaccccccccccccacccccaccccaaaaaaaaaaaagcttcagcggctcgctgctgtcactgcgtcggcctttcatttcaaattccaaatcaacgcctttcattacaaattccaaatcaataaaacgaagacattttgttccggcttcccagctgagtggctcttgtcagtcaaccaactgaagcccgtgcacccccacgcgttcacactcgctctaatcatctccgcaatcgcgacggccctgcgacctccgcccatggcggctacaactacaagtagcagcagcggcggcggcaaccggatctggacctcctcactcgccgtcctcgcgctcgccgtcgccctcgtctccctcctctccctccgcgcgccgccacctgctgcgcccagcatggccgacgacctgcccacctccgtccacgacatctccgtcaaggtagccatgctacggcgtctcgcttttctcttttttgatactgtctcgtggtttcttgaaagagggtggatgaggaggttctttccgtgattggggctcgatgcgatgtagtctagtgagatgttgcttttagttgtggggggtgattgtttttatctttggccaggaaccctagattgctccttttgttgggaatatttgtaattcttggcggaattggatcatgtcgccatgatgggacgttggatttcaggttaattctgttgttgtcaccgtaaagatgaactttattctatattaaggttagatgggaagtttaccttttctctgaacatagcacagtgtggatagatggcgtcagttctgatagggactttcacatcctaccgatgttattagtagtaattggtttaacattactgtgcgaaatttcagttgaacatacttagtgattaacgctttcctacttaactctttatgttactccgtattctgtttctttgattcggcctgtcagctgatgtttggttcttccaaaggatataaagggaaatgatgtgaagctgagcgagtatgaggggaaggttcttcttattgttaatgtggcctcaaaatggtacttatcagatcagatttcatttatttagtttttaggtagacctaacgtattgctctcggattctcatgaattggaaaattgaagtttatctaagaattaattcattaagttgagctgaacttgtcaaattactaattctttttcaatgattggtatatgtgtgcttgtgacatatatgctcgtttattgggatttagacctcgcatattctgtcgaacataaaagtcattgaagtccaacacacttgttccattgttggtcttctcaccaatacatttgtgttaggcagagtgttgcgtaatgacaaatgctatgtcgtcatgttttctcctctagtgtgggctatatgaacatttatgtttcattacttcacctttactcttttgtagtggcttaacaaattccaattacaaggagttgaatgtcttgtacgagaaatacaaagaaaaaggtatgctcattgccactgttttgaagtttaatcctgattcagtttatctcaaaagtagcttttgtacattcattatcactctgttgtttataaatggcattcaggccttgagatactcgcatttccgtgcaaccaatttgctggtcaagagcctggcagcaatgaagagattgagcaaacagtttgtaccagattcaaagcagaatttcctatttttgacaaggttggtgggcttcacctagtccttccatctttccgtaaaacagtctcttgctgtactatgttattgatttttttcctacaacttggtactattttaagtgcaaaaataaggtgtctacttaatgttcatagctttgtttagattaatgggttttcaatgttcattgctctgtacagatgaatgtggatttcccccctctcaattctagaccaattgtaatgcctttctagataatatttttagatcaatttcatatttccaggaatgctttctttgtgaaaaagatttgtatgtaataaattactctcttctgtaaaacattcaattaattcactatgtcatacggaagatataagaggcaagtgattttaagaataaccctacattgcaaaccaagactgtaacttatcaagttattattgagttgtgtgaactaactggttccctcaaaacttgaagttacttcagaacagatactgttatatttccatatatgtcaaaacaaatacttctatattccaatatacatacttgatgcattgtgaatgcttagattgatgttaacgggaaggaggccgcaccgctatacaagttcttgaaatcacagaaaggtggattccttggtgatggcatcaaatggaacttcacgaagtttctcgttggtaaagatggcaaggttgttgagcgatatgccccgacgacttctccattaaagattgaggtttgaccctctatcaagcgccattcgtatttatttgtttttcttctttgtgagctgatactcctttggtaccctatgcagaatgatatccagaagctacttgggacctcgtaacttattaacacggaacacatatgtgtatgtcatatgttgtataattgtttgaaaattgtctatgttcgtaagaatgtggtttgcttcttttagacgcagaaaatgttctttgtgcattacaactattctggagtaggaattaatctcgatgttgtcaggtgacctaccagggttcagtttctaaagtcggtatttagattaaatattaaccaaagcaaaatgtaggatttaaactgtgataagattttaggcaactagccacaagcctgcttccaacctctctggtttcaaatatttgtcaccgcgtaatattcgccttttaactttaacctcccatcctccaaaaaaatgtatacttaaaaatatcccataataacaattactcactctgtttcacaatgtaagattttctagcattgcccacatttatatataaatgtttataaaatctagacatatgtagaaatgtgcctagatttattaacatttatataaatgtggacaatgctacaaagttttacattgtgaaacggagggagtaatatgtattgtggcataaatgtaaataccactttcacaaatcatagatcatcgtttctacaaaatattagtatatactaatagtccattaaattttcaatgaatgctgctaccccatagtgctttaagaaataaagaaaatatatgaaattccaagaaaagaagaaaacatctaccattgattttgacccattatacgacatgaaaaaaaacatcacgaaataaaataatctaatgcataattagactagatctataacatcacgaaataaaataatctaattatgattagcgctttcccaaaaataagacctatgttctaaaatatcggcatatcaatgtaataatattatctttttatgaaacaaaagaattttaattaaatgtgttatgaaaaatattttgacatgattatatctttaatatttagcgacctacaatattgcaaaactaaacactttaattgtaattagcgttcctaaataacattaccgtcgttctaaactatcaacatgtccaaataatgtttattagatatgtcatgaaaaatattttgacataattatatttttaatatttaaagtgaacacattataaaaagaaggcatcggatgtgttcttgaaaatggtatcaatatgtcttaattaagaagaatagggtgcttctttgtcggtcatttcctctcccatgtttagagtttagatctaactaatcttagtataaagtataaaatccagtttaatcgacccatatagggtttaccttatgtatcaattctacgtcacactcagacacttatatcaattctgcctataaaccggcaaaccgctatccaccaataattgagtcaagaatattggcgagattattgtgtgtaacatataatatccaagacccaatgaacccatatgctatcaagcgataaagaagaacggcaactaactactatacaaactagatgactaccccgtcgcggagttccagacgagattgctattcaatcaggccttcagccaagggctttgagaatcagaaggatctttttcgagtttctatttcttcatttgaaatctgggctcttctatcttcgacttttttttgctttattctttatttatttcatttcgatttttcccacggcttaatacttctctgctcagagtcaaagaggcaaagtgctaactaaactactaaggaaagaaattcctgcagtcgcattcaagtaatgccccttaatttcaccggtttcgacccaaaatgagtaatttcataattgaataaaaacgaggagccgaagattttagggggcgggagaaaaggtcaagtctaagcgacatatggcacgaaaaggcttcaatggctcgatatgaaagacgaccagctctacaacttttggtgttcgtaagaagatatcgtgagaaatagttgaggatcgaactctatcttaaaagaaaaatcgatgttttactaccagccacaagctttatgttcggcacagtactaatactggaacttatgagcaagaattgctctatcaatcaccatctactttagacatatcttctgaaacttttttcaaatacaaaagtccattatcttcctacaaattagtgaattaggaggagctctttgtgcccaaaaaggtcaggtagggcggttcacttgagtcgctcaaccgtccctttgcccggtgctcatgacgcgctacggaacctccaccgtgctagcggcataggagcctactcagcgtcagcggcttcgtgccgcactggagtgatccaatatgtggttccgtctacggaaaattaagttgcataatgtgtataaataagatgtaatttgattatcaaaactaaaacaatttgatataattttgagcctaaaaataattgagattgcatgtttttaagagagaagaaagaagagacaatttggaccatagatctatcatccaaaggctagaaataattggggtgatatggcttattgagagaagagagaaatagcattaactacacttagtggggatgaactatataagtatataggatttataagtatataggattaggtctgtgtatgtcactttataaacacaaataactaaaattaggtcggcaatctcatgaaataaaataaaaaaatgcatcctcgtgacaatattcaaatcaaacaaaaaaaaatacatgtacataacaatgaaaaaaaattgacaaatcctcaacaatatacaccctacatataattaaaaaaaaattgacaaatcctcaacaatatacaccctacatataattaaaaataaccaccgctaatctctatggcatataacttatgtatttattagcccattaaaacatactccctccatccacaaaagttatacctattacttttgtcaccaagaccaaagaaaaattaaatcatcttggatgctacaaaatcaaggagtaaatgtaagcatgcaaccaatgagtatttaaatgactccttgggttctaatcaaacatttaatttatctactcatttaagtcttgaatgcataaagactacaaataggaacaacttatttggaaaaaaaactcaaatgtgaaatttttctaacttttgtggatggagggaatagaatcaattaaataaattactaaaatttttcctatatgaagtaaatacatctatgtattatttatcaggaaaaagtacgaattactcccctgaactatcatggtcgaccgaaatacccccctgaacccaaaaatcaaacgttgctcaccctaaacttttacccccctcgacactattctgagtggttttgatttaagcttgcacacgtggcgctaacgtgttaatccagtcagcaaaaggactccttgggcccagttgtcatatctccccctccccctctctctctccccctggttcctctctctctcctcagcgccctctctctccccggtggcccagtccctctctctctcggacaagcggctgcagacgggctctggcacgcggctgcggacgggtggtgggcggctgtcacacccataaattcacgaactagaatttccaagctgaatatgcattaaacccctatctaggaccagccagggtacacaaacgacaattgttgacatacagatccacgtcttacaaaaatataaaagattacaaatgcagcagaaaagataaaagcgagctaaacttggaagcttgacttctgcagcggggcgactccactccacaggcaatccttgtcagcagcgacgaaaccaacttcaacaagacagctcccactaggaagatcttcagctctggtgtgggggaaaagagagtaagactgagtactacccactgtactcagcaagtcataccagaaaaggaggtacgatgcaggatataaccaaaggaggctaaaggttcttttgcataaaactagcatttaaaagcagtagttgaaagtagtaaaaacaattatagtaattagtaaatattaaccactcactgtcaaacgctacaccacgttacaacatacccaaccaaccacctgaagtacaccagttcattaagctaaactaggggtgagactaatcacggtgaatctagttgatcgcccataaccgcgggcacgactattcgaatagttttactctggctaaaggtgtacaactgtacccacaagacacgattctacacatgtcgccatgccccaaagtatcaccatgatactgcaaagggggaaatcgtgacaagaccctttgcataacccaccgctaaccatccacaccacgctaaggtttcacccccacccctcaaaaggcagtgggaagtcccctcgtgcgtcgcggtgaatccagcagctggacaaccggacaccctggccgacccaactccatcacgcccaccctcgccaccggtgcctaggaaagggtcgagctatactttagatcaagcagttacccactcccgcttgtggtaagaatggtaagtctcccagggtttcccgtgaaccggtccttaactgccatgggtgcgaccagcaaaaccatgcacccacggcccaccattcagtgtattttaattaactaacaccattgcggtggcaccaatccaaagctatgctaatagtcaaagtctatgtaataatgtgatccccagttgtgtactagttgaactaagcatggctaagcatttcctaaaccaacatctagtcattttgatacccaagttatcaatggcatagggtaaacaataaatggctgagtaataggacccatcccatatgatgttgtaaaaggatgcaacatttaatagaaatacagaatgtttgtaaattgggtacaatatgatcaaatgtaatgcatgacttaccttgctctcgcactgatgagaccaaagcaacatcttcgaggaaccgtggattgatgaaacggccaaaatctacgcgacaaacaaagcacacaagcaaaacacactataagactactgaaacaggaagcaaaaccatttttattggattctagggatttttatgaatttactgagacatgaatggacttaaacggagcttggatgaattagttatgaattttagaagattctctgtgtttttcctaataaagaaaatgccttaattaattattgcgcaataaatccccagggctgacggcagcgaggggggacggctcggtaggcgggccccgcatgtcagtggcacaaagggcggccggtctaccgtggacagggaccacctgggtaatccaccgccggtccacgggaccgacggtccagatcagccgggaggccgatcggacggcgtgggcacggcgaggcacggctcggctcggcacaaagccggccggccggccatggcggggtgacggcggcgcgcggccatcggcgacgaccggcggcgtgggagacggcggcggccgtcgcgaaggcggcggcgctgccaaggcatcggcacacacgggagaagaaaggagggggaggggcttctcaccgcgggttggccggcgtgggaggaagacgacggcgaacgacggcggctagcggtgaacggcagggtgcgcgggatggacgaggcggtcctcgacctcgcggggccgatggtggcgacggagtggcgtggcggtgggactagcggcggctagcagcggatggaggcggtagtaggcggcggcatgtggggagagcggtacggtgatggcgcacggcaagcgtgcgtccgccgagatagctctcgcggcagcgaagctagcggcggcgattgcgcggctcggcggcggctagagcagcggcgacgcgcagtcggagagccgcggcagcggcggagcttggcgagatcagcgcgggcgcggtagggaacacgggagggtgcggcgagagcggaaagagggagagttggctcgggggagtgtttttatgggcgcttgaggggtggaaatggccggggatggcccctattttgccggcgacgtggggagtggagggagagagaggggtgaattcgaattcgaatcccgcccatttttgggcgcgcgcgagagcgggaagatgtgttggaggtgggcggcgtgggtgcggggtgcgggtgcaggaggcggggaaggtgggtggcgtggggagtggcggtttcggcggcagttggcgccggggcgtgggcggctggaggtaggggatgacctgacaggtgggccccacctctcagcgttccgaagagaggaggagggggcacgggccggcccaacgaagaggaggccgagcgcgggaggcgaatgggccgacggcccaagaagaaaaagaaggaaaagaaaaggaagaaaaaggaaaaagactttccccgggattaaatattgcacttgctcatttttatttggttaaaattatttatagggctctgaaaattccacaaaaaatcttgttaatgcattagggcatggggaactcaagaaaaattccaccacgccatttccgattattaattgcatttattaattagggattagctctaggttaatttaaacaatttcttgaggcaatttatttaacaatttttcaagaaagaagaaggggaaaacttcagggcgtgacagcggctgtgcgtgaggacgcgcgggggatggctcgacacggctcggctcggcacaaagccggccggccggccatggcagggtggccgcggcgcgcggccatcggcaacgaccggcggcgcgggagaagaaaggagggggagggggttctcaccgcgggttggccggcgtgggaggaagacgacggcgaacgacggcggctagcggtgaacggcggggtgcgcgggatggacgaggcggtcctcgacctcgcgaggccgatggtggcgacggagtggcgtggcggtgggactagcggcggatggaggcggtagtaggcgacggcatgtggggagagcggtacggtgatggcgcacggcaagcgtgcggccgccgagataactctcgcggcagcgaagctagcggcggtgattgcgcggcgcggcggcggctggagcagcggtgacgcgcggtcggagagccgcggcagtggcggagcttggagagatcagcgcgggcgcggtagggaacacggggggtgcggcgagagcggaaagagggagagttggctcgggggagtgtttttatgggcgcttgaggggtggaaac

SEQ ID NO: 7182 - DNA, 71465 bp, Oryza sativa
  unsure (1)..(71465): unsure at all n locations
ctattttttttccttcttatttttaccttttttcccctttttcttggagttagaaggagaatccctagaatctaaggtggtctgaagacaattatcacagtccccacctgaatccattacctcctccataatttcactacataaatgttgcagtaagaaattatcatcaaaatgatcatctactaaatcaccatcaacattattggaaaaacctttagtagttgacaaccgtacatgatcacttaatctattttcctccatactccttaaatcattaataacatcatctaacaccacatttggactagaagtaatgataccaaggcttttaatagaagcggaaatctgatcattcgaaaaatgtaaaaaagaaacatcattaattaaattacctttaacatgcagattttccaaattcttgtcagccttcgacttctcagctctttgaagaacaagttgatcactatcacttgctcttcttttactcctcctggatggagagactgctgcctcaggaatagcagagagttttgcaaccagactttcctgagattggactctctcaactccaattacatcatcatgtaaaccatcaaactcttcatcagacagattcaagccaccagaatcagcagtcaagcccacctgaatagaatgtaaagaaggaccacccttctcatagaacatacttccagaacccaacttagattgacttgagcccccagggcctggctccttccccgaatcacccttctcattaccatcatttttcttctcaaagtcaccatcaccaatattgtccatatccattggtataggctcctcaggaccattctcaggttccactctaaaggccaactcatacaaataatccccaataaccacatcaaccacctcaggaatcaaagatggatcaaggactaacacttgtaaccgggcaatgtcataccttctagtaaacaccatatcaacagttttagttataccaagaatggaaccaacggcccaaataattaagtactcccttaactctgaagggatacccttacactgcacccacaccttcgggatcacatatttaacctcattacctacccctctctccacaatctgcatctcagcatcaccaaccttagtatgcactttaccccattccaccatgcgttttaattcagcggcagaaggaaaaatagtgcgaaaagaaccattcccattatcatgtactacccacctccatcctccagggattaatctttctaactcagaaatcacagcattcaccgtcatctgtcctttagacaccttaatcaaagctgctctaggctcatgtttaattttctgaccagctgaaagaggaatatggaagaaacccaaaccatctcctgcatatccacataactgagcagaaggtttaacagatgatcgaaaaatagggcaacgagcaacaatatgatcctcgctttcacaaatctcacaataaaatttagacaagcattcctgcattgtatgccccttagtataacacctataacagtatggcttacccgaacctttcacctcgacctttgcttttcccttgctctcatcaatcggacaaaacaccagagcttgctgatcaacaccacgaacaccctctgacccatgagggaccaatgcaccttagctcacacagattaaacatactggccaagaatattattcgatatgatcatagtagtagtagccgagtcaagtacagagcaaatgcttcgaacagttatttgatgaactgacttggcgagcatccggctccaccaaagaagaaatgtagcccgctgtcatatgaagaaggacggcctacttgatagcagttcaggtttgtcgttcttgtaaaaatttcgctaagattgggagacacaaatttggatgtcgatgaataaattacattcacatctgtgaagaaagcagctcttccctctccttcgtctggtgaatagccactacccatgggaggaaaaggttcacctgttgcagcacttgctacacccatccatccaatcatatttgcagctccagacaagtcagtgaagagctcccccggccagtatcccaccaattcctctccaaatagcaacacccagacatcccatatctatgaatttaatggaaaaagaaaattatggcagtaaacttgactattgcaacaacttaattatttgctgttgcaattaaacagttgctttagatatgaatctttgtactgtgcaatatggagcaatacttttggtagagtcagggatttaccttaaaaattgaaattattattaagtatttttttccatcgattgtggaaattggcttgagtactgctccagggactattctattgctaagctgaataaagcccgcgcaacgaagattagtacatgacttgtctttattagtctgttgcatgaaaaagaaaaacgtgacagttatttctcataaaaatgtgattcactttaatacaatttgagatggtgcttttggtaaccgatcatacccatgcaatctcgaaatgagcgtgattgtcaccgtacatatctggatcaacctgggattgaagtaagcagagttgtacattactaaatgataacaaagcatgtaaaaatgtttgtcataatttatatattgttgagacttagtagttagtacaggttgaaggtgacaacaaatgtattgcctttctcatgtgacgaaaatatattttgttttctgaaaaaacaactttaaattgttcaaattagattctttaagataataggaacttacataccagcctgcacctattcgactttgtccgttttgtattacaacaacagccccagtatatcttggtggtcttcctgtacaaagatatggttcccatactgaaatggatgactgtgaaccataaaaggtagatggttctgtttcaaccgctgccatctagaataaaacaatgaaatggggtatcagtattaaatgaagaataagcatagagaataaagtgtgaaacatgtgatgggaggtaatacaattataaaaccattgttcctacattttcatatcaattggtgtttccagtatcattgtgtcctatgttgttgtggaaatgtctggtactcatggatgacatgtagctcgttaggattggtaccgtcccatagggacactcaattttgcacatatcaatactggagatataaattttagatcctttagcatcattcgtactataagggaaagaacctggctgcatctgcataactcaaaaaaaaatccaatatgtacattaaaatcattcatgcttcttaatggcgcaaaccatgtatcatatgatgagatctataaacaacaagttaccaacaactgggtggtatgattcttcagcaaaagatgcttcaaagatgcctgtgatttgaaattaacacaggcaaaggtttgcccatctccactctaaaattcgaggatcacaccagttttgcattagaacaaactaaataataaaactagagtggtttgttagaattcaatacatacatacatacatacgtacatacatacatacatacatacatacatacatacatacatacctgaaacatcttgacgactgaatggtttacaaactcttcctttcttggctctgcactgaatgttagtgatagcaaagaaagtagtataaatatttttgcagttggtcctctatatcccattgcttgaaagattctcatagaacatgatgctaaaacatatgtgaaagaaactatttatattgctcacatgactctaaatctaaagaaccatatttcttccttcatttatttcaattatgaacataaatgccttttgcttcagaggatgtatatttatgttggtagcagcaaataaatttactgatatgactaaccaataaactgtaaactgaaaaaaaaataatatatgcctccggtaatctttcctctctttatgaaactaggttgttgttcaaatgaattattgcatatgcgttacgacaaagttggtgatcatccacacttgctggtgcgaccattctatatctatgcacgatgatggaatttcgcgaggtattgctattaacaaggtgcaagatgtaaataaaattttttccactcgtatagaactctaatataaaagaaatcaataaattttgaatcatttaaagcttttgcatcatgacgttttgcgtaataccatttggaatctataatagatccatgcgggaaaatgtaaatggattaagatttcccccaagagtttttttactgtccagcaagctggccttgtaccaaatatggtccgttgagtggccatgatcggacggctgacatagattggtacctccaggtaccatttgccctgaggtaccagccaaaggtgagtgaggtggaagggtaaatttgtattttcacattagaaatgagtcaatcgattttgatcctccgtatttggacgaggcttaattagcttttgcaattctacagcggcggtgacggtgctccacctcgacttcagcggcatcggtggtgttcaaggagctgtcttcagtgacagcagggatgttatagtgttgccttcattgtgcttcatgttctccacgatgcatgcctagtgcgtttggaaaactagatgaatactccgtcgcgttggtatggaaaattatgttgcataatacgtacaaataagatgtaatatgattatcaaaactaaaacaaattaatacaattttgatcctaaaaataattgagattgcatttttatgagagaagaaagatgaggcaatttgagccatagatctatcatacaaaggctaaaaataattagggtgatgtggcttaatgagagaagagagaaatagcattaactacacttagtggggatgaactataacaccatgaaaaatttggttttgaaatacgaaattaaaaattcggtataaccaaaaatctttttgaacttccttgcatactggaatttattggattttattttccgttttccggctatgcatgggctaaaggacgaacgtctgagaatatgcatgcattttgacttcaaatattatttattcaaagaaccatgattatgaaatatgttagtatttgcaaataccaaatattttcctgaaaacccttctctatgtaatagatcctctgtggcatattcaatttataaatagggttacatattctaagtttgaatggacaccctctatggtatagttcattaaaacggaaattattttacaaagggaatattgctttgattattgtctgagaatatgtccggtttttccccattaataaagtatttattagaaaccgtatttgtgaaatataattcctaaagggctattttaaaagaaatggccttctcaggtaagtccgttttttcccattgaaatgcatggcccagcgtgcataataggatttgttattagttgtgtgtgtttagctgttgttccaaaagatgtcaattaacccttatttgctaaaaggatgccccctatttgacgtcctttccttatcctccgcgtctgttgcattaaagcgcttcggtactaatcagacctgaagtcgtttcctttggtcgcaatgcgatatatatctctctcaaactcttaccctacgattaatttagaatcaccctatcagttcaaaactcgataatttcctcaaacacctacaactgatcgacgtatttatttattatatgttggttataatatcctcgattctattcctaccgtgacgaatcgatttgtataccacacgtcgtccctaaaattccttttgcattaccgtcgttcgttcgtgcaaagtgctcgcaaataagtcctaatgctaatcctcgcacggcctctttgccaaatcaaatccaaatatcccagtttaaacagtccaactgctgagctaagtaagttcccatctatacggaccaattatcatccaagctaaccaagcctcctacatacagtccaattatacagtccattatacggtccatttcacagtccaaattatacagagtcgaatcaagttacgaattgcctagctaattacaaagtttcctagcaaaatgtccgagtctcctgttacatttggtccacccttttttctgccagcccaactacaacacaaagtccattccaccccccctctcaaggccggcccagcccctcactagcccatgacctgccaaccaatctaagtccttttgtcctccctctcaaccctcagcccgacgcgacacagccaacacgcacgcaaggtgctctgcacaagcacaaatcctgcaaaccaggcaagccagcataccgagccgccgtcttcatcctcccccacaccttccacccgggattcacgtacaaacttgatgccggtcatcaactcgcggacgccgccacaacaacacccagtgcaccaccctcccaaaatatcggcaacccagtgagaggtgaatccacaccgaaaaatgagaaccgaaagagaatgcgtaccttgtcctccctggcggtgtcgacgatccggacctgaccgccgacgtccatcacatccaccgctgctccaagtccactgccccgctccctcgagctctagccgccgccctcgctcgcccatgccgaaagcatgaggcgagttcacggggccgccagcgcaccaccgccgatgtcaacatccggccccatcggcgccgcccatcccatctgcggccgacgctacgccgcttccttggccgtcgctcgcccatgcgccgctgctccgggttcaccgccctcgcatgtacgagctccaaccgccgcgccgtccaccgttcctcgcagtcctgtgccgtactgccgacgacgtcagccgaacagggcagtcggccccgtcggccgagtcacctctgccggccacgatggctttaaggattggtttggtttgtggtctaaattggccttgccaatatttggcaattttaacagtgtttagtattggtttgaagctaaattttggcgtgcctaaagaaataggtcatttcaatagtgaaattaggttgttttggcttcaatccaaacacaactttaccttaccaacattgaccatgtcaaaacttaccaaaatttagcattaaccaaaattgctaaggtcaatttaggtcacaaagcaaaccagccctaaaagccgtcgtttcccactgtcttcctcccttggcctccaagctccaccaccacctcttttgtcgccgtctctcctctatccgagccaccagcgccgccctgactcctcctcgttgcgccggcttttcaccccatccaccgtcaccgccgcccctcccctactcccagcaccactgctcatcctccccttcgcgccggcacgcctggttgccgtccacgacgcccgcgtctgcctcctcgtttccttacaccgcgccgacctctcccctccatccccgccactagcctccccctcccataccgccggcaacctccctcctctccatccccacagccagcatcctttccccgctaccgccggtccgcgaggctcctccggcccccttccttccctcctctgccgccgtcgcacgccgccgcaccaccatgcccagtcgtcgcccccatcgcactcgcgcgtgtggacctgagaggagtggaaggagagagagcagagaggagaaaccgatagaaagaagggagagagagaagaaaagaaaaggaagtgggacccactagtgggagccaccatctggactattcctccccgtgaccctttggccggctaaaaagtacatatgatctccctctactttattcaccaagctccgaacatcaatccttataaaagtctatgttacttcccttttctttcttggccgcgcctatcgtaagatgcaattttttttcacatattttgaaataaagtatggtatactgatttttgttttctccttgataatgatgtctctttattgaatagagtaataaagttccttccatttctcctgttcctacaaattattgtacaaattattacacccacgtaaatgtaaacacaacatatttcatgattagatcatatcggcaccattcccagtgtcacacatagtccctccttgggtcaccaccttctgctcattcctgtacacgtacctcctcgcgaagaatacgtaggacagcagtgccaccacctcgatgatgcagaggacgacgtagaacctctcgagcttgccattgttcaagttggccccatccaaccatcctccgctgccgccattgcctttaccgcctcttcgggtgacacggttggtgacctggatgagcaggctgccgagccacgccgacacgccaaggatgcagtagaagatggagctaccgatggacttcattcccatagacacctcgctgcagaagaactcgaggagccccacgaaggaggtgacgtcgaagatgccaatgaggaagaattgtggtgtcaaccaaaatacagataacgggatcccggcggtgccgtccgcgaggctgctctcatcggcggcagacttcctccttatctccaccaccgcagcgacggcggtggccatgatggtagcaatgaaaccgacgccaatccgctggaggtgggtgacaccaccgacatagccggtgagcctacggagaggtggcacgatgacgcggtcatagagaatgaggatgaccagctggaaaatgattgggatcaggaataatgtcgctggcgatatgtggacggatccgagcttggtgttcatagtgctgccttgctgcacggtgaaggtgaggatgagcggcatagggatgtagccgagaacggcagcggcgaagatgggtgccatgcgtagcaagatcttggtctcctccacctggttcacgctgcacagcgaccatgcaccagcatcattaccagtcctgactgctgctttctccaagcacctgcaagcaatgaaagattccaaccgttactcattataagttacatgtgccaactggtttgactttgtaacttatttacttacttcattttaaattacttatcctccatgtttgtcccaagttaaatttttgtatctttgaccattagtttttacaaattattgtagtctaacagcatgagcattgtatatcataaaagtactttctcttggtaaatctagaaatatatatcttatgatagtaaaatagatgagttcatagaaaatgatggtcaagcattaaaatgttttactgagaacaaaaccaataacatgtaatttgaaatcgagagaatacaaagataaactagataggcagtttatttataaaccactactgtccttacacggtgactcgctgcagctttagaaatggaatatagaaggttgtcacaagtttttattttactactggattccccgggcgttgcagaagagagtttaagaacttcaaaaaatctcgaagaaaacagttttctaaatcgtgatactcttaacgcttgaaagaacaatactttcgctctatagtagttgatttggaattgcaaacataaaatgacacatggatgcatgtataatgtatggtagggatccaatagctatttcttttctagcagatatggctcaacgtatattaacctttatttgcaactaggaaggtagcctgcgcatttgcgcgggcatgcatattattttttttttggaaatagttgtaacaaaagaagttgaaattaaagtaaggttagtttttcatttttaattgaattttcaatgtttactttttccttaagaagtctcgatcgagaaacttttattgctcataagtttatctttttaccatcttgctagccctctttttaattgatcaaatgtacatatcttatatagcgcttctttttaatatatgagaccctacatgatattttttaaaaaagacatagtcaacgtgaatcttaaaataataatttattaggaaaatataacttttaatcatattattataacaaaggctactaattttatattgccaccttagaggcctatacatacaggttgcagagaaacccatggagctactttaaaggatagaatttactgaactgatttagcattaccttcgcctcttggtgtgtttaatatgacttgtacaaagagaaatataaaaattttgaaagaataaaatattatcatgatgtaaagtgggctatgtttttctataacgaagggagtagattgattcaatactatcttacgggttaagtgctccataattagtttttatgtgtaaaagcttgaacgctacattgtgtttcaagcactccactaaaatagttatgtgcaaaaggattgcaaaaattattttcaaagaacacccatgagtctgaggcaagaggctcaccacataggaggctgcacatttgagccacatgtgaaaagaatgttcgcaaaaatcatttgtgtagttgtgatgaaaataattattcatacaattaaaaagttagaaatccctatgtgaaaataatggcacttgtgcctatattattgtttgccaacaatagttagaacttgatagttctttctggtatgtagtaaaattagctagatattttacaacttattattgtatcccgttgctaaaatgcaccagctaattattttctatatgctacatttttaatgggtaccttggtgcatgtcgccgaatcagccttcttggcgccttaacgtcgcccgcgcgcccccgcaccaccatctcccagcaccggagaggaaaggagagggaggcggtgggcggtgggcggtgggtggtgggttgtgggtggtgggcggtggggccgtgggggtttttaataacgcaattgttttctttttgcgagcggtgctctctatgtactttttgctagcaaccgccaacgaaaattcgatttaataactaaagaggtccgcttgcaaaaagacttctactttagcggtcctcttaaaccggccgctagcgaagacctatttttgctggcagtcctaagcacttcatccattgttaaaatttcgctggcggttttcacttatggccgttagagaaaaagaaagtttgacgccatgaaaaatcagttttgtagtagtgaaccgatttaagtaggaatcgatggtcgaatattttgtttttttattttctctaatttaagagtgctatgtagttaattagaaatattcgtatgatgtttagtgatctataaagagagtacggaggaagagcttgctatctagtaggttaatgtctatttatggatattttttggctcaaaaataaaaaacaataattttagttatcatggaaatataaaaaagaaaggaatagaggaagattaggttacgtacattcatgataatgccgcacataggcatggacagagggagatttttcttaagatagatctaacaatttaaaataatgggttcattatttaaatgaaaatcgatgagcgaatttctatattttattagagtgccacgtgacgactcgaaagtgtttataggataccatatggtaggttaggagcgtttgtaggaagtttaatggattataattacgctcatcggggtatctagaaacaatagtgtacatacataaatattgctaagataaatgtaatagtggaaaataattggtcgatcatatttaagttaaaatcaatgttttttttgtttttgtcttcataatttatatgattttctctaatttattaaattaaagtgtttcttggtgtcttaggagcttatttagttgtccgttattaaaacacaaagaaagtaattattaagactatagttctgcatgacaaatttctgtaattaaaatataggtaatatggatgttattttttttatagataagatacatcatatactttataaaattttaagtagtgaacaaccgaagaaaataaaggggtaacaattgatcgcttcttttccaaccgtgggtacaaatgtgcatacatgtatgttctttttttattttttctgatgaatagttttttattgttttcctttagcaaatagtgtgtaggtagattcttacgtacgtttgtatgtttgtacgtacgtgcagggatgcttgaatgtgggcctgtagggataggagagggaggtggaaaaaacaattctaatggtaattaaaaatagtgggtccagttgtttattaaagtgacacatggcgttttaggagtgtttgtaggactcccacgtggcggcttaggagcgtttgtaggaagtttcatggacttttagtatataataatagatagatagatagatagatagaagatagataactaaaataagcaagttgtaaatacacatgatattggatggttgagatcaaagcatgagaggatccaaaggctagattttttggttccaactatataggatataggatatatagattggataccatctgtctttttatggcatnnnnnnnnnnnnnnnnnnnnnnntttaacccgaaatattaagatggtgaaagaatgtgcctaattcacttatactatagcattactaacaaattaaaggaatactctgataaactagcaatgttcagagtttggccgacatacccaaatccatctgttctggggagaacttcgagggcattgttatcatcatcctggttgatttgtttcaattcgctggggtcctccggcaagcggacgtttcttttcctgaatgccgctacaaaaacctagagtacacagcttgatcgattaaataggaaaaagaacagctatgttatatagtgatatgcttcctgcttactctctgtcgtagtgtcatgcatggatgacagagtaagcaggaatcgtagtgtcatgcatggatgacagagtaagcaggaagcatatcagtattaggctttattaattgttctttttccaatttgtcatccgcattaggctttattaattgttattcaatcctctaaagttctacatacatatagcttaaatttatcacaagaatttagcgaagtttatagtttactacaacgactgaaaacttttagctcaaacgacgagaatacctgcaatattcttgtgatggggctccccgtcggcagccggttccggtagagcgggaaggcggcggcccagaccagcaacccgagcaagacgaaggcggcgcagatggcgaagccgatgccccagcccttgctgttctccacccacacgatgaagacgaggccgactaaaccgccggtggacgcggcgaaggtgtaccagttgtagaagctcacctcctgccgctgctcgtccgggtcggccgggtcgaactggtccccgcccagagccggcaggcacgccttcatcgcaccgtcgccgatcgggaccaggtacaggcccagcagcagcaggctcaggtttgcgccgcgcaccggctcgcaggtggtgctcgccgctgccgttgtggccgccgggttgcacggcggcgggtgcagcgagggggtgtacgcttgaagcgccagaacgatgtaaccctgcggcgacgaagtaaccagctatgtgtgagaactgagaagcttgttggattgtgcgtgttagtacttgattattgctgaacattcgagtgatacttgagaagctaacgggagagataagtgtttttctacaaaaatttggtacctcctcgatcgttaaaatattttttcccctaaaaagcaaggagcagttggtgcacttggttatttcgataaattatatattgttaaagaccgcatttgtatttttttcacatttctcttgtctagacaatcttgtgttaagttttgggtgcatatttgttgatacatgttacttgcaatgttctataaaacagtactctccctctttccgtagataattgttggacgtgtttaaaaaggaacttattaagacaagactttgcctattgatattgcgtataatttattgaatagtattaaaaaagctgccagaaatcttataatctaaaggagtcctaaaagttgacacatgacaaagcaaatcaaacttacaagccctaccacataacatcacatttgtgtcgccttattagtgtcggttgacaaaaactggcactgacaccggtttccagctccagtagacccgtgcagaaaacgggagaagaaaaaaccacatcagtgtcagtctttattacatgaatcggcactaaacgctaaagtgttagttatttaggtgagccgatacacaataataattattggtaccttttatactggaacaaaaaaagttgccagagccacaagagccgagacaagtttcatcttcgactagatgagaccacggtgagtcttaaaaaagaaaaatgaactccttgatgaaattataagtctcaatatcctctctatctttgtgctctcagtcgctttcctgggtcttctcccctcactgtctcctcaccagcacggtccactcacagcagtggcctcctccattgccatccgcatccatcgttcaatggcgcggcgtcctctcctcaccggtggcctgctccaccgtagagcagtgatggctatctcccaaccagtggtgagcgctctttccccactggtgagtggcagcagcaccctcttcctcttgcgcaaccattcccatggcccccgtcatcaagctcgggcagctggatccgactaacacgaacttgggtgggacgtatatatctagccaccacccgtccagaatgcaccagttccacgcttgacgatggtggcaacgacaacggtagccttgaccttcagcattgagcagtggtgttcttaattatgtgatgccttatttgatactgtagatgtggataatgatgtgttgttgattctgtggttgtcttttttgttggtttgttttgattcttctagatggggtatggatatgttattaacttgtgatgttcttgaatgttgatgtggttcttggggagagggaggggtggagttcgattgatcggctagattcgagctgatgcgtcgagccaacaatttcttttttttattacttccataaccctatcaatgccatctctcacatccggcatacactactacaaaaatggacacacaggtcagcactataggtgccggaaatgctaaaaccggcatctatggtacttttcccacctaaaatgtgcatccattggatacaatcggctagaaccagcacctttgtggagagataggtgtcggttctaaataaaaacggatacatatagtattagtgtcggttttttaagaataaccgatatcgttaatatccattagtgtcggatacatctagcaagaaaaccggatgaaaccaatggaaccgaattccacgagttctcattccgtctctctctctctccctttttattaccccctcactctctctctcccttatcctccgctctcttgttcactccgcctcctcccctctccccctctctcttcctctctcagctctctctctcgctccctctctctctccaccacaccacccgatggtgggaggggaggcggttgcgccatcccctccgccagatccaacggaagaggaggtgacggcggcctggtggctcggcggcggtggcggcaccctcctctctaccaaatatggcgggaggggaggaggtggaggtccggcgcccttccctccactagatttggtagaagtgtaggcagcctggtaccagcaccctcccctcccctctccttgcttgtctcattgatgttcttgtgttcttagagttcttccattttcttcgactaaatgtaattaagagtgtgataaaatctagttggggtgaagggctattgcttgatgcatgggctcgaatcgagctgaggcgttaagccagcctcttttttaattcctaggacctcaaaggtgtcacttcctaaaccggcacctttgagaaaactcgaaggtgccgcctactaggtgccggttgcgaaaccaggcatccatgtgggtttggcaactggcacctaaagacttttttatagtagtgatatatgaactcaactcatcagtgccagaatcccagtgccagttggggacctagcttggagagccactttgaaaaaaaaataaagacaagaacaagtgatttaatctgaagttctttacaaacttcctccgccaattttaagtgtaattgttggcttctgtgtcaaacatttgactattcatcttatttgaaattttttatgattagtatttttgttgttattagatgacaaaacatgaatagtactttatgagtggctttttttttaattttttcataaatttttcaaataagacggacggttaaagttagacacggaaactcacaactgctcctagaatgagagagagagagagagggagtgcatgcatattaaataaatagactatagtactcacacgacaaataattgattaataggcttgatgaatgactggtgttagattgacagatggtactacccgataccaatatggtcgattgcactaaatatttatagtacttccactactacaaagaggcacatacaaatctgcactataggtgccggaatagttaaaaccagcacctatagtgtttttcccatctccacggactgaaaacagaaaaaaaccaacacctttaagagactatagatgctggtttttgagaaaaacagtcacctatactaaaagtgtcggttcctataattcagtataggtgttggttttaaaaaaaccgacatcttataaaccgagccaagccacatggagatgcggaagatatttgtagccgtccacacacgctatctctcctcctccacaatgttatcttcccatctctttctgctccttctcctccccaaccttatcttcttcttccccctcctctctcatggctacggtgccctccttctcctcccctcctcctctcacacgctcggcggcgctctcctcacgtctctcggcggcagcctcctcctcgcaacgccatggcggtggcgccctcccggcgaggaggcggtggcggtcctccccgccactagatctgatggtccggcgagaggaggcggtggcccgacgacgacacaacggcgaactcccctccgccagatccggtgggtggggaggtggtgggtggcggcggcttaccgagagcggcctccccacctagcggtggcagccgacagtggaggcagcagcggagcctcccctccaccaaatctggccggacttggcgacggcctggtggaggcgaatgggagcgaaagcgacaacggtggcttggtagcggatgcagcggcggcggcacagcagtggatgttcatgcttgttcttgtgtgttcatcttgtgttcatgtgtgttcatcttgtgttcttaatgttgatgtgtgttcttagatgtttatgttgtgttcgtcagtgccgccttcgtggtgtcggttgggacctaagggggtttcccaaccggcatcaattaagatttctgttgtagtgttcacttgtcacagtcacctagggtggacatccttgattgacgtgataaatactatatctgagactaattttctaaagttttgcaagaaactgttcataatattataagagtagaacttgcaaaactacaaatattccagcaaactatcacaaaatatatatttaagagtatatatgtatcacaaaattacagaatttacattaaatatatcacaaaactatatatttgttgcatcgtatcataaatctatagatttactgacaatgttatcaaataactacaaattttagagtttagaattcatatcagtattgcttttccaaagttacaaaagatgttattttgtgacacaatgtcttaaatctgtagtttcatcaaataatttatgctaactctgttttgtgatagattgatcaaaatatatgtagttttgtgaaatttacgcacattataattgcgccttgagttaaaataatagacaatatcatcttaaaaaacatcaaacgtgatatatgcaaaaagagaaaaaacgaataattaacatactatgatctcgatgggagccaagaggatgacggtgtagaatcgtttgacgtatgagtcagctaggagggccgccgggatggagaacacctgcaacgcggcgaacaagttggtcaccgtcgtcgtcgcctccgcgacacccatgtgcatggtggcccggaggtagctcaccatgttcaagacgttggcgatgttgggcgcgttggtcaggagcaccatcgctgcatgcattaacatctgatcatatccatgattcgttatcaacttcagcatctgagagcgttctgatacatgagttgtattaagttttaattcggtccagaactgaattttgaattgtagcacagaggtttagatacgtcaaaattcgggattggaataaacttggcttgcttgtaagaaaaaaaagtttggttatcttgcaaattgagcatagcttaaccgattaatttccttatggtggaagcaactcatccgaatctgaattcaagttgcagacttcataatggcgctcgtatttatagttaattatgttttcagtcgtaggtgatgtacccgtcaacaactagttttgtacggaccgggtaatatcaatatataccggtctattttgtgcgcatgttgtgagcgcctaagtttatattgcgtttgttagaaaaagtttgattgtctttatcctatagcgagttaaaatttatactagcactatatttcaaggtagatgtggacccaaggtgaaaaaaacaagcttatctttgttgaccagtaaatgtgtgtattctacttcctttatcttaaaataagttaatccaaattcatattaaaaaataaacttattatagaacgtaatagtaggaaccaaggttaagggattctaaccaaatggtccaaaattcgtccatttcggtaaggatcgagactaaatttcgcccatactttatgtttgctgaattttggtttaaatttggtaataattaatttctcacatttttttaatttcattcattttggtcccaaaatttttatacaatcgaatctgagaacactggtagaagctagccatgaacagaagccatcaagccaacaactcagtgacgagcaaagctgcaaaggagagacatagtactaaaaaaacagtagtacataatcatgcttagctcaccatggatgaaaatggatgctcttacacctccatgcttccgggtgtccaccggcctccccctccaatccactagccctgatgagctgctcatcacctctgtctgtctctcttcctctatctgaaacctggaaatgttctacgtgatctgagctgactgactgtatttgcagttgcagccatatatataaatttctgtctggctagtggcgattgatggacgcttgtaatatataaagggtgggtgttgtagtagaacattctccatgtggtagaacattctgcatgtactctaaaccttatagttcgcaataaatgtagtccttacacaaggtagtacagtactacacctgccagcaataaataaaaatatcattgattattttaccctatcacatcgaatatttggacacatatataaaggattaaatatagaaaataactaattatacaaattgcgtgtaaattgcgagacgaatcttttaagtataattgctccatgatttgataatgtggtggtatagtaaatatttgctaataacggattaattagacttaataaattcgtctcgcagtttataggcagattctgtaatttgttttgttattagactatgtttaatacttcaaatgtatgtccgtatatccgatgtgatacggcataaattttcacccctggatttaaatacagccttagctatgtattcattctctcctctctacccaaactattgcatattatttggtttttatatgctcttaggatctacttattgtctcctacacattgtgaaattttaacaatagtagtatattgcgtgtgcgttgtaaagggattttagttaaataaaattatcacttcccactattgctattatttttcatacgtaatctgttatttatacatatatttattactgacatgtatggctgtatgccctggaccttcacaccatctttcttctcacaaaaccacatatcctttctctgcttgaaaaggaagtaagggagtgatagacgtactgaggaattctttatctcaccaacaccgctatttcttttcaaataagtatagaataatagaaatacctatatggcaccctttggtaaggattgctgatgccggtggtgatggcgtgatcaagccgctgaagaaaaatgaggaggctgtgtccaatggagaaatagggcaggtgagtaggtgaccaggacatatgcagagtgcgtgagaatgtgaaaggacattgaggtgacactaaataaaaattgaactgtcccgcgagataacaaatggcagtacgtttaattgttactgaggtgaagtacgatgatctctgtgcgtgatttgaaaggaaattttcgtttgacaaaaaaatgcttctatttgtacattactgtgtaataaatgagacgtaactgtccacaatttaattgtaagtaaaaaaaatttttcttgacggaaaaactgtacaggaggtcctgcaggggtctggatcccatggagttcactccaactccaccgggtggatttgatagaatctctacggtctcttttttttatcaacggttgagacgaagccattagttcccacttcctactagtctcttttgaaaaaaaaaagaattcctcctaatcttgtaacaataacaaatcaccgtctacaatatagttagacattagagaatatacaggctaattttacttgcataacccagaaattctttgattaatccatggtgtaaacaccgtactgagcatgtgcctctatttttgcatgtatatggtttatgtgtgtttgcatgtactatgtggttaacacttttttttacatgaacatagcttcctgtgtttgggaaagaagagaacatgtatactttgttaatttggtaggcagaaacttaaccattactaacataataaaaaaataaagtaattcccattcaaaccataggaagcagtagatgccatggatttgataaaattcatccggtggagttgtactcaactctatgggatctgtacccgtcatgcatatatatatatatatatatatatatatatatatatatatatatatatatatatatatatatatatatatatatatatatacataattcctctctataataaaatataactgcagttatatttataactagacgataacccgcgctttgctgcgggatataggttagatattggaaaaatgatgaaatgattgggattgaaatattatgaaaataatttgagaatgatgatttagcatgtgtatgtttaattttagaataaaataaaataaagtgtaaatataattactataggcttgcatgttgagttttatgtgcttaatgggttgacgtggcatacttgtttatatgttttaggagtgctaataaatactatgcttgcatgttgagctttagatgtttagtgggcattaggtttatagaaagaagagactcctctttataatataaactagtgcatgtctttctttccaatagctaaggggtacgaaaaagcttaactattatcgctctaggttctattggctgagtaatggtcaaaaacaaaagtattgcctcgccagatgggacattctttgccgctcaaaagaccatggggtttaggaattcatgatctggaacttaaaaatatagctttgtttagtaagtggctatataggttgcttactatggatggagtttggcaacagctaatacataataagtatttgggttcacaacctctttctcaagttcagtggaaaactaggaacttatgttttttgctagcctaataaaggtgaaaaaagactttttttttccgtttcgaatcctttacaattaaagatggctctcaaattagattctggaaagacaaatggtttggagatgcaactcttcaagaacagtacccgagccttacaatatttttagacataaataaagtactattctagaggtctttcaatctggcgctcgaatctttttatggtgaagggattcaattggttcagaattagtagcttggaataacttattacctcggattgctaattttgaactaagccaggcgcaacatgagttcctatggaatttaacccatagtgggaagtttacagtaaaaactcactacttggcataagttcctatggaatttaacccatagtgggaagtttacagtaaaaactcactacttggcatgagttcctatggaatttaacccatagtgggaagtttacagtaaaaactcactacttggcagtggtccatagtgatgtccagaatataaattgacacctctagaaattgaaggtgccactcaaagtcaagatttttgtttggtaccttcatcgtggagttatgctaaccaaggacaatctacctaaacgtaactggcaaagcaatcaaaaatgttattttgtcataacatggagacaattaaacacacatgctttgaatgtcattttgctaacttagtttggtcgatcacttatgttgcgtcaagaattactgcaccacataatatttcacacaggtttactaaatggctttcaggtgttcaaaaatatttacagccgtatgtttctctgttaggggcggctgctatttgttggtcgcactggttatgcataaatgatatggtttttgacaaaaaaaattatttcttctcctgtgcgggtagtctatttaattatctattggctgcgcacttgggttatactacaaaaaccgggttcgcaagatttggttactacggtgtgtctattcttagagcaggcagttacggaattttttacccaaggggatgggtagcgatctagttttaagattgatggccataatacttcctgtaatttattttcttataaatggtgtgtgtcctagttatgcaacatccaaaagtgtgcttagtgcttttgtattatcctggtgtattggctgagttcaataaaagctttcattatttaaaaatatatttataggaggaacaagaaagaaaatgtaattaagggttaacttgattaattgacactagttttattaaggttaatttttaaccgcttgtgcgttttctcagagaagtatatataaattcttaaaaatatgttataactgtttgtctttttacgttatgttataatataagtgaaatgtctatagacaacaatagtagctattagggaatcgatgtagtaatgagcttatctctactactataaaaatattgaagatgtttccgctataattttgacgtcatccatgtttcaattggttttagttttatgtttcggttttaattttagattatccatgaaaatatgtcgacaagaaactaccattagaatttgttgtcaatgatgccgccagtaatatcttctccacaaaatagtttttgtgcagtttttgtgcatcttctctcactccacaaaatcatatcactatcattgactcaaggttttggttttgttagatgacaccccgtgtgctgcagtgagaccttgtaagtttacaatcaaaattataaaccaagagaaggatacatatataaatgggaaagtcatgatttaaagcaaagcgaatagttacgtcacaaattttgacaatttgactctttctgaaaactaatttcggaaatgaaccgtggccaaaacttatttaaaaaataatccttttgttcagtgccaaatcgtatggcgttgaacttagacacctcagcgccacgtcaactagcactgaatgttgtgccaccgtggatgggaggttgagtcggcgtgccaacgtgcattcagcgtcgtgctatttggcgctgacatgtgtaagtttagcgccatacgatttggcgttgaacaaaaggatcatttttaaaataagtgttgtccacagtttatttgcgaaattagttttcgaaaagagtcaaattgttaaatttagtgatagttacggagcccgatgtctagcatgtgctatccgtgcaagagcctgtgggcttgtcctttctccatgcgatagatatgcacgctgcttttttcgtgtgcaatactgattccgtgtgcaatgcttttgtgcacatcccgtactgcaacgcgcacttgttggtctaggtggttaggatcagacctctaggtatggttgtaaaggttagactagcctatggataagatatgagagagcttccctcctaaccagacttctagcaggttaggttaatgtcaaagcaggatgctcttctagcaggaaagtacgacactcactcttgatagttcggctagggtgatggttccaacctcatgttccaatcacacaaatataatgtagacaggtggtttacataggtttgggtcattcggaagcgtaatacaatgtgtatgcatgttgggtggatgttattctagatgagtgatgatgaacccttgcttcttcgcagttttttttagatctaacttatgctaacaggactaaatgtaattagttgaatcaaaccctctttttagtggcattggtcttccttctatatgccaacgtgataacacagtgcatacaagtgtatatgtgatattcagtcttgtcattgtccttctatggggaccggctggatgtgacgggttcactaatgggctgacatgtagaatacggtggctgaagtcttcgttccaactgttaatgggcccaccgggctgtcaccgatgctagggggagtgtaacgtgttagaataaatgggctaggcccgatttttctattaaaatcttaagggcccataataaatgtgaaggatagtaataccacccaaggaattaaaagtggagtacctcaacttaaatagggagttattggaggctccctattgaccggttaaggtggggatcgaaaagccacatgcgtgcgcgagcgcgccgagccgagccggcgggccgaggcgagggcgtgggcaaggcgtgccgtgccgtgcgttgcgttctctacatgatgatgatgcttattctattttaagcatgctcctggttatgtttaattttatcactagatcacctaacattgttcatgtcatgattattgtcttaatattttagattataatatgtcgatatatgactatatttctaacataacgccccgatttttgcctggtcgaaaaatctattttattaaataaccatgttcaaaagttttgttctttgagtgtatataggtttgtgtgtcaaagatatcaagtatttcattccttgtaaactcaaagtcttagccaaatcttttccttctaaattaaactctcaggattcgtattttgaggttcaagctctcctctcaatccttctcaaaaatatattcaaaccctcgtctttggttgtccggtctactctttacaatttcatacatctcaaatatcaagacctcagtcaaatacttgtgaattgaaattccaaatttgaattcaaatattgtccaaagcctcaaaatatctctccaataatttcccttccaatccagagattcgaacaatatttgtttttggaatcctaccgctgacaaatatttcctatgcagttgcatatcaaaaccgacagtcgtttctcccgtcgaatttaatcgggcacaatggaaccagcaaaaggcgagtttttcctccaatcatcctctcccaaacaaaatccccatgttcgaattctggaatccgaatcgcgtcctaaatcatccctcattttttctttcctttgtaactctttttcttcaagctgtactcgttcaaaaattccaaacaaatagccaaagttcatagtgcagtgacagtccttttgcaagctcaaaattgtctacaaccctcgggcaaaatgacaacagacaggcataagtgcccgcttttattttccacaatgcagcaagcaaagccaaaatatgcacacatagagtttttttccttttcttgtccctaggtattattctgctgctatatttaatgaaaagtcacagtctcgtgctgcttccccttaaaaaaatgcacgcttactccactgctcattttgtttgatgcctggaccgaaccttgctgctttcgtctctcagcaaagctcggcgtccacgccaagcaaccgatgttgtccactgaatgcgctccagtgcgccatggcacagcgacgagttcgtctgtgtcacttgtgcacaccgaaaggtgtaagccgagctcacccatgccgcaccgaccctaccactcgtgtgccaatctgcccatggcatcagccgaacagggcagctggcctcacttggccgagctcgctacaaaagcgcctgttcccaccatcttcctcccttagaatacaagctgtaccaccatgcctactatcgccacctcttcttggccttagccgcccgatgcttgccagccatgagcagagcgctgcccatttgagcccccgaactgcacccatccgcctccctagccgaagcgccgtgccgacctcctcttggcgccgcaacccggccagagccaccggcgcacccaacctcctcttgctcccccggcaatgctcccttcctcccctcctcttcccaaagctgtcatgactcctgccctctacactgctcagttcgtgcagccactggcaccttcccctctctcgggcacgcgtgcaaaagaagcagaggagagaagaaaagagaaggaagaagcagagaaaagataaggaagaaggaaaataaaagaaaaagggaaagaaagataaggggtggaacccagcagtggggccaagtctcttgactcctctccgtgggcccacttggcttgaaaactttgcaaaagtccatatctctttgttcctcgggcgaagcccaagaaattgatttccgtataaaagtctgtactatctccttcactcaaaacttttggctgaagcccaccagcctagcctcatctccaccaagtccactttcctccctctgagcctcacaaccaaggaatattttcatggaaatatttctttccaatttaataaatccttttccaaattctagaaaatccattaaccttccaaaattcatatctcttcaaccgattttggatggctttcactttttttaatcacgtgtcggacgtttaggagatgcatggacgctggtttttctcgaaggtttgaagaccaatagctaatgcaatccactcttcgatcatattactcctactttataaatgtattgtttgcaagattgcatgcctagtgtacaccgttaatttgatcggccatcaatctactagcatatgatggatggaccaacctaaataactactacagaaaaggtaaaaggtgccggtccagaaaccctaataagtgccagttttctgaaccggcacaacggagacagcacggatgatacttgtcatcggtgccagttctagaactggtgccggttttgaggtcaaaaccggcacctatatggtcctaataggtgccggttggcaataaaaaaccgacacctatattttgggtaaaaaaaaattacagaaaattcatccatacaacccgaattccatacaaacccaaattcatccctacagccctacatccatattcacaatcctccttcattcacattcatattcacattcacattcaaaacaaataaaaccctataaacctaagtctaaaaattcgtaagaccaaaatttcctatctttaaatcctaaacattggcatatatatcttaactcaaaatatgctaagtttaaaatacctaaatcgaaagattgtaagtctaaaaattattgcactcctagtgctgcaatcagtatacttgtgtaccgcattttgttctattgcactcgtagcatgtccactttgtcagctgtgtgcttcaaaatcttaggtgatggcatttgcagaaaataaacatgaagcagcatggccatgtgtagatataagtaaaataagggcaacagatgatatactatacagcaaatgaaagcacacactatcagcaataatttgcttctgtagaacagaaataacatatttcagaaaaatataggtattgtagtgccagctaattaagatgagttaattaggatgttgatggtactaataatgacatacatggtaatgtctaagttgattctcaaatgttttcatgaccaaaggctgacagtgttgtattggcacccaaagttcttactcttagttttagttttgtaccatccttaggcatttcaatatcttgccagtaatttatctgcacaaaattggaaagcataaaagaaaatgcaaacaaagagcatcaaatagtacactcaattatcacataacctcatctactcacagaattagttccacattcagcctataaaagctcgccctatgtttttttcccaaagacatggtcttctaattatatcctctggccatccataagaatctacaaacgacataatacttttcatgcataaacattcatgattagtgttcaacagttcagtagccaccaaatcccagtgtactactgaatccagattcagtttccttttaaataaactgatgatatctatgtgcacgaaggtaatcaagaggtctgatgacaaacaaaacagcaacatctactgctagcctatctaaactacaggagaacacattgccaaatactttttgtacataaacacattcatgtcgagtattcacctatttggaagtcaactgtagatggtcgaccacctaaaagaatgaagcaaacaaatttatggatctcaataactaaagatgcataattaaagatcaaatctgaataatccaataaatcagcaaatgaacgcaggcactacttaatacttgtcagaggatgcttcaaatgtaacagaaagagcagtaattagtttagcatgaatatgtaatcaacaattaagcaaaaaaaggcatataattaatttaggtcattcaccagaaaaatattttctgcagaaaaactgaattcagttgagtattaagcttaatatttctagtttaatcctataaaaatatttctagtttctaacaatttctcagagcttagcacctgtcaatatcacttagcacacaaaaacaacatctgcctgcgagtattaagtcaacataatagaaataagcttgcaacctttctggaatgtcaactgataccaaaacgataccaacaatatcaccgttttttcaatcagcaattcagcaccataacaccaggcctaatcaagcatttctcatgtgcatcttcaattaatctacagataaaaatctgcagatcaccattgttcatttttccctaggctgctctttgtcctaagatgcaatacaacaaacaggtggagtgcagcgtaggtgatagggaaatgatttactgccaagagatgggagaagaatgcatacctgtataccgcttgtcatcagccatgtccaaatccgctagcttggcgatttgtccctgcagctcttcaagcaagaaccactcctttccatctatggagtatgataggtgatcaaaatccaaagctcccaaactagccgccatgaacaatcgagaaatggaactgggaaacgaatggtggagctccgcctcagccaacaacgacctagagggcgctacgccgccgagggtgaggagggggagggtgcgagggtgagattcgttgccaccgccgtcgccgctgccgccgcacagagagagaaggagagagtgaatggataagggagagagagtgaagggataagtgagggtatttaagtaaaggacataggtgccggttctaacactttgtgtggcatgaaaagctctattggaacaaatgtgccagttctagacaaaaaccagcaccttcgttttgtcatacaataaccgacacctatgtgtggggcccaccaatggctagtatgggagggagaatattaaaggtgccggttttgggtcgagaaccaacacctttatcttgtcgaaccaagaactagtacctttatgtaggacccaccgttggatataaaaagcactattgaaacaaaggtgccggttttgggttgagaatcggcacctttgtcttaaaaccggcacctatgtgtggggagaagattaaaggttccggttttgggtctagaacaggcacctttatctgacacaggttttaggcgtaggttttatttaaaaaccggcacctatttagatataaaggtgtcggttttttaatatgtggcgcgtgggggtgggtgcatgggcggggatggcattatatgtgtcggtttttgttgtgttggcacctatttgccttttttagtagtagttgcattactttctataggatattatcaaacttgaccttgtcactccaccatagcagtaccccgacgcaagtgtctccatttaacacatgattatgcttgattatcaagttggaaaaacttgggttgtgaaaggtttctaaaacctgactcggtgcttttgaaaataaaaagtcttatggataaaacttgtggtgcgaatcctctcctgtgtggtttggtttcgtagctatgcacaagggctgattcttttgtgttttacatccgggcatggtacaatatgatgaggacacaactagctcggatataaccatgactatcttatgtattaatcaaccaatggtgcatatattctacattagatttacatgttatgtatttgaacaaacgttgctacacaatgagttttctgtgtttttatttgcagaggtacttgcttgggcgaaggaaaacagactgagcgtaacgaattcatggatgatcaaagaagttgattggggaccatatcaagaccttctccaagtccactttcatttcatcacatcacttttagtgcatagaagacaagagataaagttctacacattttagattcggattcgggcctcctgacagcatcaatttcaaacggacctaaccgcagatctagaaggaatttcggggcccatgattacttgttggaaagcttatggagtctactttcatatggttttggtcccacgtcaaaattcctaccgagctgccgggaatctgcaaaacaagacacgtatctcatccagtccgaatctgactcgggttttgggccttaaaattgtgtcgtgagcttagcccaagggggtgtgcaccctagggcaaccctaggacgtccctaatcatactaattcagtagccgtcatcgtttagagttcggttttgcttagattattctgtcaagaacagtttcgccgctagatcggtttgtggaaccccaaattcgagtgcttaatcattcatatgcaatttggttgcaatatatcttgttcttgcttgtgttcttcgattcgcatgcagggattagccttctcggcgaggttaaccgggtttcggcacggttgataactagaggagacgtggtgctgcgattgcggggcgcagtagcgtgttcgtccagaagccggatcgagttgtgtcgcaactccgcccaaatcgaccgtttatcaatacctatcggaagttcgggactacatccctcattagttggtatcagagcgtggttgcccgttaggtagttttcttcccatgactagaaaattgccacacaaaaatgtttattctttacctagacaatttgagcagttgcattgttctattagattttgctttgttgaattctaaattgcatcgtcgtgtcaagtgttggtttagttttagatttaattttttagttttgagtattgcatatgttcattactttgggtctagggtatatcaagttgtgagttgtacgtcagttttggatctagttttgcatcttgacggttgttgccgggaccttgaaaaatcgattctactcatcacagagtttccgtttttatagttttcacaaattttcgttggtcagttgcgaagttgcacaaagtcgcatttagggtttgagtgtcggcctttgatgttgccgtgaagaaaaaaaaatagtaacagatcggtttccatgtaatagaccgacctgagtccttttccgggtccacctcaagatcgagtcccacactgttgctactgcgagaaatcaagtaatatctccacatcagaagccctgccgagacaccttagtggaaaagaaaaagaaaattcctttagtggatttgagatatttttataaaaacggaacgtacgtgatgtgagcattccatttttgaggtgatctaattttagttttgcactttgcatttgagtccctgttcaaggtaagtggtcagttcttgttgaaaaaaaatagtaaaaaaataataaaaaagaaaaggtagaaaggtgcaaagaaaaagaaagaaaaagccgcacaaaaaaaagaaaaaaaagacagaaaggtgcttaaaaaaagccgcaccaagaaataaaaaaaatcattcatcctttgagtatgttttcagagtgcagagttgtgcattgattcatatatagtccttagtgttgtcagttgcttgcttgagctagagttgagtctaggctaggccagcacattgactagtactttgaactattattcaacttttcattttctcattagcacaattgcgtctctttgctactatatattgtgcctcccaagctacacatatatacttctggtcagcaccgctttgatccttgcaatcgccacatcacgtccttcaaggtgtcatgaacccgccaccagttgtaccgtccttagcattgctggtaagacacttgtaagagcttggtaaggtgcttcatttggctgagttgttgaggggcaccactacatcgcgtagtagattattagggataaccttcattgtttgttgttatttttatgtttgcaatgacaggtatgagtggcgctcgaaatcagcgataccaacaaggtgcacgtgatgacagtactttggtgcaacaagtgctaagttctcaaatggagaaagcagagcaatggcagtatcacgaattatttaaaacaaagtttgtggttaaagatagagcatgtcgtactataatcgatagtgagagttgcaataacttggtgagttcagatttggttgagaaacttgagttgcctacacaaccgcatcctcatccatattacatggaatggttcaactcttgtggtaagttcaaagtaaatagaattgtgaagctaaacttttcgattggaaattaccatgatactgccaattttgatcttgtccctatgcaagcatgttctttgttgtttggtcaaccatgggtatatgataataatggatcgcataattttgttgctaatacatacacatttagacataatggtcagaaaataaaattggtacccatgagttttactgaaattttcgaagataatcttgaaaggatgaagaatggaatcgaggaaattttcaaagatagtattgaaaggacgaaaaatagaatcgttgagattttcagagataccaggaaagatactaatattacgatgccttcaacatagtctgagttattacaaaatgaacgtattgttgtgcctattgctttggatactaatattttgcaggcatttgagaacaaccaaggtaatgaggaagagaagaaagacgaagaggaagatgagaaagaaggtaatgataatggtgctatagctattcaaggtatccatatttatgatgtgccaactatgtccactacttatgctacgttagagcaacccatagtgaaaacaattgttgaaatacctttgtcacaaaacaatttgcttgatgtttctagtgataaagaagagttgtgcgatgtttcacttatatccatgccataactagtgaatgaacatgttaattctatactagaaccactatgtgttgagtttcaacatgttattcacattgctagcgagaatgaagagcttaaattgctatcttctttaaatacttggggtcatattcaatttgatgatctttgtccactcaactatttagagaagaaattatttgctagatttgaattgccatgcccttctgatgtgatttttcatattattggcaattatgatagtaaagaagaatataatgtgtatcgagtatatatttgtttgaatttgactatacctccttttcatgatgaaatgtattatctagaggaccccatgcatttaagtaattatctatctagttcctctagttgtttaaatgagttacaggttggtttgcaagaaggggagtgttgtggtttttcgactacaaagatttcaggatccaactacatggccatcaagaaatgtttctcaccggatgttgtgatacataaatataagttcaatacgctctatgacaaggtgaaaccgaggacggtttccaatcaagaaggagaggatgatgaggacacaactagctcggatataaccatgactaccttatgtattaatcaaccaaaggtgcatatgttctacattagatttacatgttatatatttgaacaaacgttgctacacaatgagtttcctgtgtttttgtttgcagaggtacttgctagggtgaaggaaaagagaccgagcgtaacgaattcatggatgatcaaagaagttgattggggaccatatcaagaccttctccatgtccatttccatctcatcatgtcacttttggtccatagaagacaagagataaagttctatacgttttggattcggattcgggcctcctgacagcatcaacttcaaacggacctagccgctgatctagaaagaatttcggggcccatgagtactttttggaaagcttatggagtctactttcatatggttttggtcccacgtcaaaattcctatcgagctgccgggaatctgcaaaacaagccatgtatctcatccagtccgaatctgactcgggttttgggccttgtaattgtgtcgtgggcttagcccaatgggatgtgcgccctagggcaaccctaggacgtccctaatcatattaattcagtagccgtcatcgtttagagttcggttttgcttagattattctgtcaagaacagtttcgccgctagatcggtttgtggaaccccaaatttgagtgcttaatcatccaaatgcaatttggttgcaatctatcttgttcttgcatgtgttcttcaatttgcatgcagggattagccttcttggcgaggtcaaccgggttttggcacggttgataactagacgagactaggtgctgcgattgcggggctcagtagcatgttcgttcagaagccgtatcgagttgtgtcgcgactccgcccaaatcgattgtttatcaatacctatcagaagatcgggacctacatccttcatcacaatacgaccacacagacgtactgggaatcccctggatgagtaactagctaaaacgtaggtgtccaaaggtatggtggagtatatggcaatcacctgcagtgggaatgtgttggagtccatacggtggggctcgggtagatgaggacctgtgcctggcgtgatgcttggtggagagattccacccaactgtgggagatgggatatttatggattggctagggaaaggcttccgtactgggcagtattggtgtcttgtgggaaaagcgtatagtctaacagaggtttaactgaactattcaaacagccgtgctcacggtcaagggtgaaaaaaaaggtggcactagaaaaaaatgaccaagcacagggagtcaatgcaggtgcttacccacagcgacggggcttatcagcagtgaaagaggctgccacaagattttgtcgacgagcaggaggaaaatggcatcgactggagctccaatgatgttggtgatgctagaaacgaaacgatgatgaagccggcttgatctcacagattggcagctcgtgctcgcgtcgatgatagtagcacttttgctggagcttcccgtggcaacagaagtcatcgtcaattgctttttgcgccggcgaagaatggtgacaaggaaactgtagtgctcaccagtggctgtggtgataaaggtggcagaggagtttttttaaaaaaaatcataaactctttactcaactcaaaagcatagtacatactggattgcaaagttgcatgattagcataacatctcttgttgtgacaggcaatatgggatatattttgacaattgtaaattggatttaggcattatgtgagatttggcttcttttgctaacttatctgttggatagtataggtagaggaatactgtgtaactggaccaattgtattgaacctcagggagccgatatatataagagtacatggggaggagataaggaaggattacagatatggaaggaacccacacaaatcaatcctaccataatatgactctaactaccatatactctaacatcctcccacagtccaagcgtgagcagcgtggacacttggactggagaaaaaaccttcaagagtactcaacacgatgatagccctctgtgtcgtagtcgatgtagccaaagcaaagggtgcgagggagccatggtcaatgaagccgtgcgtagagtagccgtggtcgatatagccgaagtcgggaagctgatgttgaggtagccgagccgtagggcgcgcatggggcgccgtagagtggtcgtggacgcacgggagggtgtcgtggaccaaggtaagcgaggacgcgctggagacgatgacagtgacgcgatcctggcagtcgttgaggtagatgacgccgaagagccaatgtagtcgaaccgtgaaggacgagacgtgacacagggtttgccagaccccgggacaactcgggacgaacgcgtgtgctggtgttgccaataccgcgcgggcgaggcaggggtccaccatgaatcatacaccaatgtcagaagagactagcaaagaagtcctacgggacgagaattgccggagtagcacgcagttgctggagaagagcgaagtgtagtcaaggaagatacagcgacgcttgcgatgagacgtgctggatgaagaagaaggcggagtagcgggaccaatggcttggacggcgatatcggtagccatgtagaggtagctggaccatagtctagagcggcgacagtggcagcttggaatcgcggcggcaatgctcgaagtagatgcagaagaacccgacggctgaagatgaccagtgcagacaacgaggttgtcgatgtgcgaacggcaaggaagacgacgagaggggcgacacatggtgcggctcaatgtcgatgcagtggcgagaactctaccggtagtgaggccatcctgaggagggtgtctgttagctttccaacaaccagtgtatgtggaccacgggcggcagcactgcagcccaagggggcgatgcgtgctcaatgacgatcggttgcagaagtcatcgtagctgggcagctgaacgggtgatcaagccgaagatgcgcggggctgaatgatgaagtcgaagcagagtcaataccgatgtcagagacgcgtagatgtcgatgaggcagtgggcgacgcaaaccgatctctgatcagaaaaaaaacagatacatgcagcagcagcagtagcaatccagaatcctccagtgccacataatagtagtagcatgacccggtcaatatgttgaatgactctgcacccatcttgtctctatctgctcacttgctagccacgtgcaagatcataacagagggagacaaacagattagagcgggcagcttgatgacagatcacggcaatcacgcgcaagtgctccacgcatagaggccgggtagtcggaagttccgacgatgagggccatgtacgagcacagagagggcagaagctagagaccgatgagtggcggcgtcctcaggagtcacaggctcgcagggggcagcgcgtccggggccgacggtggctgacgcggaggcttgtgcagcagcccccatgctccgccgccgaggacaccgatgctcagcaggccaggaaggacagggctgaccaggcgaacggaggtggtcgttgcggcatgcggcatggaggtacagccagtgatgacgaccccagatccgatctacgtggaggtagccgatggtttgctagctgctgatgtgtggagattatgggtaccccatacccacacggcatggttatctgactggttataggggataacttatatctatgagatatgtaacggatcatgacttgggtattacgtttccttgtatattatggaacggcctaaagttctggtttggtaatattgtaaagtagattttggaaaccaataccgtattggttaatgtttctatctggtaatcctactcccatcctatataaggtgggcaggaagccctatagggggcatgaacacacctggtcgtcaaatcaatactacacccggcggattcaaatccccaaacaggagtagggcagtacctctcattgagatggtctgaacctgtctaaatccttgtctccgcatccatccacttttagatctcatgcgctacccccttttattattgccgaattcatgtttcgactgttggcgcgccaggtagaggtgcgtcgaattacccatcaaaaagtgcgatggaatcaacctagatcaaccccaccaagttcgaagacttcaatctttgacatagaccagtttgccatttcaatacagtattattagatggatttgtaatctagattgatctgttgttcgatttttgtttgcatgcatgaactggtgtttgatgagctctgccggctacttccaatgacggcatcaggagggccatccagggacatgcacacgcatgcatcatgcaacacagagaccaatatctagtatatatgtatgcatggatcggaactaatcatttgatttactaatgattttgctggttgtttgcatgtactcctggacggagctggctaagtttttgaatcattcacgatccaagtcctgcttagagaccgggtcatgggctggccgcacccacgtcaggaaccatgcgacgtgttgatccgatcgacctgctgtgcatcattgatccatatatggaacatttattttttttcctactaacagattgatcaaactttgctgtttgtcttttatgcatgctggagcgatggttgttctcatgcacaagatggcaatagagatctatgttcgctgctgggcgatgggatttggctgtgctgccgttcctagcttcctcgcaatttttgtttgtgtttagattattccctaacatatatttaccttttctgattttttggttgcatatacgggtgtcagcatgtttttccctatcgccaccacgtctctatgagagcccatctgaccaaccagttcagagatagtcacgtttacatgaaaatatgcacgcttctttccacatacttgttatcactaaccaaattggtttgttgtgttgtcctgtatgcatgccgagttgcagattgctcgattatgtgtgcacagtacaaaaccaattgccaattttctccgtctctgagtcagtccagataaggagatcaatctcggcgagctcaacaattgaatttccgacttcgccattagtaacttattgttgtttattggattgatctctaaatatcagattaatctcttggtactttttgctatttacatgtaatgctgcggtgccaactggtcccttcctcatggttggcctgcgacgccgttactgatggcgacatcatcttcaccgatcggcatgccttcgccgccgccgactggtgtctccgccttcacggttggcctattatgccgccattgttgggcgtctacgacttcaccgccggcctgcctccgtcaccgccgactggtgtcctcacctatacggttggttggtcacaccaccgttcatgggcatccacgtcttcaccgaccggcttaccttcaccgccgccgattggtgtctctgcctacacggccggcctattatgccgccgtcgttgggcgtctacgacttcaccgccggtcttcctccgtcgccgccgactggtgtcctcgcctatacggttggttggtcacaccaccgttcttgagcgtccacgtcttcactgccggcttgccttcgccgccgccgactggtgtctccgcctacacggctggcctattatgccgccgttgttgggcgtctacgacttcatcgccggcttgcctccgtcaccgccgattggtgtcctcacctaaaccgttggttggtcacaccaccgttcatgggcgtccacatcttcaccgacttgcttgccttcgccgccgccgactggtgtccactcctccacggttagtgtgcgccgctgccgttaatgatggcgataatgtcttcaccgaccggccgcctcgttcgccgccaactggtgtttccgcctgcacggttggcctattacgccgccgttgttgggcgtctacgtcttcaccgctagcctgcctccgtcgccgccgactggtgtctccacctacacggctggcctattatgccgccgttgtaggacgtctatgacttcaccgacctgcttgccttcgccgccgccgactggtgcttccgcctccacggctggcctattatgccgctgttgttacgcgtctacgacttcaacgaccggcttgcctttgccgccgccgactggtgtctccgcctccacggttggcctattatgccgccgttgtggggcttctacgacctcaccactggcctgccttcgtcaccgccaattggtgtcttcgcttacacagttggttggtcacaccaccgttgataggcatttatttacctacaccgccggtagcctcagctgcttgcacggttggtgcttttattgccattgatggatgactttgttcctacatccgctacctctgctgtcatcaacgggaatactaaaagctaagtcatcatttattttattctttatatgatattttccttttactctgcctcactacatcaactggttcgccgttgactagtgagtcggggggctacagatgttatatcatatttttttcaacaattttcataatatttatcttgattgcttgcgatataatctgagtacaaaagtgcctatcaagttatggagttctatcttcctatgctttttgtttggtttgtcgatggatagatgcctttgggccgattcctaccacccgggggctcgttggatggaccgagtaacgcaaggtgctaagtattactcggaagaaacaaaagcatagagataagataatttattttctgctcttaacaattgcaaaagtacccgagtagtatactctgatccgtgaaactttgttccattaatgacgaactcatgtcactcgtatgcatgtttgggaagtgcctaggtcgactcccggtgcgcaggggctatgactagtcgggcagagtgtttgaatgtaaggagtcatccgctcggggacataaaattgacaaaagcagaaatacatatttataaacattttgaaatacttgaatttttctcaagtactgtatttacatcagatactactcatcctatatgttttgttctgcaggatccagatccagatatgcataaaaggaattcatagctttatgcttatctcctatgctccaggaatggatcagtcagaacatcaccaccggcttgccgtcgtcgccgccgactgttgtcttcgcctatatggttggttggtcacaccaccgttgttaggcgtctacgtcttcaccgccagcttgccttcgcccccgccgactggtgtctctgcctgcacggctagcctattataccgccgttgttaggcatctacgtcttcaccaccggcttgccttcgccgcagccgagtggtgtctccgcctgcacggctgcctattatgccgctgttgttgggcgtctacgtcttcatcgccggcttgcattcattgccgccgactggtgtctccgcctacacggctggcctattatgccgccgttgttgggtgtctatgtcttcactgccagcttgcatttgcttccgccgactggtgtctccgcctgcacggctgacctattatgctgccgttgttgggcgtctacgcttccaccgaccggacgccttgtctgccaccgactggtgttttcacctatacggttggttggtcacaccaccgttgttaggcgtctacgtcttcatcaccggccacctcgtcactgccgactggtgtttccacctacacggttggatggttaccccactgttattgggtgtctacttcttcaccgaccggcagcctcatcgcctctgactggtgtttccgcttacacggttggttggtcacaccaccgttattaggcatctacgtcttcaccgaccggccgcctcgtccgtccccgacccctcacctctatggctggtttatgcagctgccactactgatggatgtcatcgtcttcattgctggccgccttgtttgaccccgactggcttgttcacctccacggctacgcgtcatcatcatcgtcggtttaccttcgccgccgcccatggtgtcttcactttcacgtctggcctattttgccgtcgatccaggacgtcttcgttttcgtcatcattctacttcttccatcactgactggtgtttttatcttcacaactacgcgtcttcgctaccggtttgcttctgttgctgccgacttatcttcacgtcatcatggttgtgcaactttatcaccattatggggcgacttcatcttcattatcttcggcaccggcaaattctattgcctctacttcgcaagctatttcaccaaccacgacatctccaagggcctcgacatctcggcatgcaccaccagattcgacaccgtgctattctactacaacaagtggttctgcaattttcaagaattctactcggatatcttcaacacgtatcttcactcaagcaatggctactagacgacaagctacagttctcgactctatgttcagttatttctcaactaaccaaagagtcgggggctacacaaatacaagactcaaaattcgacagatgttatgtcaacatgaagcaatcaattaaccagccaatgagtcattatcttcgtcttcgcttccgagcaagctttctacttcatcaactccaattatttcaccggcaattttcgcttctccgtcgtcgccacggtctacttcaaatttctcaagtatcaagtttgaaatttaatttacatgtccggtagttcaaagttatcaaccaatcagctcaatttcgacgagttgaacaacagcatctactttcctccaagtggagcatctgcaacggctataacaacaagttctactgctattgtcataaatcaagaggcgttgcatcaatctcagttatgcacgcgctatcgtccagaaaactattcgagcttcgacatcttctcaacaatttgaaggattattgtcactgacatcatcactagcacctctacttcatcagccctgacatctccgtcgttgctaagggctgactacgtcttcgccttcggttgcttatgccatcaccgactttcattgccgacttgttctttcgacttcacggttggcctactacgcaactaataatgggagacctcatcgctatcattgactggatcaacgatatcatcatgatcaacatcctgccatgcctcatcggcttcgcgtctacgccgactgcatcacctttagcattaatcttcgacattggcatacatgaggatttacacgcctacaccaccatgaatgctgcttatatttcatcaactacgagctgttgtgggtcaatctcaatgtgtcctttatatggttgaaaacccgaccgacctcatacaaggagtgcgattacgactggcccggctgagtgttcacttggcacccatgctgtcatctgcacatcatctgtctcaatttactcacatcgcacgtaatgtgctgccttggcatcaggatagtcaagcattttctgcatgcaatgacaacctggccgaccaatcaaaaggagccatcctcctacaagcatatgaggttttatgcaaccaattaaaaacaagttgatcaagtcctagcatcgttcttgcatgttggcatgcattatagctgacacgtgtcagtgcttggattacataagcagactagatggaccagcatgagtactaatgctgtggttctattgacaatcgcctacttgggtctgataatcatgatggcaatcctattcataacttggaaaataccaaacagatatgcataagagaaatttatggccatgaccttatttcctatgctcaacgactggactatttattatttcccacgaggaccatcagctgagtatttgcgccagtcggaaccaaattttcatatctactttggtacaaccagcgagggataattactctgatcagaagccgctcatatgagctacacttgatctacatcacccgggatatttgtcactcgggagcatattcataggcgtgctatacacgtcatattttcagggtatcggttgacatattttaggcctaggcctaatatgtctacagcccatattttcaagtgtggcctgtcacgttcttttagggacttaggcagtttttgcataggcaaaagtgcgcgtgatcaagtacccaataccttaaaatccttttataccgctgttactcaactttttaggagttggtacaatgcattttaaaaggtgccaaacagtaaagctttatatagctgccttactgacttttttataagtcaggacgctgtttggatttataaagcaattgattggatacaatatcgttgctttttgccacgtaagtgtgcattcttattgaccaatattatggcttaggctgattatatattttggtcgttttccaggcggttggtaaatcctttatgagtttatttactcggattttacaccacatatgccatatatttctaagtgtggtgaaactatgtgtcttttagggacttaagcacatttgttaaagcagtgtgtgcatggtgtgtgcccaatacatgcttttttatagttgttttttgctatgtaaattttcaaagatgtagacaactttaggttgctcgcatcatattttacaaagcagtcggtatatcactcggatcatgttattcggggattcacaccgcatatgctatatattaatatcaagtcacttggttgactataattatcgaaaaccactcagttggttggattatttattccttgactatatgcttgctttgttcaactagccatatagtcgggggctacacctattaggttaatctagtcgatgtacctaagtttacatttaattattttttagccctccatagtcttttgatttggtaaatgtactcgggagaccatggcaaagatgattgaagcacacggctttggagtaatctggttcgagagaagattatcttttcgactgtgaaggtctcagggctactgtggagattatgggtaccccatacccacacggtatggttatctgactggttataggggataacttatatctatgaaatatgtaacggatcatgacttgggtattacgtttcctatccagaatcctccagtgccacgtaacagtagtagcataacccggtcaagatgctgaatgactctgcacccatcttgtctctatctgctcacttgctagccatgtgcaagatcataacagagggagacaaacagattagagcgggcagcttgatgacagatcacggcaagtgctccacgcatagaggccgggtagtcaggagttccggcgatgagggccatgtacgagcgtagagagggcagaagctagagaccgacgagtggcggcgtcctcaggagtcgcaggctcgcagggggcagcgcgtccggggccgacggtggctgacgcggaggcttgtgcagcagcccccatgctctgccgccgaggatgccgatgctcagcaggccaggaacaacagggccgaccgggcgaacggaggtagtcgtggtggcatgcagcatggaggtacagccagtgatgacgaccccacatccgatctgcgtgaaggtagccgatggtttgctagctgctgatgcttgactcgaatgacgacgaacacaccgcgcagcagcccggagattgcactacttgaggatgcaggctacgaagactcgacgaataggaaagaaaaaaaaaacggtagccgtccccgagagatcagaaccctcccgggggcgatggcagcggaagcgatcagcggcggccctaggtcgcccactctgataagatgttgggtagtatacggataggaatactgtgtaacgtggatcaattgtattgaggctcagggggccagtatatttaggagtacatggggagtagataaggaaggagtacagatatggaagaagtccacacaaatcaatcttatcaaaatatgactctaactaccatgtactctaacattatcagctaatttgttcagctcccttaggatccaattggctccaaattagccttaagctccaatgcctttcttcttgaaagtttcgcgatgatggcactatctgtaagaaagtgaactccctgtaagtccaataatctggcagtctacatcgccagttcaaatgctagaagctcccccagcaaaggtgattgagccattgtggttgtagctctaataaaaatggcattatgagaggaaaggtgtgtgaaagaaaacgccaattcctgttttattatcactccaggcagtgttagcatctaattccattaggcaaattcactattcttgtgtttgtatcttcctcataaagatcctcctgcatcaaatcatttgaaaggaagtttgtataagttttaatcattgcttatgcttccatgcaaacttgagttggctccttgacatttccctgaaacataagatcatttctagctttccaaagctgccacatgatatccaaagtgttagaatatgtgtcgaatatactagtcctatttggttacagttggacttagagttataataggtgttaggggctggagttagagtcggactctgcaacctgacaactctcttaaatagagaggggggcaccacaatgtaaccatggcgactacaatgtctcgtagatacgcagggagatgatgacggcgtggccatagactcgtagcggctaagagctatattgattggggaggagcgcccataattagagccccggggatgtaggcttcggctgaacctcgttaacaaatatcgtgtgttcctgtgtcgtcatctggcgtgtcttcggtgatcaatgactgaagtgatcgggaaggttactcgtcgttccgctatatcgactagcttttataataagtggtatcagagcggaaggtttcagcattggatcaagaagacatgtagaggaggaaacacgaggtgaggatcgtgcatcgacaggagatcgtcagtcgtggcgatgagatcgttggcgacaacgaggatgttgtgggggcaacgacgtcgctcgcgatcagaccggcgatagcggaacgtgaacggaagacgaggccgggcgtggccgaaggcgaccggagagatcgaaggggtagcgccatggacggcgcacccgacgcacgcagcgaacgcggatccgcggcggcaggtatgccagtgacggaagggcgaagccggcgagcgtggcgcggcccagcagacgtgcagggctaggacgacgaggtcgtggacggtgaacacgagggctgcgactatggtgcgtgcggaggcacggacggatagcactggaggttgctatggatcggacgtccgatctgtagcaaatcgtcggacggtgttgcactgtattattgaagaatgaatgtttcactcctcggtaaaaattgtttcaatgaaaatgtttcagatgtttcactatcagataaaaatatttcaacccttaagcaaaattgtttcaatcaaatacaatattcaaacaatactaattgcaacaccaagaaatcaattcatgcaacatcaagtcaaaacgaaatgaaacaccttagtaaaataaagtgcaacaaaaaaaataaataagctgcaacatcactaaaaattcctaaaaaaaaacatacatctatcttcttctattccggccaccggaaacaagtgaccggcatgggagagacaaataaggtgacggtgttagacgcggacgagggcaaatacaacattcaaacacataccaatggcaaacacgaagaatcaatacatgcaacattgaatcaaaatagaatgaaacaccatgatgcaataaagtgcaacagaaaaaacaataggatgcaacctcgctaaaaaactgtgacaaaattaaccgacctctatcttcttctactccggccaccacaaccaccaacacggcagagggaggtgaaagcgcgaggtgggcggactccggccagggcctgggccaaccacatcagatccaacacctcctccccatcccacgtcgccgtcgccgccgccgccgccgccggcgaggtccactgcctccaccctatcccacgtcagcctatgcccctaccatgccgcctctgccactgccgagtggctgtcgtcgagatccagcgcctcctcccaaccacgcgccgccatgcccggccgccgatgccgcgtgtggccgccggcgacgcgtcgccttttctcgcgactcccctggcgtccatgccccgactcttactccgtcgctcatcttcctgccgtctcatagtattttcatttgataaaaatggcgcagtgttggtagttgaagcagagagaaaaaggagaatacgagaaggctagaggagagatgagttattagctggatggataagtctggatggatggatgccgatatgtttcagcgttgactgtttctgcgcggtaggatggaagcgtccgatatttttcgttccgtcggacggcagatgcaaagcattttcggatggcactgggtgctgttctatgcgcacatatatgcacgagaaaccaacgcacagatgcctaatgcatgcaggtggcaaatacatgtacatgggctcgtgaaaagggcatggatgtcacgtgaaatcaatgcattcacactttgtgtgttgctctgattggaaacatcaacatgcaaagggcaggtggcggtacatggaggtctggtgcatgtaaaagaggtcgactcggagacgcaggagttgcaccgtggaaccaagttgcagtaggatggaaattggagatcaacattgggtctgactcggaagaaaattggataggttggatgatttcctgtccgactcgtctagcaaggatctttgagactttcacaagttgaagactgacaagtaccatcaccagcaaagagggtgcacggaggcagcaggcggtctcgcacgtcgacgggcagttcggtggtaggagttcgtgcatgaaaagtgtgtggttttcgatccgacgaggatggccgtacggtcggaccggaaatggctggttagacctaggggcaaagccagtcggattgaggtgaacgtcatatctggcgaagaaatgatatatctaggactcgatgaggtgttgagatatatggagtgaggctagaactgaagaaaatcccgggcaacagcgagtcaaatatcgttgatggggtcaacgatactgtttagcagtacaggatatatccaagatatgcagatcgacatgatgggaatatatgaaaatctgcgtcactgaagaggaatttcttcgggtgattcaagacaacggtgaattttctcaaattattaggaatttagtctacggatacgaaaagcgtgaatgttggatttgttagctcagttcataagatgacaaggaagaaagggttctcttcgtgtctaatgagtttgatttatctatttggtgatgacatcggttatctggccatggattagatcaagtcaaattttaagacggaaggtggatgtgaacatggtattcggggagtctattatgtgatagttaggaagaaattcaattcgcttggcaagacgactatggtgatatgagagaaggtggagtactgttgcaggtggaatcaagtggaagaaattacagggatagcggagtctcttgaaagcggtgtgtctggcgcagactcatcgagcggctcctggtgaagctgcaaaagaaaacaacccaagtctggaggacaggtagatcagcatggtgattctacgacttctgggtggcgtatattcgccaaggtggagtttgttagaatatgtgtcgaatatactagtcctatttggttacagttggacttggagttataataggtgttaggagctggagttagagtcggactctgcaacctagcatctctgttaaatagagaggggagcaccacaatgtaactatggcgactacaatgtagcgcagacacgcagggagatgatggcggcgtggccatattctcgtagcggctaggagctatatttattggggaggagcgcctataatcagagccccggggatgtaggtttcggctgaacctcattaacaaatatcgtgtgttcctgtgtcgtcatctggcatatcttgggtgatcaatgactgaagcgatcgggaaggttagtcgtcgttccgctatatcgactaacttttataacacaaagttcgaattaaggtggaattggaagagccattgttaatgatgtaagcaataagaagagccataggaacattaggtggaaaaatatcagtattgagctttgcttctgagattatccaagttaatttactaatataaaaagaaaaaaggaggtggaaatctgtttctatttgacaacatcagcagcaggctgctgaaatgttttgaatcctctgatttagcctttgggaagaaggaaagggcgtccatgttgagtctccaagcaaaagttttaactttgggagggacgtacctgttcttccagatttgtttcaagatagaaagtgattgagagttaacctaatgagcatttgaattttcttttttgtaaacctccttataagcactctttgtactgcagataccattgtttgtgaatttccaacatagtttatcttctgttacctgctgaatcatttgaacctgcaaaatctatctatctttatatactaaaagtccattaaactttctaaaaatgctctcaagccgccacgtggcttcctccaaacgctcttaaattgacaagtggcaatctaataaaccggtggacccactatttttaatatattagatttaatttacctttaaaaaaaagagactccacgattctcctcattttcctgttccacaccggcccacctaattaaatatgtactctcttcctctacttctccggatatattggaccaaatgaatatatttccaaacaaaacaaaagcacacgacgtatcctcctgccgcacatacacacatgtgcgtttctcctctctgtctctgtgtagtgtaggtacttcccccggccctctctggaatgtactagctaacaacctcatactgtcatacataaacttaagtagtgctcataatttttacgaagtaatacgataactccacaacgatgtgccgacaaatcaaaacattaaatagctaggctttcaacatgcgtgctgcttgctttaggctgtgttcgggaagaggggttgggaacccctcctctccggcacataaaacgatgtgtgcattagcgcatgattaattaactattagtttttttaaaaaaatagactaatatgatattttaaagtaactttcgtatagaaaatttttataaaaaaaagcacaccgtttattatatagtttgaaaagtgtgaacacggaaaacaagagataagttaggattgtgaggtaaagaactcagcctaatttggttatccaaataggctaacctgtaatcaactagggattaatgcaattagcattaggtcttcaacaaatgcgggtgtgcactattttcttttactcgctaaacaacaagcatcctaaataatcaacaattttgcggacccattaaaattagatcgatggtgtctttaaaaaactatagattcaaccatggtaaataataatttttaggtactagacttctacactttgtatgtttttttaattaccatttaaaaaaatctatagtaaaagtccattaacctacaaaggcacctatactatcacgttatatacctataaacactcctaaattaccacgtggtattatagtaaatcggtggacctctattttcaactattggattttatttttttgaataacaaaaactacaacccacattcctctcctctcttccatcggcccaactctcctctcaccactggcccacccttctcaccaccccacgcacatacgtacgtacacctcctctgtctccaataattaatcctttctctcaccttcatatttcctaactaacaattttaattctaaaagttattataaagaagaaatattaaaccaacaattttcaattaaattggtgacctgtaatttaacaattggattgtcacatatagataattaaaaccgatgaactcattaaatctacctctataaaaatcaaaatctcctcactcaataacaataaaacattaaaaaaactgaaattctatattacgtagtcttagaatcgttttacataataaaaatcaacttagcgtgctctataacgctattaagtcataatgtatcacattttaaaagttagataaaatataattcaacgaaaaaataaaacatctatctgtcggttttcacttaaatcaatgacccattatttttaactattagatcttctttctctataaaaaaaatcttaatccaccacatatatatcatctgttaaagatttttagaatgagaaaacaacaaattctcacctacattatttagaaacattagaaaaacaatgtcccctccacctccctctccaaccatatgtgcacaacactattacactgccaacccatctctagctcgagttctatgttattcgttcctctccaatctcctctctattttcagctactaaaataaagagataaacaaatattgaaaataccataattttaaactacgcatataagtttctaatataattgttgctttatttataattaaagcacaattcaagatccatgtgcctatattttgttatataaaaatatgacatttgggcacattccaccgtgcactttgcaggttatccaaatagtgatggaatataaaaaacattatcgacatatatttcgtaattatacatcaatcttttttaatgatgcacaacatcccttcctttttacattttattcaaatttccattaaaaactatgaaataactcaacaacataagttgcaccatcatatattattttgcaaccctacatgactaaattagacattcagttcgcaaaaaatagcccaaacacgaatatttcaagcgagtacatagaaaacagttcatagggataatcatccaaattgccataaaagaataaaaaaaatcaaaaaacactgattgtatgtgcattgttttttcaaatagagttaaactagatatacatatataagaaatataactatctcaaatctaattgtctaaaaattggtgcttttacttagataaaagaatccgattaattcatgatactttttgcaattaatatgctcaaataatccaaacaagccaaccgatcttctgccaaagtgtcctaaactttatttaagtcgattagatgattgcttttttttatataaaggcgccatatattaccccgcacttactcctaggccttttaaaccgatgaacacattattttcatccgttagatctatctcatcttaaaaaacaagtgtgtattcatgatgcatcacattcaaaaaaatatatatagcgcaactatatttcttcatccaactgtattcactctaggttgcctggagcctcccacatactctacacataacattcgcatatggattgtctcttaaactatataattatattagactatataaacacgtgcatttagggaagcctcatatcagaccaattcacccgtcgataaacaatgataacctatattcaattaaaaaacgccttacttttgacatgacactttatttgatatacatgtttctaacataaaataagtctaccttctttttagatgatgaagaagattaattataaataattatttgtagggattaattaaatattatttgctataaagctaactaatagctaggttagaaaattataaaagcaatgctgatggaaacaatttatggagaaattgtatatagcatatgttcaaattaacatagcctacgacacatatccgcgcgaatgcgcgggctacctttctagttttgttaacagcatgaccattaaaaatggagttgagcttgtggatgtcccagcttttatcgcggcatagattcgtaattcagtgaaaagagagaatgaggagagtactactgacgcttttcataggggaggacagggagctgagcagcgaggagttggaggagcagtagtgataggaaaaacggatcaaactcatcaaagtgattcaatttttgcattggagatcaagaaagagattagctagtagattagaagtggcgatctggccttcactgaagcagagttgtgcgaacagactgtcattgctgagggaggaggaggagggagattgagaggtaactgggagttggaaaaacggatacaagctacaactcttgacggagacttaatttttgttgtttgtggcaaaaattgatggggaatatgaagggatcagtgagaatagatggaagggacttcatggccttcccttcatggcgatttgtggcaaaaaaacagatgaagaaagcgcggtggttcaagttatgacgatgccgcacgcgcggaggactgaaaattggttgcagggtggtatcggcccaagctaggctggtgcacatactccgtccgtcccataaaaaatcaacttagtataggatgtgacacattttagtgctatgaatatgaatatatctttttacagatttattgtagtagactatgtcatattcatattcagtattagattcattttttttcggaacagatagagtatatgtgtggtgtgaggacatgggctgtgttactttgactgatgcaccctgagaaaggacagatggagagagagagagagaagagatcaggaggaggcaacaagaggaatccggaaggaaaagaaaaaaaaaacaaaggaagagaggaaataggaaaagataaaggaagaaaagaaaaggataggattttttttgggaaactttctggatttgggatttgtaggatttggcagaattcatgaatttgagctctacttccaaatctcaaataaaaaccaaataactccaattaacaaacgataaaaaaaaataaatggatggcataattgatttatttagtcaatttaaactttgtttgatttatgaacttttcattaacctatttgagacgaataaatccgaatgtaaattttcgaaattaggcaaattcaaaaacacaaaaaacaggacatgataatttttcttgtcatataaaaacaatcgtgttcgaatgaacgaatagttaaaccgatcaccttaagaaagatattaataataaaaagaagagatttggtaaaccgttttggacctccttgtgcgacccacaccatgctctatctttagcacggcacgtctgcattccttttttttccaccgtctctggaaatctacattgattttctttctcctggatagtgtcttattaaatttcacaatgaagttcctccatttctcctcgtaccaccaaattatttactattactaccatatatatcgttacatccatgtaaatataaacacgactcatttcatttcaagtttagatcacagccataccattccccgtgtcacccttcctctgctcttgggccacaaccctctggtcattcctatatacatacctcctcgcgaagaacacgtagatcaccagcgccaccacctcgatgatgcagaggacgacatagaaccggtcgagcttgcccttgttcaaattggccccatccagccaccctccgccgttggttcgctgggtgacacggttcgtgacctggatgagaaggctgccgagccatgctgatacaccgaggatacagtagaagatggagctgccgatggacttcatccccatggacgcctcgctgcagaagaactcgaggagcccgacgaaggaggtgacgtcgacaatgccaatgaggaagaactgcggcgtcagccagaacacggacagcgggatcccagtggtggcgtcctctagcccgctctcctcggcggtcatcttcctcctcgtctccaccaccgcggcgattgcggtggcaacgatagtagcgacgaacccgatgccgatccgctggaggtgggtgactccaccgacgtagcccgtgagcctgcgcagcggcggcacgatggcgcggtcgtagatgatgaggatgaccatctggaagacggtcgggatgaggaacagcgtcgccggcgagatgtggactgcgccgagcctggtgtccatggtgttgccctgctgcacggtgaggctgaggagcagcggcaccgggatgtagctgagaacagcggccacgaagatgggcgccatgcgcagcacgatcttggtctcctccacctgggtcacgctgcacagagaccatggcccagcgtcattgccagtttccactgccgctttctccaagcacctgcaagccaatgaaaatcttgatgctacttattaagttgaatggacaaacttatttaacctataaacttcaactgttgagagaaagaatgcaatttacttataatccaacgctatcgacacaaaaagtctgtttcatgccttgtaaatggaatattatagaagtgggttgccatattttatttaattgaatgtctatcatgttttcatcctgagacatctggctttgtgccattatgtcgatatagaagatacatttaccatttgaacccgaaatcttaatctggtgagagaagatgcaccatcataattatacacctctgcaccaacattaccgacagacaaagtctaaatcttgccaatgttcagagtttggacaacataccgaaatccatctgttttggggagaacttcgtgggcattggcatcgtcatcttggttaatttgcttcaattcgctgggattctccggcaaccggacgtttcttttcttgaatgccgctacaaaaacctgagatacatagctttattatagtgtcatggacacagctccaatcgaaaaagaattaaaccaaaagaacagttttgctattcgtcatccgctttaaactattttatttatgggttcttcttaacttacacatatattttgtttgaaacaaactaaacttacaaaaatatagcttcaatttacactgcaatctattttttggggggaatacacagaagacttcaacatgtttgtattaacattggggaatttgcagtgcaatcttagacgaaatttagctctgcctatacaattttagcaaaattttgtagccttaatcaaggaccctgtttgtcagtctcgtatcatctaaacatccacaaatataacttcacacaaccttcaatacaaattacacaaaacatttaattactgcaacattcagaaatctcaaaagaggttatatcaaacacaaccatcgataattcgatttcatatacacacctgcaatactcttgtgatggggctccccatcggcagctggttccggtagagcgggaaggcggcggcccagacgagcaagccgagcgcgacgaaggcggcggagacggcgaagccgacgccccaccccttgctgttctgcacccacacgatgaagacgaggccgacgaagccgccggtggagacggcgaaggtgtaccagttgtagaagctcgtctcctgccgctgctcgtccgggtcgcccaggtcgaactggtccccgcccagcgccggcaggcacgccctcgccgcgccgtcgccgatcgggatcaggtacagccccagcagcagcaggctcaggttcgcgccgcgcaccggctcgcaggtggtggtggcgctcgccgccgtggccgccgggctgcacggcggcgggtgcagcgaggtggtgtacgcttgaactgctagaaggatgtagccctgccatggagtaaccatgcatccatttgtcagaactgataagcttgtttggatggttattttcttattcatgatcttgtgctaaacaaatttgtcctttgttttaattttgagaaattttacaattcttaagaagtcaaatactaaaatttcacattacgaattttgatacctttagagatatagtatgtgaagatttcaagttttacacttaaaactatggtatctcctgatactttagtaagaaatgataaatttaccctgtgaagatatttaccggttggaaggcagaattaatacttataatttaaatttcaaatactaggttttctgctggtctaaaatttaattttcaatttgaatttggtttccgaaattgggtaatcctgtcatcaaccaattttagcactgccagctagtgcagtttctattagaaaaccgcatcaatactgattacggacctgcagtattaggccttactttcaattctatataaccaattttgccctgttaatttatttcccaggggattcaagagaattttgagaataattcctcaattccctcctaagaattagctgaaaaagctcttatggtttggtttagataataagaaatcataggtgaaattgggacgtggaaatgaataaagtattaggataagaaaatgtgagagaaaatggatatctagtatttaaagttactccttaataggttgaaattcatttctctttcccattatccaaacatactcttagatttttttagtcgtcgaaagttactccttaataggttgaaattcatttctcttttctacttaacttgatgtcgcttatcaatcaattatttggttgtggacatccttttcctaattaaaaatctggccattaatcagcactcggcagtctgattgccaatcacatcggtataatcatacctattgtagttgagagagcagttccaaagttgacagcttctagaaaggttgtcgaagaaaagatcgagtaggtgctatgtagtaagaaaaagtgactaatggcgagttagtaaataatataaaatatattatatgtcgtttcttggatgataatgctccaataatcatgtgagatcatgataacatgtgtttattaaaacccttaggtctttttattttgagagcgctattcctcaagtatttcactattactcacaccctaccaacttcatctgcaccatatcacaaaaaaaaaaatcgtttcgtcccaataatgctcaactctgtctcccatccccccccccaaaaaaaaaaaaaatctgtctcccatgataggctgcatgactgcatctttcgttgcctaatgcctatcatcattatctatgccccatatacatatatggtgatgtgtttccttctcctaccatgcataaaaccacagtgggtggtctgttgttggggacacctagcttctttgttactctctttagataaatcgaatgcctgcagtctaattaattattcaattttgaaatttggggtaaaacctgttactatcggattgaaatagagcacataagtgagagaacgtcaggcgataccctatagcatttagatttgaaaatgagttgaaatttacatcatggtgctatatgtcaccatggaaaattttatttaaaaatcgattatgcatcaaggaaattaaaggaaaagataagtttatgctttgcagactgacagaacagtaagttcactgtccatggaattttgcattttgtcaggggccgatccactgccctgttgttgtgttgaacagcttcaattttgcacatattttctgccaacatttacatgtatttttccgctacctccagagctgcaatgtcgttctaggctatcaacgtggtgggttgcttagttgcttgcttatatctgttggaattaatgaatgggccttagcccactcgaagattaattctttggaaaatcacaaaagcccacctcatgggatggcatgcatgtggagtttagtaccaccttgcttattctaggagagggggacctccttaaaagggaggatgtcctcctagccacttgaagcatgtgtggtggagagaagaggggaaacacacgcgcgcgctcgctcgcctcgcctggcagatcgctcgcctcgcctggcagggcagatcagggtcactctgtggctgacagctatgaaatgcttctggcaaacctgagaggaacatggcatcatacatgagaggacgcctccctattctcccgagtctaatgggattgctgaaaggaagaaccgcacactgactgacttggtgaatgccatgttggacaccgcgggactgcctaaggcatggtggggggaggcattgttgacctcaaatcatgtgttaaacagagttcctaacagaaataaggacaaaacaccatatgagatatggattggtagaaaaccatcactttcttatttgcgcacatgggggtgcttggcgaaagtcaatgtaccaataacgaagaagcgcaaacttggacctaagactgtggactgtgtttttctgggatatgctcatcatagcattgcctatagatttttaatagttaaatccgaggtaccggacatgcatgttggtacaattatggagtctcgtgatgctaccttctttgagagctttttcccaatgaaggatacacatagtggttcgaaccaaccctctgaaataattcccagttcaatcacaccaccagaacaaactgaacatacacatgaacttgtctctgaggaggatgtcagtgaagctcctcgaaggagtaagagacaaaggacggctaagtcttttggtgatgatttcactgtgtacctcgtggatgacactcctaagtcaatttcagaagcatatgcatctcctgatgcagactactggaaggaggctgtccgtagtgaaatggattccattatcgctaacgggacttgggaggtgacagagcgaccctatggttgtaaacctgtggggtgcaagtgggtgttcaagaagaagcttaggcctgacggtactattgaaaaatacaaggctcggcttgttgctaagggctatactcagaaagaaggcgaagatttctttgacacttactcacctgttgctagattgaccacaattcgtgtgctactttccctagcagcctcacatggtcttctcgttcatcaaatggacgttaagacagcttttcttaatggagagctggatgaggagatctatatggatcaacctgatgggtttgtacttgaaggtcaagaaggcaaagtgtgcaaattgttgaagtctttgtatggtctgaaacaagctcctaagcaatggcatgagaaatttgacaaaacattgacatctgcaggctttgcagtcaatgaggcagataaatgtgtgtactatcgccatggtgggggtgagggagttattttgtgcttgtatgttgacgacatactgatatttgggacaaacattgaggtgataaatgaggttaaatcattcttgtctcaaaattttgatatgaaagatttgggagtagctgatgttattttaaacattaagctaattagaggtgagaatgggattacactcttgcagtctcattatgtggagaagatcttgaatcgctttggctacattgatagtaagccttctccaacaccttatgatcctagcttgtcgcttcgcaagaacaagagaattgctaggaatcaactggaatactcccaaatcattggctcgttgatgtacctggctagtgcaactaggcctgatatctcctttgctgtgagcaagttgagccgatttacctctaatccgggagatgatcactggcgtgcgcttgagcgagtaatgcgctatctgaaaggtactgtggaattggggcttcactatactgggtatcctgcggtactggagggttatagtgattctaactggatctctgatgtggatgagatcaaagccactagtggatatgttttcacactgggtggtggtgctgtttcatggaggtcttgcaaacagacaattttgacgaggtcaaccatggaagcagagctaacggcactggatactgctactgttgaggcagaatggttgcgtgatctattaatggatctgcctgttgttgaaaaaccggtgccggctatccttatgaactgtgacaatcaaacggtaattgtcaaagtgaataattctaaggataatatgaaatcgtctagacatgtgaaaagacgattgaagtctgtcaggaaattaagaaactccggagttataacgttggattacatccaaacagcgagaaacctggcagatcccttcacgaagggactatcacgaaatgtgatagacaatgcatcgaaggagatgggtttgagacccatgtgagttatactatggtggtaacccagtctatgtgatcggagatcccgtgaattagatcctgggaagaacaaaccattaataaactagaggagagtaccaatatatataccctctctaagtgaagatgcatatactctcgtgagctgcaaggcaggttggctatgccttaatgagttctgttggctttaattagcaaagatgttgtcctgcagagcattcttgaaggaactcacctttgtgagcttgactgttggtcgcagtccatgaagattttgggtgaatcttctaggaagcttactaaagacctaggagtatgacttatacgctccacccgaggggtagtctacagacggtctagtaccagataagactttgagtgaaacttgcttgcacaagacttgcaattcaaggcgtagtccattgttcaagttgtgagtaagtgtagcttggagttctaggtggatgttcaaccttaattggtctccatcgaaccgctggtatataaacagtacattggaaaaggcaaatctcagtgggattttgagatttggtgggggattgttggaattaatgaatgggtcttagcccactcgaagattaattctttggaaaatcacaaaagcccacctcatgggatggcatgcatgtggagtttagtaccaccttgcttattctaggagagggggacctccttaaaagggaggatgccctcctagccacttgaagcatgtgtggtggagagaagaggggaaacacacgcgcgcgctcgctcgcctggcctggcctggcctggcctgggcagggcagggcaggcggcgcgcgtgcacgacgtacgcgtcgaatggtctcgaatcgaaaaattggctcctcacccttgcgcagatgcagcctctttttgcagttttgtcttgctgcaaattcggattcgtttttgttttggaaacgttccgaaaaatccgatgcgtgcaaacggcgtggagtccggataagttacgcgcgacttatccggttcggttacgcgcagtagagatcgtgcgggcgccctgatcaagcgacctttctctatataaaccgacccgccgtcttcacgcaatatatacgaaaatcaatctagggtttgcctcctactctgtactgcgccgtcgctcgtagactactccatcccgctcgccggcgtgcaccagcgatcgggagagcaggtctccggaacctctgcctttgacgtcctgcaccgggagaaggcggcaataaggtttttgggaagcgcttcgcgcgactgctccctgttcgttcgcgacggctcgccttcctcttcgctcgcgtgtttcgtgccttcgtagacacctgcgaaaagtttcgaccaagcagccggtcttttcgtcacctcggtacgtgttcaatatgttgcgcatatttgatctgttcatgtttttctgcgtagtttacatgtgtagatctaatgatgcgttcatgctagttttcatctgtaatgtcatgacttatttatggaataaattaaatcattatatgcccataatctcaacaaaaacatgctaagattattcgatgtttacagtagcagtatagtcgccgaagcaaatacagatcaaatgcttcgaacaatcacttgatgggctgactcggtgagcatcccgctccaccatagtagaactgcaagccatcgtccgtggtgtaaggacgcccaacatcgtagcagtttggctcagttgcaaccgtgttgattgttttgagagcaggagttgcaaagcttcccgacgcgtcgatcaccttcgcatcggcgaagaaagcggcctttgtctctccttcatcagcaggctggccactgcccatgggaggaaaaggttcccctggagcagcttctactacacccatccaactgatcacgtctgcagcttcagacatgtgagtcaagagctttgatggccagtaccccactatttcttctccaactttcagcacccagtctcccatgaactattcattccagagaaaaaaaatcagatatacaaagtgtcccagttaaataatgcaaggttattggcacagtaaaggattatttaccttaataatcttaactctaatgatgtattgttttccattgacagtggaaactggcctgattattattccagggattgcctttttgctcatctgaacaaaccccgcacaacgaaggttgatacatgacttatcattatcaacctgttgcatgtaaagcaggaaacagttatttctcatgtttcctcctttggttaatacaaattgacagatggcatttttggcacacattcttacccacgcgatctcgaaatgaacaagattgtctccgtacagatgtggatcaacctgcgatcgaagcaccataggtttttacattagtatttgactgcaaagtatgtcaaaatgttcaacatttcatatgtactattgagggttagtacaagtttattgtttcaataaatgtaccatttctgatatgacaaaaagtcttcttctgatgtaaatagatttaactgtcaaaatgagattctttgagattattaagaacttacagaccatcctacagctacacgacttcctccattttttagaacaacaattgccccactaaaccttggtggacgtcctgtaccaagatctgtttcccatattgaaattgatgtttgtagtccgtaaaaagtagatggcactataacaactgcagccatctagaacaaaacagagaaggggagtcaatattaatgtacgattaataaaaacaattctaagcataggaaagaaaacatgggagataatgcaactacagaactataattcttacttgtctatttcctttgtcatttctgttctcactgtatataatcttatcgaatgatcttgtactcatggatccattgtagcttgttaggattggcaccgtccctgggggacactcaatttcgctcatctcaacattagagatgccaaatttagatccttcatcatcatcggtactgtgaggaaaggaaattggtggcatctgcattaagagtaagattcaagatgtatctaataaaaagttattgatgtttcttgggaaaaccatgcatgactaatatgaaatataagaaaataataacctaccaactgagtggtatgattcatcagcaaaggatgcctcaaggatggttgcgatttgaaactaacacaggcaaaggtttgcccatctgcggtctgaaattcgagcaacacaacagctttggatcagaacagatactgtaatcgtgcgttgttaaaatgcaatgtatacctgaatcgtcttgatgattaaattgttgtcaacctcttcttttgtcggatctacactgaatattagcaaatgaagtagaagaaatgtttttatggtccatcctttgtatcccatggtcagagactttgcatagatatgtatggtaaaatctatgcgaaataatgtacttatatcaatatgaataagcacataaatctaaatcttaaccaccatatttattgctttcataaatatacatctaaaccaacatatttattgctagcatcataatagcaaatgaatcgtcttcctttatttagcatttatatcttctttagtattttccattttcacttgtagacagaaatgcactagtttcaggggatgcacatttatgttgtcagactttcataaatggtgctgactgatttcaccaataaactataaactgaaacaaatgtttggattgccttccgcatttttgaaaatcaattgattgaacctatctttcttctttgtgtaactattaaaatatatatcttaggatggcgtagacaagcatggacatttagctattggacgcctagcacaaggattgaattcagcaaggtccttaaatgaactttaagggattcttacaacaatgaaaattctagacaaatacgtaaaattttgtgcatcattccattttgtgaagtagctgtttacacccaaatttagcacctagagtcgaaatagggaaatatttccaaaatttggaatgcgtcgggtttccttcatggggtcggtctaactaccgcctatgggcgggtctgaccgacatgtagcgctagtctgaccgccagcatgtggttggtcagaccggcagagtccgattctgtcaggtctcgggtttccttgcttcggaaggtattttttgagtttcaattagtttctacccagagttagacatggaggagaacttatagaaggcaataccaacccctttataagggctaaggctggttcgattctagcccccaatatctcaatccctacacaattgaatcattcttttccctttactttttagccatgtcttttacgttaccctagtttcatccatatttgtcgatttgcgttgtaaaacgtccacctttgccgtgagagtgcgatcatccctttgtaggtttgccctgtaaaccttccgttcaaccacgagatgggtggttatattcaaatcgatctaaattgtcctcgtggctagttttgatctctaaatcagctccagtagccggttcaatcttcaaaacccatattgatttagagttatctagatcgaggtggttggtgactccattaacaccgccaaccttttaggtgagtctcgtgttgggatcgaaaaagacgccaatagcagccttggatgcaaatctttaatacatataaatggcaaattgtcctaagtttctcaaaaaaaaaaataagacttcatatgcagacctgaactaaatttaaaataatagatgtgtttgaaaatcgaagtaatgttgttttgttgtcaatgtggccttttcgtgtggtcagtgatgtatgagagagctttctcaacctaaatccatcgttgtccgatctgttggatttgtagttaaagctaacatgtatgaaatattctatccctcttggctcaagctatagaggcaatgttgagccgggagggatcacacttttttttgctagtgtacctttctttaaatgtttaacaaaagggacaagccttgccgctaatcagctgtgaaggcctgccttgctagcccacaacccagtgctggcgaacagcgatcactactacaaaatcggtttttcatggcggaaccatatttttttcgctgacggccctgtgcataatccgcctgcgaaattgaaacgatgagtgaggggataaaaaccgccagcgaaaatagattttctctgacggttgagttatgtagcatgctagtgaagatatatatagctattttcgctggtggctcacttaaccaaccgccagcgaaaatcgattctcgctggcgatagctaaagaggtccgcttgcataatattatcaccaaatataaattgaccacgtggctcaccacctagtgccacccaccccttcctctctctctctccaccaccaccacccaggctggcagtaccctctctttcctcctcctctcccctctcatccctctcctcttggcgcggcaatgacggcgaggaggggaggagaccgcctgcagcacggcaacagtagaggggagagtgtatgtggctctcccaatccactcccctcccagatctggttaaatatacgggagctcgagaagggcgcggcgcggcaaaggggtaggtggcgttggcagcaggtgcgagtgctcggctacggctccctcctcactcacccttcttcgcgcggcatcagcggcggcaacctcctccctcgatcctctcccctctgaaacctctcttggcgcagcatcgacgaccagaggcgtcctagtggcggtgggattcggatccggttgcaggaggggaggaggctggtggcggtgccggcggtagcgccccactctcctcccctctcagatctggccgaaggaaaggaggccatcaacggcgtgacaacagtagaggggagagtggcggtggctcccctactcccctcccgtcctatatttggccttatgagagctcgagaagggggcggcgtggcaaagggggaggtggcggtggtggccggtgacgacaaagggcaggggctgcataggtggatgtggctgatctggccgtggaggcgatggatccagccatggaggcagcggcgagtagatccagtcggcgacccgtctcccagatctgggtatgtatcctctccctgcagtctctctgtttcccatccatggatgttcatggatgcattggttagtgatctgtctcacaggacatgacaagatcgctggtgctgtggttgagggagcttgcagatcgttgtttactgtttaatgtagattgaaaattcgtgaatgttgtaaatctgtctttagtttttctgttattcatttgtagatttgtgaaacgagtaaatgctataaattgtggtgctctatggatctggcaatttgggattcacttttgtgatttgggaataattgttctggattggtgatctggtatgcatgagggtattttttttcccaaaatcatctacgctggcggtcgtcctgaccagccaccagtgaaaataacctcatcgcagatggttagcttaacctagccgccagcaaaaaccattttcgctagcggctggcttaggtcaccgtcaatgaaaataatttttcgctagcggctattggccgtcagcgaaaatggtgtgtttttactagccattagtcactggcggtagcgttggccgcatgagaaaactcaaaacggtcacgaaaaatccattttgtagtagtggaggcgaactggttcatcactgcaggtttgaattgcttaatggtaaatgtgtgtgtcgttctctgggaagaataaacactgaaggtttggtttaatacccttttgctcttaccaactagaagttattccgaaagttgatggcttgaaaaacatgtgaattagtttttttttagataatggaatttaacatcccagcctttgctcaaaaagagctacagccaattattacattgtatcaatccagaaaagaacgtagttcagctaaataggacaccaaacaaaaacagaggaaactaagccaaaataaggagaacacatttattgaagtctatttgtgaacctccatctataattggcaaataattgcataaccatggactccaacttgcggtatgcaacctttagaaactccctatcatcctcacacctttgtagctgtgcccaaaaccggagccagtgcgttgccctgaaaattacctgcatatatgaaatagatggtgatttattaaaaaccaaatcatttctactcaaccatagagcccaacaaatggcagaagctccaaccagtattagtttaatctttttcttgtcaatccccaaaagccatccatcaaatatatgagatatactagttggaagattaaaaccaaaagaaaactgaactgctctccatatgaattttgcataatgacaatccatgaagagatgttgaatagtttcatttttcatacaaaagcaacaccttaagctaccattccaattctgtctcgccaaattatccttggtcaacacaacccccttaagcaaataccacataaagattttaattttaagcggcatcttaagtttccatatatatttgttcctctcaacataaccattgttaattaaacctagatacattgaccttactgagaacctaccattctgatgataattatatctaaaacagtcagaagaaggatttaattgaatatgtacaatagaagcacataactcatgccaatatacaagattctgaccaactaaagctcttctaaaagaaacattaagcggaacagatcccataacagtggcaatagtggatgatttccttcggactatagcatataaagatggaaatttatccttgaaagccaagttacctagccatttatcttcccaaaatcttatttgttccccatcattcacaatccaagagcccatatctaaaaaagtacttttgactttcataagtcctgacaaaaaatgggaatcaccttgtttcttgtccacttaggttatagacttgttataaagatatttccttttcaataagttctgccaaaccccttcctcatttattagcttgtacaaccacttactcaaaagacatttattttgtaattccaaattatgaatcccaaggcctccctgatccttaggttggcaaataatatcccatctagtgagtctgtactttttcttatgatcatcaccttgccaaaagaaccgtgatctataataatcaatcttttgaagaacccctttgggtatctcgaacaaagatatcataaacatagctaaacttgaaagtacagaattaatcaagaccaaccttccctcgacagataaatgtttacctttccaactactaagctttttctcaattctttcttcaatcactttccaatctttattagatagtttcctaaaatgcattggaattcctaaatatttaacagggaaagaaccttacaaccaaagatattggaatattgatcataacactcctttgcctgaccaaaacaaaataattcacttttgtgaaaatttatttttaagccaaatagcttttcaaaaacagttaaaatcaatttaag

SEQ ID NO: 7183 - DNA, 4660 bp, Oryza sativa
gtaaaactagattttttccgtcctccacttcacaaaaccgttgcaaatgactccttagaaggtttgagaggcggtttcttccgacgtgacattttgatcatgcgactggttgagtcaggacatgaaccccacatgttagtgtcttgtagagaacgtgtggtcggtgaaaactcactgagtgtcgaaataagatttcggcaatacttaaagggggtggctatcaagctagaaaagtagatgggtttgaagacaaggagttttatacaggttcaggccttcttattcaagaagtaataccctactcctgtccggggatgattccgccgagtatattgttgatcgtatgatctgggggaaaaaaggtgtcccgagaggaacccggacccctccttatataggggaagggtccgtattacaaaatacagtccatatccctaacgaaatatgtgattacagataaaatacaatcgtaaccgactaagatcccgggtatttccttgataaacaagtctagaaactaacccgagtcctcataaatatattctatctatatttgataccgtgtacccaactaaactataactgccacgtagatattggatatccataatctccacagtagcccccgagacctttgcagtcaacgaaatagctttctcagaacaaaaagcaataatccgagtgcttcaattcctactgctctggcctgccgagtactaaaatcaaagactgtgaagggcgaaaataaaacatggtgcatcgagtagatgcacctaattaggtgtagcccctgactatgtggttagttgaaaaactaaacatgtagtcaagaaccgagtggtcttataaccaaacatcatatagcaaagcatgcatggttgtcacgcccggaatttctatccaaaattccaaacgcttacatgtgtgtgaaccctcgtccaggaatcagccgaggcacacaataacaaattgataatagagtacaattattactctaattaataagcgaataaaatgtcattacagaggtagatagttcctctcaatcaataaagatctaaccagcggaaaaataagataaacggcgcagacgactccactccacaggcagcttgaccagggctacacctaatcctccacaccatcagcatcactgtagaactcctcctctgatgaatgattgcaaggtgagtatatgacatacttagcaagccacgcagcaaatatgcaagtgcacaggataacaaaggatggcatagtagggtttcatttgcataaacagcaattaataaatatttcagaatttaataaaacagttaagtaataattaaacaatattaatccaacgctatacaacataccctgttgcataggcccaaccattctgaacaaccaaccccggctgcacagttctatctccaaaccaggaattaaccattccaaaccaggagctaaataaattattaccagttatagcatcttttattatggtgagaagtgtgagactaatcacgaaagacattgttagacccgccattaccgcgggcacggctattcgaatagttttactctggccagaagtgtaccactgtacccacaagacacagccccacaacatgtcaccatgtgcctcaataccaccacggtacctcggaaaggagctgtgacagtacccctcgcacaacacaatccaccacagcgcaccgttcctggatcataatcacccccttataaacaaggcatgtacttcccagcgacccccgtgggcttatctccgccacttctcagtctggtgctccgtaatgaaccatgctatacaaaaggtaaagccgttgcccacgctggcttgtggttggcacggttaatgtttcacaaccgaaaatcgtgaaccggtccttaattgtcatgagcacgaccatcaaaaccatgtgctcacaacccaccattatcaagttttagttggcaatttaattaattaaccagtcacgattgaccaccatgagctatcattaagccatcattaaataatagtgaatcataagttgtcccatttatatgagctagtgtctctaagcacggctaagcatcctattcactttagctaaaaccatataatgttctagctaatcaatttattaaccaagtgacaaggatagggaatcaatagcaaaagggctataacaaggcaataggttatttccacccaatgacattcaaaaataaatgcagtagttgaatagaaacaatagctttaaacgggatcaacatgctcaaagggttgtttgggatctgtgtgacttgccttgctggccttggaactcttcaaattcttctcctgcgaaaacggactctccggaaacgtcggaatctaaacagaaaagagcaaaatcaccaaaacagcacataaacaagcatgaacagtacatgtggatatttttaacatgtagatctcaattttagaaaaatttagagacttgaaacaactaaatccgagctaagatgaattagttatgaatttttaaagattaaatcggattaaaacacttatatggattttaattgaattatgacgcaataatgaattatttttgaaaagaaaaaagggattattgcgtcagcggctagggttcacggtagaccgggtgcatggcggcggctcacggaaacgaacggccgagatcgatccatccaaaacgaacggccgggatctatcggcccacgaccggtccacgggacatggcgacgatgacgtcggcgatgacgtcatcaccggcggcggctcgggcgcgcaagcttgccggcgaacgacgacacgacggcgctaacgaaggacaccaaaacgatgcgggcgacgcggcgaactcaccggtgaccaaaacagtggcggaagatcaacggacggcgacggcgacgaggaagaagcggcgacgaccttcgggttgacgacgacggcggtcttccggcgatcctcagcgacgacggaggggcggacgaggatggcgacgacttggcgaacccgacgatggccttcccgagcgacgacgacgaccggagcggcggcggcgcatggctggacaagcggtggcacacgggctcacgaggctagggctctaccggcgacgagagacgaaagcgagggtggcgacgggtagcggaggcaccgggggtccttttataggggctaggagcggcgatggaggcccacggcgaccggcaacggcgaaggaaggtttagggttcggggagagagatgaatccgattcgagatcaaatccacggatttccaaacggaattagccgataattccaaaagggaaaagatagaatggatcacggggaccattttccctctatcaatttcgccgaagaaggaaagatgcggtcgaatttggaaggagacggcggcgcggctcggctagggttcggccgggagacggcacgaggaagacgacggccctgacaggtgggccccacctgtcagcgggcggacgcgtgcgcgcgagcgggcggctcggctgcgggccggattgggccaagggagagagagagggatgtttcggccgactttcggcccaaagccaaaagagaactttcaaaactttttccaatttaaattattcatgaaatgcaattccatttattaaaaatacttccttggctcaaataaatcccagaaaaatctaggaactatagaatcaagtaaagtatttaataaaattttatctggaccaattttatattggaatttatcatttaaaattatatcttctcttctaggcttttaaaatcaattctaataattccaattaaacaacaatttatatatttgagatttttagtgtgtgacaaacctaccccccttaaacagaatctcgtcctcgagattcggaagaactggcgaacaaatgcggatgagctgactttaattcatcttctcgttcccaagttgattcttcctctgagtgattactccattgaaccttgcaaaaacggataactctattcctagttcttctctcatctgtttccattccaagatacggattggtttctcaacatatgccagatcctcttggatttctatctgttcaagattagcttcctcagtgggtacccttaaacactttttcaactgtgacacatggaacacattatggacacctgccaacgattgaggtaactccaactgataagcaacctcacctcttcgactgacaaccttataaggtcccacgaaacgcggtgccaattttcctttggtgcgaaaacgatgaactcctcaaagaggcgtgacacgaaggtacacatgatctccttcttcaaaactcaaatctctgcgacgattgtcggcataactcttttgacgagactgagccacacgcaatctttcttgaatgatctttaccttctcttctgcttctcttaggatatcagtcccgaaaacccgacgttctcccgtttgatcccacaaaagcggagtgcggcacttccgaccatacagtgcttcgtaaggagccatttgaagactagcttgataactgttgttgtacgagaattccgcgtaaggcagattcttattccaacttccaccgaagtctaaagcacaagctctcaacatgtcttccaaaatctaatttaccctttcggtttgtccatctgt

SEQ ID NO: 7184 - DNA, 1110 bp, Oryza sativa
aaccccagagtccgcacatcctcaaatacaaagcacttccctagttagatgtaggttagacttcccgttcgagaaactctaccttctacctgccctcaatttatgcacgattaatgaatgccacctgggtggaagcgagaggtggaaatggaaggtcttagttcggaggtgggatctctacctgatagttgcattgccattcatgatgatcccctggcattcgtccattcagccattcaccattcacccattcaactggaattttggttgaatgccggaattgtgtccacaaattgtggatggatagttggttggctggctggatggctggctggatggctggctggatggatggtgaatggctggcggcggttcggttgctttgaagcatttgttgctatctaaattccatttaaggtcgtaccttatcgcccagcatcatcttattctctatttgtattccctccatctttcagatacggatgtagccttggatgtgcccgtgcccaatgaagaggaagagcgcaacatgaaacgtaagtacaaaagtaccggacacccacccagatcccaatagaatccgccaaatcctgcgggaaattgtaatcccattcaccagctcctacatttaattaacaagagaactattgtatttatctaacacctggattatctccacctttcatttgatccctatttatagattacgctgcgttgctaacgggccgcacctcctatttcctcaagggtgaggaaatgaagtccatgtacaccacctacaatccgcagaatgtggtggccaccgcccgtttcctgttccacaagaagaatctatactactccttctacacctcatcgcgaatcggtcgtccgcgtgccattcaattcgttgatgatgcgggtgtaatcctggaggagcatcaactggagaccaccttggcgggcactctcagtgtctatcagaatgccacgggcaagatctgcggtgtctggcgacgagttccacgtgattacaagcgcatcctgcgcgacgatcgtctccatgttgtcctcctctggggcaacaaacagcaggccgagttggctctggccggaaaggtggccaaatac

SEQ ID NO: 7185 - DNA, 7107 bp, Oryza sativa
gatttttcattttttcagggcaaacaaggttaagtctctggcccataagactactcggtactcacgcccagcatggtacagcatgtgttgtactttcaagttgtagtacctgcggtgcattcattaggtcgagccaacccgactctgtgtacaggagctcatgtcagaccccatttagccacacctacccaaaccgctgagtatgcaggagccaacatgcataatcaagccactaagacaaatgtgagcattagatgcacgttcactggtgtagcaggcactggcttgtactatcatcactgtacatgagagcacaggggagagacaagagaggaacaacattggatagaagaacaaggaaacatcactctcactaacatgttggaagtggcactagccaagccaaaacaacatgaagtaataatgaacacatggttttctatttttctgcaacagaaatttctcaaccttgaggttaattggtaacattttttatgagatattattgcctagacctagagttgtcttatgctagcaaaaaatgagcttttcttgtacttcttgttacacacttaactagtggtatgtaagttgtgtacttgtgacagtttgccaacagaaatcagagaagaaacttttggaggatccaaatcctaatagtacggtgtgacaaatgtaatccttcaaacaagttggcaatcttctgaaaatattatctaatttgcaccaggcgaaagcattagtaattgacaactttcaaatatgtactgaaaaatagtgcaatatttcagtaatttacctcaacataaaaactaaatgcaagcttgcaggtgagcaaaacgacccaaaagaagacatacctgttgcatccaaatgaacagtcatattcaattcaaaggaaaacaataaattgaaaaggtgaagcacttacttaataatggacaatatatcttcatgcataccacgtgcaacatataatcttggctgatatgtggcaaaacatcatgtaagcgctaattatgctcaacactcaaattagttttgtatgtgtgcatcatgttaaaggaaatatgaaacgctgacctgaatccaccacataataagaccaattacacgccagtttgagcgttccatgatattctgaagttgtggcaacaagaaaagaaaggcagccaaaatgtccgggactatatatatgatgattgcaacattatatactgacgggttatgccaatttcctacccaactattcaggagttttccagcaccagatgggtatctgatggaactagaatatgctaatggaagaattattatccaagcaatggccacgaagaattttaatagatatctgactatttgtatccagtccatattcccccatgcttggaaagtaagcactatgtccagagttactgcacgagtagaaaataggagttatagaaatagcatagctctttgaaatgaatactatgtagtacaacaaaatagttcaacctgacaaaatgaaaagcatttagaagagagtactacacctttaatgaagttgagtagagcagctgttataaagacacttaaaacacttctgaaaacagttgcatcagcaagcgcagaaagagatccagacgaactccatgatactattagcattgcctggaagtggaaattcaaggtgtttgtgttgcaagtttaaagagttgaaaagattctgatgtacttcagaaagaggagtcacctgaaaagctagtatgaaaaacatccacattcgattaaaacttctaaatatgtgtagaaatgtgcggacttcaacaaaattcgttttgggctttgttgatgtagtgcgctgtaagaagaaaaaacaaagaaacattagctaaaaagcaactagcgtatactgtttatttcaagtgaacatgaaacagttccaagatctgaatacttatcatcctaaaataatctttccatgcaaccagccaatcacatactgtcaaattaatttctttccagccaatatttttcacttgtattagagcaaaatctgtgataagttctctgacacaatatttcaacagaacgtgatttggcacaggcatatttggattgaatggaacagatttgtcttaagatgagattctggcagacaggtcactatggaaaacagttactccccttaatgtaggctcggaaacagcgaagaaatcttcaaaagagttagtggtgaattcataaaaataaggttagaaatgacaatgtctagctatgtattaagctcctttccacctctagataatttgtaactagtattttcttccctgacggcaggggctctcctgtattatattcctttctagtaaaatgtatatgctatggctcaaaaaatctcttaagacttaaagagccccaaaatcatttgaaagcgagcacaagcttacccaattgtgaaagtcacttaacataaggacaagtctagttgcttaaattttctttttaactaagaactagccttcttgcctaaggtattgaactatagtcattgcagactgcctgttaggaacacaataattttgcaggatatagtatgattcctcaaaataaaaccatcaaaacatgccactgattataagtatcattttgactgttctcaagatcaaagttctattcatacattcataatgaaactataatgttaaattctattatctaaaaatgatgaaatcaccatgtggttcaccaaactattggtgcgatctccctaataagacaaccagattctatccttttgatgagggaccacacatttgcaccatgctgacattaatcaaatcaataataactgctacttaccccttgataaaagaagtccgctgtaaggtcccatggccagttaagccttgcaaaacatttctctgacctgcgtggaagaaaacgaaaactcacagactgaaaaaataaacaaccacacagaagattatgagattaccaaaagtgttcgttcaaatcgtcatagtttctccaagtagagtggccagctgtaccacctttactcttatgtgcttcctttttttggttaaaataagaataacagtttgtaagcacaagagcttctcctgcaaggaaaaattaagttatttatcaaactttaaatactcactttctgcaaaaccttgtagataggttcaatggcagttttcagaaatgatccctcttcttcaaatcctggtggtgattgaaaattattttcttcgatcattttgtgcaactgtcttgccatctgccaaattatcagaaagtaacagtcaaaacttatatacaggagaaataagaaaaccataaaatagatattgcaacttatgtgatggttcatgatgaaagatggtttgaatggatgttgtagctggttggatattattactaattcaccttgacagcttgataacacattcatggcttcaattcaatcacctcacaaattcattattaaggtatgcttacagttgaaccttgatgtaggcaaggattgcatcacatggaataactcccatagtcatattatcatttccagtagccatgcaatggacacaagatctacaatgctagcagtaatattgagctatttccatttgcttggactgaatttgttcagaccataaagtccaaaataatttgtgttgagcccatacggcatcgaaatctagaagaagataaaatcgaacactcttgctagcatgcctcagatatttcagcagaaatttttttcgttgtgtaaaatggcatatttgtgatttataaagaagcaaatgtttaaggagcaccaaccccacattaaccaaaagtacatgagactgttaaaataattcatagaataaacaagccagggtcagttcttgaatttctgaaagcgtgaactggcatataatttaatgatttgttgaaaaagatagcaacgaaacattatatatgtaaattaaataaatcaaccatgattaacaagttattcaaactggaatacaaaaataaatgaaaatttagattggaaaacccttttgttccaacagatacttacatggtggaatatgtctagatcaaccatgatcaagaagttatttaactagaagcccttacagaagtaaatgaaatcgagcatggaaaacccttccattcaagccgatacttacatggtgaaatatgtagcacaggcactcaggcataaaacgaacattcgaggcctcaccccagataagaagatacaacccaatgtgaaggagcattaattgttgtttattttgtgtgactgtctcaacgttcctgattccagaaaacagaataatggtatttgaagacattaaatattgaaggatattgagaagagaaataagcaaaatcttcataaactgttgaacgtacatgatacttgaactaacatgcaaatagctacaccatgattggtagttctgaagtatctttttccataatttattcacagtgtcaacctgaaagttaacatgccagcatactgttagatttcctttttaatgtgaataccaaaattggtagctcgctaaagaaaagcacataataaacttaaagcatgaaagcatatatcttttaaatgaaacagaaagagcattcatcttaccagaggatggtcttgcccagcagtccttgtgccaatatttgcgagcagcaaaaccaagttttctctttgattttccacatttgatttctatagtgagaataattaagttcaaatgtcacaatgtttaaatacggttgtcaaacataataacatgcacataaataaaactgacatgtggcagaaaataacattgtatcacttccatttggaaccagcggaccatatacatagacgttaaaaattttacctgaaatccaaatgctagtgaaagccagtcaagtaaatctcgtatggatttattcccatccgtgtgcatagtagacatgtgtggcattggaaggccatcgatgctatttagcgcatcaatagcaccttttatctatatcatttacatcaagaataccatcattaataaaaggttttatatacaggtagaaatagtgtgagcaaggagtcaaacataggtgtgaagaattataactaacctcatggagttccacaattgcctcagatgaacctggaaagttcaggggaataatgttgtacttgtagttcttgaaatgaacactcttctcctcaatcactttcgcaatcttcatcacctataacacaaagtttggaaggttgtagagaagaatattaccagtaacaagtgaagcacagggccttaagcaacaatatgcaagaagtacctcagaatcaactttgttgtttgtcacatctcttaacacttcataaagagcagatgccacttggtaacgtctagccacttcctcactgagcattcaacatcacaaaaggtggttaaaacagatcatcaataaggaaacagctaatcagtgcattgatacttacaagtttctcttttctgatatcctactcagctcagcacaataactcttataaaatcgttgaatttcctttgcatcattgcccataacttgggtgtcgtcctgttaaacagagagtaaactcaagggttcatcactggagaaaatattatgagaaagaaaacacttttaaaatggaacataaagataattttaatcaaagtaaaggtaatattgcaaacataatcacaacaggatcattttagagttccatgccaaggatgatacacagtcatgactcatgaatgattgccagagccgttattggctatgtaaatataggactctatatgtttgactgcttcaaatgccagctgaaaagaatatttttccctaatatcaagataaatgaagtaatgaaagaacgtatttggcctcatgggtcacggcaatatattaagcagccatttgaaagagaataaggttttaatgcccctggagggcacctgctcccatttgtaaggttgtaaatgactagcaagattatctacatcgtaattgttctttatagaagacttatctaatatctgattccgaagagtaagaaaacaagagttaatagacagtgtatttacatattaaccagaacaagggtaagttcagtaccagaaaatatgcactaaggctgtttcaacagaaactcaaagagaaagatgcagattttatctacactgagggagggtacctgcaacattacaatttcagacatacctgatctagcttaactgacatgtatgttttgaactgtcgaactccacgttggactgatgatggatccattctttggactttgttgtacgcatatcggcgaccttgatacaaaaatgcatgtaggaacaaaactcatatcagaaagacctgtacatcacaatacatgaaagaaggaaccaaatagctgataagataaacaaacacggaagcaaccacctagtaccaaatcggttcatgaatcatgatgcactatggcatgcagtgaacaaatttctagttagcatttgtatcaacaaaatgaattcatgattacttttataaaactgtcgtgtgtattgcacggtatacccaactactagctgtcccaagtaaatttacacataaaagtgcagtatttgttgagagttcagcttctcatgacttcatctaagctttgatggaagtgaaggattaaaccatctgctctctgaaaaaaaaaactactcaaatccagcataaatgtgcctttgcactcttgtacactgaaaagcgagaactcctatcctgtcccgttataaagtaggctatcaaaccctggtatgcatatgagttactcaggccataattagtcacacaatcaccagaggtgcatgtcaacatgaatgtctgctgtacacaacaagcatgggtaaacgttccaacgaaatatgaatatcgagatcgcaatgtaggccaaacagtacaaagtttagctgtataattttcaggacctcccgctaataatctgtcaaggtgtgaaacaaacaacccaacccagccaactcaatagtatgcactatgcagcatggaaatggtttgcgcttgcgcccatcatattcggggggatccact

SEQ ID NO: 7186 - DNA, 14819 bp, Oryza sativa
cttggacacgaagaggcgtagtgcggtgagcagcaacgaaatggccagcttgtccgcgacggaccactcaccttgctcgaaattcttgacgagcacggcctcggcgagcttggccgctagcaacatgactaccctgtcggcggcacctgggtgtacagcggcgaggacccgggcatggcgaatacgacctcgaacgccaccctccatccggcgtcctctgggaggccgttgagccactcggccggggtccccatccggccgtgcaggaggcgcagcgcggcggaggtgatccgcaggtgggggtcgcctggtctgtccgcgaccagccgggcgacatcggcgagcgcttggtcgaatcggccgtcccgagcgtgtacgagtgccaggcccatctcgacccggtagacgaccgtggactccgcggccgctagtttcttggcatactcacggaggtacctgccggtgaaggtcggagcgcggagtgcaccggcggcgagcgcgtgggccgcgtcgaggaacaaggcgtccctgccgctgctgctgccggcgagggccgcgttgaggtcccgcagcccagggtgcgcgcggacgaggcccaggtgtccgcgggtggtggtggcggcgccgtcttgcggcggatgggagacgcggacggaaatccccgacagcttcgccgccacggccgccgtcccggccagtgccgcggcgagggcggcgcggcggagtctggacatgtagccgtttgctctccggcggcgaggagaaagtctcgtggtttgctgaggattcgtcgtgcttgtactggacgttactggacgctaggatgcagagctctaaaagatgaaggaatcctttccctatataggtgtactacgtctggaactctggatgttctgcgcttctcaagcgaacggcccaatacaaattttgaaatattttcgtccaacaggtccatgcaggagcatagttattagtaagggtgaaaacggtaacggaaccggcgttcgtttctgactttctaccggtcgagctatatagaaatggtaattgacccaaaaaattggaaatggtaaaaaatatggagatggaaacggaaatggttttgctgttataccgatcgtttccgtatttaccgtatttttatggaaattactgtttcttataataattactgtatttctagatatgttgatatttatagggtatgtctctactttacccacagtttagagattgattgactcttcaatcaaatcctaacttgagtgcgtggctaaaatggatttaatttataatttatatagtatagcttaaatttatttatacatataacatacttatgagttaaatatatgttttctatagtttaatgtttccgtatttgttaccgggttccgatctgtaccaacatatttctatccgtattattccgtttccggttttccgatatttccgatatcgttttcgtttctgactttaccctttttgatttcatttccgagaaaatatgattatggaaatagttaaggctgttttccgatcgtttccgaccgttttcgtgaggcgaggcaggttcaatgtggcttcgtgaaaataaaattttctatgccacatcggacgtttcaccggttgttggaaggtgttttcggacacgaatgaaaaaactaattttataactcgtctgaaaaccacgagatgaatttattaagcctaattaatctatcattagcacatgtgggttactgtagcacttatagctaatcatggactaattaggctcaaaagatacgtctcgcgatttccatgcaaactgtgcaattagtttttctttttatctatatttaataatgctccatacatatgtacagagattcgatgtgacgtttttgggaaaaaatttctgggaattaaacaatgcctgtatagcacatagtatgtattactccatccaaaatatagtaatttttagtcttcaggacttatactaaaatatactactaacaacaattacaatcatccgccatttaatttctccacctacctccacttctcatctaattacaacatttcatcatttaattctacctactttctaaataaatgtgtccaaccctaaaattctgtaggtagtacttcactactgaattgctaaccttcattcgacaaaaattttaggtgagaattctgttgaacccttcacggttggattcatgtcacattttttcttctcgagctccgacgaatgaaggcggcccgacaagttcaagtctcgatttggggttggggtggaaagggggtgggaggggggggaagaggtgggagttcgacagccttagagggatggccatgggaggctgcgacccagcggtgagccatggaatgggtaggcggtgccgccgaagttgtggggttggcaactggcggcgaggggcaaaacaaagtgagtgattaggaggcatggggagggtgtagatgcgaaaaacacacactggcctggaagatctgcttaacttcagtgcaggtccaaaatcttgcctttaggttcatgagcgtgccagttgatttgatcctacaatcaataagaaagaaagacaaagaaaccgcggttaaatccataaacgatagccgatcggctagttgccgatgacatatcatttatttttgagccgatgtcatattgggatcgatcggccattgtgaataaataagataaagctaagtctactcgatcggctgtagatgttaacagtacataattgtcacgtcgatgtatatttaaaccaagtgattgggatagatcggtcgttatgccgagacagtataaatcacttaagtcaaaatatgcattaacacgataattatatgaatgttcacagcatagccgatcaatctagtacgtatcggctgatactccgataccactctatattaagatattaaaataaacataatacattaaacaggaagcctaacatattctaatacaataagatcttaacacaaagggtggatttagcataacaattaagcatataagatataaaatagctaaatcaggtaagatcggctgaaactccgatgctatctctttcagtaaccataaaacaagcaagatattacgattaaaaatattacttaatagatcaaactcaaccgatgcagcattaagcataaagataaacataagatctaagcaagatgatgaaagcatctaagagatggtagatatgctatataatctagattaacagcaagatttaaccctatcggctattttcctaacaataagaactagccgattgcgggttaaatagagtaattactaaagattatagaacatatatgataactcgacgaattacatcaacaagattagagtgtcataaagatggaagcactaatcccgagaacgcaagccgccatgacaagtttacctctagttgaagatcgaaatcgatgcagcccaacccgaaagcaagaactcgacgaaatagaacgaaagtaaaaaggtggcgatgcgccgaaattgtgttgaactgattgttaattgattacatggggtttgggctacttttatacccaaagtacacaatatgtccttgtcaaacacgactcctaacactattacaactcaagatacaaacaagtccttaaggcggacccttaccgactcaaagtataaggaaattacacaaaatatcctaattaatagatacaattgtcttctcaggactcaatccacgtgtggcaatccgtatgaagcacattaacttaacccgatgacgtgtactgagtcacattgtcagaatcggctcaatcggctaccttatccgactcgaactctgccaactctggtcgcagccgattcggacttcggccgattcttactctatttccggaacgatctacagaaattttggtgattatataagatattgtcagagattatataagatatatgataactcgacaacttacatgaacaagattagagtatcgtaaagatggaagcactaatcccgagaacgcaagccgccataacaagttttacccctagttgaagatcgaaaccgatgcaactcaacccgaaagcaagatctcgtcgaaacaaaatgaaagtaaaagggtggcgatgcgtcgaaattgttgttgaacatgtgttattttattacatggggcttggggtctatttatacccgagattacaaaatatgtccttatcggacacgactcttatctctaacaaactctaagataccataagtctttgcggcagacttttgcccaaacttatctataaggaatttacataaaatatcctaattaatagatacaattgcctccttaggactcaatccgtgtatggcaatccatatgaagtacttcaactcaacccgatgacgtataccgagtcgtattgtcaaaatcggctcaatcgactaaccttgtccgactcgaactctgccgattaaggtcgcagccgattcggacttagccgattcgtgctctgtttccgtaacaattcctatcttagattccgcttctgtttgatcttcatctctgatactcatattaccaaatttggtcgttaacacatgccccccaagttcggaatatttggtaatgtttcagatttgccatatctgtttttccaagaatatcgctcgttgccgtttttcgaccgttaccgcggtgttttaaatattaactgtcatctccgagaaatttcacaccgtcacctccgttttcaccgcttaagcaaaccttgtcttctctctctctccggcgatcccctcggtgcgcaaggcaattccaaggcgatctcctctccggccaagattccgcccgcggcgatgtcgacctccgccagcccgtctgtcgcgccatcggctgagtacgcagaggtacgtgctcatcagctagatccctttttccgtgcagtatatcagcttttcttcatctctattcttttgcatttgtagcatctctccaacttggtcgcggttcccagtctgtcaaacgagcaccagtattttctcggtccgatcggcaatcctgatccccatgagtttattagtgccgagactaataggattcctttcagactagccaacccgaacataggtcattggaaaaacaccttcaaatcttggccttccattgagaaaagtgcccctgagaaaagttggcctgtatggtacaagcgggtatcggctagcaagcaggctcactgggacgaaattggaatcggccaagcacttgccctgaccatagcaaattcggctaaggacaaacccctgatggccgctgcagcctatttctggtcgaacacacttaatgctttactctttaaccaagggccaatgaccccaaccctgttagacatcacaatgatcactggcttagatgtcacctcattggctaatcccatgagcttgaacactaaaaacacttttgagttcaagaccaagagcattggaggctggtcagggtatattgcagcgtacaagggcaaagggccagtcacccctcgagagcatgtagtctttctgctgatatggcttgaaaagttcctgttctgcggatcaagttgtggtcccacaaccaactggcagtttccagctgaagccctagaaacaaagagacaattccccttaggcaaaatcctcctcggctatctgtaccaaatgttgaataatgcatcggccaagatagctgtcggctcagttgttggtgtaggtggaccatggtggttgctgcaaacttggttaaacttggtagccatgaaagttgttaatcggccaactgctcctgctatcctagtaaattttgtcttcaaaaatctcaaatcggctgtacaatttgtcttgatgcttaactatcttcaactttctctcttgcaggtattagccgatctgttctcgtttgatatcaaagattaccttgatgaagagacagaagaagataccaccagcaaggctctagctcccttgtccgatgacgtgaagaaaacacttaaagatatatctcatcggctagggtcatcgttagatagcttagtagccgattgtggttcaatccgggctagattcaaggaaattcaactttagatcccagatgatcttgccaatattattactccagcagtatacctcgagcagcatcaattcaagctggaaagagctaaacaaagattagctgatcggcgggagcacaaggatatcgaagctacaatccaagccaatcggcaattggtgcatgaagaaaaatccaagctcgatcagctgtctaaggttccgatcaggtccaacattgatcggctcgaagcccaaaagattgatctcttggcacaacttcaagaatgcaatgccgagctggatctggaacacaagaaactagctgatctcccaaaagctgttgaggagcagaaggctaagctgagatcggccattagaaatgtcgccgatatgactaagtccttaacagtcatccctggaaccgatgctcaagacgcccaagcgatcgaagaagtagagtaaattagataaagggttgtatcggctatccaacattacttatcccaatgaatatccatgtaataggacttagaaaatttttgtaatcggctagaaaactctgatacttcatctacttgttctgatattctcttgtgccgattaatataacttctaaagttgttcaaaaattctcaattttttcttgcatatatgtgccctcctaattttgcaatgacgaagacattgataaaattataaattagtctaagggcgatataaccatatcggccatcctataacggcaaaacacagccgattatgtgaatgaaaacaacccgcttagggcgatataaccatatcggccatcatacatcggcaaaacacatccgattatgataataaaacaactaagggcgatataattatattggccatctcaaggcgatgtaaacacatcggctttacacgtatcagcaaactcagccgatcatgaattaacccatacacttgagtaatatttcttcaagtattttccattaagtgctcgtccataaacttcaccatcaagtccttgcaacatataagctcctttagacacaaccttgtggatttgaaacggtccttcccaatttggtgaccacttgccgaatttattatcacgagttcctatcggcaagattagcttccaaacaagctctccctcagaaaaagacttgggtaccacattcttgttgtaatgtcgagcaacgctctctttatccttggtaacttttgcaagagctcgcaacctaaactgaaccaaatcctccctttcatcggccatgagattatagtactcatcggctgtcaacatatcttgtaaatctgttcttctcgagctgattctaattttccatggtaaaactacctcatgtccataaacaagcttgtaaggaggaacttgaatcgatccatgacaagccatccgataagacaacaatcctttggccagtctagtatgccattaccgaggataatcagaaatctttctcttaaccaacttgatcaaactcttgttagacgcctcggcttgtccattgccatgtgcacagtaaggtgaagaattcaacaatttgatacccatgctgccggcaaactgaacaaactcatcggacacaaatatcaaaccctgatcagttgtaatggtctggggaataccaaatcggtagattatgtgctccttaacaaattgtatagcatctcctgaatcaaccttcttcaaaggaatagcttctacccacttggtgaaataatcagtcgcaaccaatataaatttatgccccttacttgaaggtggattaatctggccgatcatgtccataccccatcctctgaacggctatggcttgataataggattcatagctgatgctggtgctctttgaatttgtcacgaccgaaaataacccaacgggcgttccttacgtgcgtgtattattccttgtcccaggaggcaaggtacaccaaaagttgatacaattcagagtttaacaagcggaagcgtaagtaattaatttattacatgggcggcgaaggcccagcacacaagaagacaaacgaaaaacagcggaagactagggcgacgaccacaggcgcttgacggcaggcacgagctagacaccaaagccttcatcatccaggaactcctcttctgggtttgggaaaaattgagcaagactgagtacaaccaccgtactcaacaagacacacccacaagtgcaaaatagatgcaagggagtacaagggggttataatataaggggttagggtttgcagtaaacagcattaaaagacacttagttgctcaaagctattttgtcaatacgatcctagaggtatccaatgttattaatcaaggccgtgaacccacacgaacctgccttaacccaaggcctacgatgattcaaaccgaactggcaacccgaccctgggtcccagctcgtcccaagccaacccaggccaaccattccatattttagttgttaagcaggttttaagaattaaaacactaacttgggtacattgctaggcttgcccataaccgagggcgcggctattcgaataggttatactttgatcagaggtgtacatctttacccacaagacacatctttctcacgtgtaatcacgtgccacataccatcacggtatacggacggaagacgtgacatagtttccaacccatcctagccatagacaagagtaccgacccaaccccacctatggccggaacctccgggacaggtaggtaggactgagcccctagcagcaggacaccagccctgtgccatgacatttcgactaccgggccgcagctcgtgtagccttcatttgccctagagatgtccatcgacccccgacttcgtccatctccatccgtgtacttttgttcataaccagactgagccacaaactaagccttacccactagacatgtggaagtacgatagtgctttgcaacagaggcccgaagaccggtccttatatggccgaggtgttactatcaaaaccatgcaccccgagcccagcctaaaaccattttgagggttttgaatagagggggaggtgtgaatccaattccacaataatccaaccattccatagtgtccaggtgatatgaatattcccaaagtctagagttgtaaaaccacctaatgttgcctaattaaccagcgaagcatctacctaaattcatactagtggtaccataaatagagtacccactagttggggttttgtttattctagggtgaacaaggtaataataacaataacaacaataataaggtcataacaaaggtaaataggcatggctaaacaaaatagtgataacgcgggaatttaagtaaagcggtaatgcaataattttaaatcaaaataattttataaactgggattcaatatgttcaaggatgatgtgacttgccttgctcgctttcccaaacgtcggcttcaacctccacgaagagcggatcttccgaagctgcagcgtctacacgaccaacagaaaagaaaaggcttttactctaataaactccatataacaagcaggaacaaggcagaaaaatgggtttttgacctcttaaggaaaaattagagacttgaacggtccaattccgagttcaaatggccaagttatggccatttgaagtttatatgctctttaaatgaatatttgcgaatttcttcatttaaattttaatttaaaaagggtttattgcgtcagccgagggggaggggcgcgcggaccgggtccacgggagtggggcccacgcggcagcctcacggtccacggtggaccgggcgcacccgggctcacaccggccggcgccgtgggccccacgcgtcagccgcacccgagggcgcgggcagctgacggccgggccccatgcggcagacactcggcgcgcccgaaggcggccatgccggcgcggctggcgggaggcggcacccgcgcccctatggtcgccggcggcggccataggcacggcggagcggcggccgagagaggggagggagagggggaaacgaggcagtggtccacggctcaccccgaggcgacggcggcgacggaggaggcgctcggagcggaggaaggcggcggcgcggctcgggtcgacggggacggcggcgctacggcggtcggcgagctcgacaagggggtggacgaggacggcgacggtgcggcgaagccgaaggaggcggtgccaaggcgggaggcggtccggggcgacgacggcggcggaccggagctcagcagcggcggcggagagagagagcgacggcgcgagctcgattccggtgaggagaaggcgcggcaaagggtgaaaacgggcgaaggaagtgcggggagggtttaaatagggttggaagggggagagagcggccggggaggaaggaaaccggcgcgggaggtccagccgccatcaatggcgccggcgagatttgcgggggcaaatccgcccgtttgaacgcgagagagagagagagggaaaaaatggggggaaagggagaggggatcacggggagtatttccccccactttattgcacgcggggacggtaggatgcggcggatttggcggcggcggcggcgcttggcgcgggcggggcggcgggagcggcgggaggacggggatgacgggtgggccccacccgtcagcgagggtggcgggcgggcccgcccgtcagcggcgcgcgcgcgcagggagaggccggattggccgcggggagagaagggagagggggagggaaatgggccgagccggcccaagagagggagggagggtttttttttagggtttttatttttataaaacctttttaactttgtttatttcttaacaattattatttgtgctctgaaaattccactaaaatttatttacacattttaggattttaggaaatatacaaaaatcctccaagccttaatttgacttttaactttgcacattttaatttttgaaggctttcacaaggattttaattattctaggcataatttaaaggatatattttagagtcattttgggacgtgacagaattgctccaaatttttgacaatcttgacatcctttataatatctgaaacaatcttccaacattattggccaaaaataccctgcacgccgaagtaaccacttcatcttgtgagccgattgatgagtaccacaaattccttcatgtacctcacctatcgcaagctttgcttgatcggcgctcaaacacttgagcaacaccccatcgattgttcgataatataactcatcatccaacaaggtgtattttaaagccttataacgctatttcctcgaagctgattgagatgggttttgcaaatactgatacacatcatatctccgatcatcggctgtcatcgtggcaacttctacctccacatcttttaacatcggcttataccctgatgctccctgagccaaatcattagcttctatattctgctctcgagaaacatgcttcaaagttaccagccaaaatccatccatcaaccttcggcatttctcattgtagaccattaatgtatcattcttgcattcatactctcctgccagttgaccaataaccagtaaagaatcacccataatttcgatagcatcggcttcaacttccttaagcatttgcagccctttgagaaccgcttcatattcagcttgattaatagttgcataaggcttaatagtataggcaaactcaaaacttgccccctgaggagaaattataaccaagccgataccacaaccatgagtgcatactgatccgtcgaagaacaatgtccaaggcacaatgtcaaccaagccgattaagtcatcacggtgatccacaataaaatcggctatagcttgtcccttaatcgcctttggtgattcataccgaagatcaaattttgttagagcaaatatccacttcccaatcctttctttcaaaattggagccgatagcatgtatttgaccacatcggctttacataccacagtgcattcattggacaataaataatgcctcaacttggtgcaagagaaatacaaacacatgcataatttttccacaggagaataccttgtttctgcatctaagggcctgcgacttaagtaaaatacagccatttctttcccttcaagctcttgaatcaataccgaaccaatcgacttgtcaccagccgataaatataatctgaaatgtatccctttctgtggaggaatcagaacaggtggggaactaagatattccttgatattatccaaagttttctgttgttctgccccccaagtgaacttttgatcggccttcaatcttaacaaaggtgtaaagggttctaaccttcctgataaattagagacaaagcttctaacaaaatttaccttgatgatcaattcctgcaacttcttcttgtcctctggaggttgaatcttctgaattgcatcaacactcctttgagttacctcaatccccctctcatgaacaagaaatcccaaaaactggccagccgatacgccaaaagcacactttgtcggattcatcttcaagccatattttctagttctctcaaacaccttcctcaaatcggctatatggtctcctatttcctttgacttgactaccacgtcatcaatataaacttcaaccaaccaaccgattagatcatgaaatatgtaattcatggccctctgatatgtagctccagtacttttcaaaccgaaagtcatcacaacccattcaaacaagccgattgcaccaggatatctaaaagctatcttatgaatatcttcttctgccatgaagatttgattatatcctgcattgccatccataaaacttaatatcttgtatcctgaagcagcatcgaccaactgattggccaccggcattgggtactcatcctttgggatagctttgttcagatctcgaaagtcaatgcacactctaactttgccattcttcttgataactagaactatattagaaacccattcagcatatcggcatggccgaataaaaccagtatcatacaaacgtgcaacctcagccttaacagcctctagcatatcggctttacatctccttggtggttgttgatatggtctaaccccgggtttgataggaagccgatgctcgacaatcaatcggctgagtcctggcatctcatgatattcccaagcaaagcagtctctgtattcttttaaaagctctatcaacttggttctgaattctggagataaattcttactaatgaatgttggccttggtctgtctcctggacctatatcaatttcctccaaatcatcagccgacataaaaccctatcattgcttgtcatcgagatcatctaccatgtccttggtgtagacatttgaaccctccacgaccccctcaaaataataatttgggctctccatcttcaatcggctgtatatcacaattggacactcttagaaaatctccatcccaaacttttccagatagacaatcaataccatccatctctcaaagagctaaatcggcattagcaacattaactgacctgtcggctggtacaatttcaatcttgtcaccttgccattgaatcaagcactggtgcatggttgaaggaatacaacaactagcatgaatccaatcccttccgagcagcaggctataggaacccttcccattgatgaccaaaaatgttataggaacagttttactgccgactgtcagctccacattcaaaactcccttagtttccgatggattgcaaccaaaatccttgagaaccatgttagttttgataagatcatctggatttctacccaatttttttaatgtagcatatggcattaaattgatagcagttcctccatcaaccatcattttggacattggcttcccattgacaaatccattgatatacaacggtttgagatgacgattctctgtcccttctggtttctcaaaaactgtctgttctggtgacaaaaccaatttagccgaagcttcttcaacatcatcaacatcggtttgcctagcttcgaattccgcaggtagcacgaaaaccatatttaccgatgcagatgcaacagctttgcccttaagcaacctttttgccttgtcggcttcaacatcatcggctgttgtaaccgtgctcttaacacgccactcctgcttggtccaagttttcctcagccgatgattaatctcttgccgcacctcttgaaaacgcttcctgttcctcatcctttgaacccttctcttctgattcttggtgaaaatacttgtaggacaccattgtgtattcctatcatcatcttcattatggtgataatcttaatttaccgggcccaacctctgatgaataggtacccttttctgactcagccgattgcctctattataggatcggctagaactccctgcatcattgctgcatccaggacaatcctcaatcgacggtagcctcataccttcattccagcaaaatctgaaaaattcacaatcccaatgatgatcaaaaccaccatcatcttcttcataatacttttcctactgcttatcatgcttcctctgatatttgttaataactctagccgaattcatccggaaatttagattttttcccctatcggctgtcctcccagaagtgtgtaccatgttaacaaagaaaggattaccatcgaccttcatcggcttcttcaaatcatcgaacttgatctttcctccctcaatggccacctggatttgctgcttgaaaactttgcagtcgtta

SEQ ID NO: 7187 - DNA, 21036 bp, Oryza sativa
tatagaacttaacggcgcggaatggacggaaccctaacaacaatggtatttttgggacaaaatcgtttgtactatggcatttcttggaactcacacttgtcgatggcatttctgggacttagacgcttgtcaatggcatttcatggattatctcataattttaacacaatcttgtaaaagttcgatagaatacaatattttggacaaaattttgacagaatttcagcaataagtttggcacaatttcaacagatatgttcaacatctcgccttatataacatgtccaagcatcacaaagtagcacatactcaagaacacacattaaacctctctagggttttgggattgggtgaaatgcaaccttctaacccgattcacaccctggttgactgatttacttataaggggtataatggccattcacaaattacaatatcattttttccctttgtttaatttgaaagttccgagtctacctaactactgtcacaactgggggtaaacggttgcttcattttaaaaagtaggggcaaaaacacaaacctaaaaagcagggataaaatcacaattgaaagtaggaggctaaggttttaatatataggaatgagattctaagataaacttgtgtctttttggagagatcacaatgttatgccagcaaaagtgaaaatgctaattacctaacttgtcaatatcactcttttccataactactttagctgaggtttttctattaatgtagggaacatctgcttgtaccaccttacttcaccatcaagtaagtataaaattcgtttgtaaagccaagaagacttgacttacatatagaccaagtaacaatgctttgaacaatacagcaacaaataattcgccactactttgcacaataccaaggtaatgtacggcttgaagtagaaaaccaaaaccaagtccaccttaaattttgcatggcaaaaggacatcaaagttgagattactagttagtagtaattagattactttacaacataggctcatctaaaaatatggttttgttgacttggtggagaagagtcatacataggagaggagtatgtatcaattcaaaagtggtggaaaggaggttctggttcctctcattatattgttaatttgttatcggataaggaaactagaaactattttgatagtgaagtaggggaatgaactatgcaatgaattcccaagaagggcatatagtttctagagcaacaaaaatgaaaaacaacaaaaaatcaagggcattaacacacatgtttaaccactcgatcgtaaaagtacttcatagatgaaatatttggtcccagtatatatcacactctgcgtctctgcaatcaacagttgatcagagaaccctaattaataaactcactttttacccccgaattaacacatgcaccaggggcgactaccagcttaactcaataaacaaaccatcctaattaagcgactaattaaagacctaattaatcaaagacatggccactccatatatatgcatgtagatcaatcagcaagtggcctggacggtgagcacgccggacaggcacccggcgccggcgaacgcgccggtgatctccaccgtgcacgactccttcccgacgcacgccgccgtgaacgcctcgtacgccgccttggactcgcacccgccctcgtagccgccgcaccgcccgcgccccacgccgaagctggccacgtcgacgctcgacacggcgtggccgccgccgcacgacagcgtgacggcgtcaccggcctcgccggaggtgcacacggcaccgggcaccacggtgcggagggcgacgcccgaggggtcgccgccggcctcctcgaagaggagcagcgtgttgggctcgccggcggcgaggaaggagcgcggcacgtggtagtagcgctgcgacggctcgccgcagcccgtgaggcacctggtgccgtcgccctccgcctggaacgcgccgcggtagtcgcagcggtggcagccggccatctccgccgccgtgtacgacggccagtagcggccgaggttgttgccgttcacccacgccacgcccttgttcaagcccagcaggtccaccaccaccgcgtcctcgccggacggagcttcaaatgtagccttcataacaaaaaaaaaagtaaccaaagtattaagattgttttggcggtgaaagaattaatgacatgatgaaatttcatagggaaggtaaattaagtaaattgtagtcttcataagaaaacaaaaaaagtattaaaaatccttttatttttgcaggtgaaagaatgaaacgatgaaatgaaatcatacaggtaattaaattactccagtttcataattgataagttttaggttaaacttttataaattaactaataatgactttaaaaatatctagtttaaaggcaccaaaacaacatatataaatttgacttacaaagtactataacaaaagtaatatatatatatatttatattaatatattgtaatagagaaatatagtcagaaatatattttgaaaattatgtcattgttcagaatgttaagaattataaaaccggagagagtgagtaaataatggacatatactgtaccttgtaccaagtaaaaggcctgttgatggggatggtgccattgttgccattccatttgtagcctggcttgtcaagatggatctgcctgtactcactagccaagccagcctacaacacaaaaaaacatcaaagcaagaaacactatatgatcaataccagcaaagttaacaaacaactaagcattgatgaaaaataatgtgtaaccttataagaccaggagctgttggagagatcaattgcggtgccattgctgtctatcagcttaacagggcctccaacaatgcccgtgggcatcttttcgaacgaagggccatagttctgtttaccaagaatgatcaaacaatttatcactggtatacatgattaattgcaaataaagaagatgagttcgttgctgatacgatggaagtgagcattcaagaaagaaaattaggaaccttgaggccaacggttgcactcagaagagagatgtagttcttgccatcatggagcttcaccggcgactctagttggaagacaaaatctccatcggcagaatggtttttccctgacaaattatgaacacacatgtttgtcaatgaacattctttaattttgacccgcaggttcacaaacattctttaatttcgacccacacagaattaaaagaatggtgcaacgaaaatatggaaaaaaaataactttgatactcaccaataagcttcccgttcacaaaggcataaagttcatggccagtcgtgttcacgtacaatttgtagctcccttctcctttgtgattaagactgcaattttttttttgttggtgacgttctaaatttgtaacatatatatatttttttgtcggaatcatttcaaatttacatcatcatgatctcttttctttagtataaagagattttttttttaaaaaaataccttgttctgtaccacaggtaatcactttgatcggttgacgtgacgatctgctccaagagctcattcttcctaaagttgcccttctcatcggtcatgaaaggactcaagttttcaggcatccaagaccattttaggctctcctgctcctgctccgccgtgttgggtttcttcaccatgacagacgtctgggtcttaatctaggtcataccaagaggaaaacaaaattaagagatgaattatagaccttacacttggtctcattttaatttcattattgattattgagaaaggaaaaataccttggcgctattgaaggcaacagtcttgcagtcaggcaagatgctgactgaccatgcaggcaggaggtgagtggctccatcgagggtcacattgacatctttatcatcaaatctgttgttgatgaagcaagcagatgaggagtccagagtgtacttggtaacctacattgatcagagatagtaccaatatgcatgcattagatatgtttgcattagacgtgataattttgattaaaagaagggcgtgatctgaatattactgtgatgttatcgccatagttggtgtcaaaatactctccatggacaagagttttctccatggacttgagcacggagtggagttccttcaagtgaccatatttgggttgcctgagattacctgtaataaatcaaaagtagaccaacaagattataattaaaataagacaaaaaattgctttcttattcaaattcaccatataattaacagtacggtaaaatatattaatcaaagcttaccatactcatccaaaggcgcgtcataatcatagcttgttgtgatgtacggacctccggaggtacgaccaaagttggttccaccatggtactaacaaaaaatggaaaaaaaaaactcagcataaatcaacgaaaattcagtcattgtgaaagagatacaagctagccagcataccatatagtaattttgcagagatccacgcttttggaagaacatcgcaaccgcaaaagcaatgtcttcagctgacctatggaaatccggcttgtcccaagctttgaacctaacgttaagtacatcaacaaattaagataaatctcctccatgttcatcaaaaaataattttgcaaacaaagagatatatgtactaaaagttaattttgtaaacaatgagagaaatactaatggaagaaaaaaaaataccagccagtccagttctctgtccaaatcttagggatgcctgtcctatttggaaaccagtcatggcaatagaatccattacaggtattgacctagagcggtccaaaacaatgacaaactcatgttattagatgagtgataaacaaataaattcatataatattctatattcttgtgggattaaaacccatgctcaccacattgtgcggcacatcgtcgtcttgttgacacatgatccatgggacaccgacgttctgcttgttcgccatgtcagcacaccagtggatgtattcagatgcagactggttgttgtttaatttccccatgatgtttccatactcattctcaatctgtgcattgatccattaatgcattgatattaattgacaatatatattgtggaatgacaatagtacaaattattaacatgctaatttcccattgttcaatcatattgaagaatgatcattacaatacctgagcaaggatgatcggtcctccttgttcagcaaacatttttgaatccttcatcttgttaactataagagtggtgaatgtctccatctcattctatatcatggaaaaaaacacttgcattaattatatgctagtatatgtaaaagtacacaaaaatagatgagaattttattattattattattatttaacctcaaaaggctcattatgcagcctaaactgcattccagggatgtcgcgtagccaagctggaagtcctctgcacatttggcatttgttttagaaaacaacaaaacacagtgagcacttcaacatgcatgcatggacacataataatgttatagaaagaaactagagtagtttagtgtgctcgcttgtttcctcttattctatatgaacactatagatataatatttgattaatttgcagatcgatataatagtctattctatttcgtttttttctctaattctatatgaacattatagatataatattcgattaatttgcagatcaatataatattctattctatttatcactttgacacacaaatgctttagcatttatatacatgatacatacccatagttccattcgccacagatgtacgggccaatgcgaagaatggcgtacatgccggcattctggatctccttgaagaacctgacgacatcgtagttaccctcaaaattgtactgccgatcaaagcaaaaacattgttatagtattactagtatttatccatggttgttattgtatgtaatagctgcagtacgtagtagtgtttatgtgctaaagcaaaagtagtaatattgaacctggcggcggtgcggctcatggccgttccaaaagatgtaagtctcgatggcatcgagaccaccttccttcgccttcttgatcagatccggccacatctgcatagcaacaataagattagattagatagaaaaaaaatcaaattaatcttttgcgcacgtacatatattgcttatgttcattaatttcttaacacaaattaagaaaataaagatcgaacgaatataagtcacaacataatatgcatgcataagtatataaaagtatagaacataaaactcctcgcactgcttagctcatcacgatctatggcacaaaaagaaaagaaacactcaagcaagcaactctgtatcctactagtacaaaacactcaaagttgtatatgcatttaatttgcagattaatattatcaactatctctattttttaatacatgatgttgttgattttttcacacatttaaccattcttcttattaaaaaaacataattataatttattttttgtgagttgttttatcactcaaagtattttaagcatgatttatatcttatgtatctccataaattattacaaatgttcaaacatattaaaaaattaacgacatcatgtattgaaaaacaaaaatagtatacactaggaatatctatacctatacagcgttaacctggtgaatctgccgttgatcaaatagacccacacattattaatttatagttaatatcatggtcccatgggcctcacaaatcccatccaataatctctacatacaattttgttgggaattcagttggatatattgccgatgatctggatttcaagcggaggcatcaacacaaatggaaatagagatgaactttaggacgcgctcagatatctccaagtcgatcgggtattattgtttctcaatctagattggtttctcatctcaaacaattttaacctgggtaaactatatatatgacacggttgaaaaatgagcacctggaagagtacatagtaacgtgctaattactttgctgacagagtttagtctatgattatgttgactacacggacagaattttggacaatgattatgttgctaccaacatatgattaattccgtggctactttttttatttctttttacatgtacagattggatctaatgccaaaatttatttaattaattagttttccacttaacacattactacgcatagttacaatttcaatataattctcaacggtgataacaatatcaatattgtacaccattcataatacatggatcttacaattttaaaaatatacaacgaattctatgattaaaatataattcactcagaaaataaattaaaaatcaccatattgcagttggcattaatttgccatcaatttaaaccattcctatacgattttgtatgactgaaatactatcagagtaaaattttatagggctaaaaaataatatttaaaattatctcgtgcgttgcacgggttgacggctagtataacaagtcggttacctcgggagtgctccggggataatggatggaaccagagaggatgatccggcgctggccgtcgatgacgaggctgcggtcgtcgtagctgacgctggtgcagcccacggcatcggccgccacggcgaggaccagcagcgccacccaccaccggcaccagctgctgccgcgccgtcccatcatactgctgctaatttgaagttaattagctaggctacaggggaggaggggaggagaggaggagacgagatgagttgcaactttgcagatgcaagcgatcgaattgcagagatcgggcgtgggggtgatacggaatttataggccgcagcgatacgatgcgccgtacgttggagatagatacaatagaggataattacgtagtacacgtgggcatgggtttgttaatcttggagatactattgcacagagaaacaaacaaagtagttaagccggatcgccatgcatacgataaagacgtatgatacgataattagtggttagccgtaaaatcgagattgcgtgccgtttcttttttttttgcggatagtgctaaaactagaaaagacaatctccatcccctcctcctaactgagagatttgataatttaacactattttcaatgggtttcgattatttgacattctggttcactttcatacactcatatggtctcacatatcatcctcacaaaaatatcaattaaagtaattggacaatgaaaaaagcgttaaattatcaaatttttcctcctaacttggcatcagaattcttttccatcagatgataatgcccctcgtctcttcacgagattttatcacctctcggaactggctgacaccctgtgcattatcatagactctgctgcctgaatagcttctgatgttccagttatccctatcagatatcttgatcctggcaccactagcctgaatgatctctgtaatgttccttccggcacgtcgtacgacagcaccaaaatgttcatcagcaataccaatagtgagaatcttgggcgtcattgttagcaggtgagatctcataggtgtactgggtttgttgttttggtcccttcctccatacccattaggtccataattcacagcattattatacggcacctgtgggatcataatacccaacaggaacaccagggtaactagggaaactaaggcctgcatatggaaatggggaactcagattaggtgggtagtgaacgtcctccgataacttatgcttcatatcaaatatattgcacgcatctgatggtccaagggtcctgtgacagtaacgagtctatcatgcaaaccaagaaaattgttatcctgtggtgaaatcttgattccagcatgtgtgtcttcaatgaatgacttgattcctttaccaatgattcctccacaataatttagataaaggaattaaagctttgttgatcatctcagataattacatccaaaggtgataaaattagataaggtgatacaattagataaaaaagagtattatttgcagcaagcaactgcgctctgaaaatgaaattcattgttatagaaaatcctggtcgtcattctcattgtttttttgttccccaaacactgcaaccaagcaataaaacaataggggctactacacacatgccctcatatgaacacgatggaaccagaaacaaataaatcccagaaccgccatatcggtgccaggaaaagttacatcggattgtactagtcaaacctgcagagaagcacaacccatatattcatcatgatcagtccctctttgagccgctaccattctggccggtgaggatcctggagatctgcagcccccggctgaaggcctggttgaagagcagccgagtctgaaactcggagacgaaggggaaccacgacaggacggcgatggggaagaagatgaggatccccatggtgtactcgtacatcctcgccatctcctggatggagtcccatggcccgatcttgcggagcacatcccggctcctcagcctaaacctggcgcagcaacgccccttgcatgcggtgcccccggtgcaacatgaacagaacagggcgcagagcggctccgtcaccaatctccggaacaatggtccacagagctgtgcaatctacgagagtaaagtgaatgtgatgattgaatacaatggacaaatgagtggacaattctagtgggaagggggaaaaaatcaggttgaagttgtgagcacagatgcatcacttacctgaagaataaaccagccagtagggatgaatgccaaaatactggcaccaacatcagagacagtcagattgaaaacaacaaataatatgaccaccaagctgatgaggacaataaagacaatgcccttgaggatacggaatacaagttgaaaattggtaataaacttctctctccccattgagacgacctggaagaagaaatatgctcaactgtaggattactattgcaaagaacataatacaataccaaataaactgttaccttaagtgatacaagaactatagctataaccagccatgatagtgcatacacctgtggaaacaaaaaaaagaaagaaaaaccattagtccggtcagaattcatacattgatgcagagcactctagtcaggataagtaccatgaagcttctgttcccatgcactatgtgtaaatgataaacaataccatattggtatatcaagaagcgaagggagaggacgaactccaacagcaggctacgtattgtaccattcctcaggtggtcatgttcacttatccaccaagcctcccaactttgctctggtgccaggccaatacctcctctattgctcatccaatgccaccagtcagtccagtcatcaacagtcttgtgccactcaaagcatgatggattgaagacaaaaggtgcaaacagccaacagaaaacaaggaaccatattgaaattgtgacatatagatacaaacttgagctcctgtacgaaatgccataagctagatagacaaccaaaagaatgagtagctccagtgctttcacaaagtggctccgggaatacatccggtaattctcagcaaactttgcatggcgcacaacaaacccccggcctgtacctctatattttgcaccaccatgaagtattgttcttccatagtagtgagtcttcgttccaagatggaaagtgaagaaaacagaagctaattgaagttgcattattacaaactctcccaaggctctgccaaatcctttctccaagccaacctctatcatcatagggaggacgagcaacattccaagttggaaaatagattgagttgcaagtgcattttcaaagggcttgatgttcttaatttgtggatcctggagaattgacttctctaggccactcaaaacaagatataacctcccgtataaaaatacatacactgtaagaacagccacctgaaagtaatcaaagccataaaatgcgttagcacactttgtacaaaagtacaaaccttatgtcacattttttagttctttataatctgctggtcactgctttaaaaatcatgaagaacaatatagaccattttatttccctactaggttgttttctttgtagagaatttatctcctcaaacggaatgcaaagataagggagcataattattgggccaacatgctaaatgtgcctcaaacttaacttcacatccaaatatcttcctgggactttttgttttttttgcaataatactggttggttattggttttagtggcaagatttttctagttcatatcttgtttgttgtcgtgctttacaaaccacaaagtgaaccaatcagctattgcagctccagaaactttatatgttactaagttgatgtgtcaaagaataagattcataccatactattgaagtagaaaccaactgtagtgaagtatagagacaacatcctgtagaaatcaaatctgtgccctagtcgataaatatctcgacagagtgtttgttcaccatttccgtttgccaccttggcctcaaagttggatatttgattcattccaacatcacgtcctttacccagctgtatatattcatgatgagtaacatttccttgccgcagggttgaattgaatcctttaatcagaacaaccataagcttactgcacagaacaaaactaatttgcatgatgcacataatctctggaaattttacctgcaaagatatcctcgctaaggttgataacctttgatgccttgcttatgccaccccttgtgaggtgaaagattctatcgaaaacatcagggtgaccataatggaatcgtaccctgcataagaaatttggaaaaataaccaaagaaaataactccgctgctcatggtacaattgtacaaagatctacacagcaaggtgaaaatcattctagcctaacctgtatcacttgagttttataattcctatatttacttaacaatttatctcctatcctctcaaaaaattatctcctacacgataaattgtacctaaaatcaggttttacacggtgagaattgtgatagtacctagcccccactggttccctaaaactggtgggttattgggtggtttctagactcactctaggcactgccaatcagtttgggattgatgaaaattgttcaagttagtcaaaccagtctaacttgggagtaaattggtataaatatcattactaactcactgaaaatgagatgagtaaataacaagaataattgatttgtcacatctgaccagtttgaccataaacaggtaagaactggctggtccacaggcctttacaaccctgtcagctgtacgttccttgaatttatgtgctgtaaattatcatttctaaattctaagtatattgccttcaacccctgtgttcatagcatgcatggccttgtgtttgctttgctatgctatgattttggctagtcaatgccatttaacaattttagcaatttattgttcaaaattatagttcctttacaccttaacaagtaaatctcccagcatatattgatcctttattccttgtgtaactcataaaaatattctagtttggtggttggttatggctccatggaacatttagtagttatcaaaatccaataatatgaaagctacacatttgtgggtaggagctctgccatgaattagataggatcaaagcttagacaaaaccatactgaatgcttgaggagaagccaacaacatgaaaggaatatgaatcaagcagacattaaggttgtgcaatatggtgactatattgcagaagttgtataaaatgaattggccaatataattttgaaggtgaaaggagacatacttgagagtgttcgcaagaacacgttgtccaatggtaacgaaactagtctcttggtttgacataaaccacgcaagggatgaaacactatatgtcaagtaagaacaacataatgttagtacaaaaggagttaaaaaaataaatacactatcagcaaaattgatggcgcgctaaagtctagaggtgattaatagaaaaaaagaaaagccaaacctcccagtaaagatatgttcgcgaacacccaatattgttggttcagactttccgtgtttaataaggaactcttccagtagatttctcattttaaatgcttcctcaaggtaattatcctgcacaacagagaatataagataaactactaagtgggacttattttacacagagattgcatacctggttcatgtcaattgcttgaagcgcttctcctctagtgaagattatagcgtgattttgattattaggctttccctcgccaatatctgttggtttacctgggagccttatccggtaaatttcctaaaaaaaggttaaatgtcaaattgcaaggcatcactagtcagtttaacttaatcatgtactgactcggttaacaacaatattgagctctatttacaagagatatttgttctaagttcattagtgtgcaacatatttccagagcaattaagaggttattcaattcgctgccatttcctggaatgttgacaactgcaccctgacatcagtgttgatgtctttatgcatttgaatactgttccaatttattttataaatattactatccacaacttgatctacaagcactttatcacttaaaggtaaaaccgatctataatcactatcatggataataaaatatctacagaaaaaggtagatatttgagttcaagcaatgaaaattcagtacctcatcattgcctttcacaagaactgagtaatattgtttctccattttaccatttggtaatggcacttctttctcatcaatgtaagcaatacgcaatgctggatacctgtattgcacataacgctgaaggatgcacaaaagatatgtactttataaaatgtaatgggtgttcagcaacttacgttaacatgagatttaagatgttttcataaagacctttttcacgggaatcctttgatgccttatgcatgccatagagttggcaggaaacaacataagtgaattttatatcagcaatggccttggaccttgcagattcctctccgtctaaatcagctaaggtataacaatgtagccaaagttaattgtttccacataaaatgaaaaatggaggaccagtgttttgtaacaagagcactatctgcctaaccttgagcatttgtcatatcctcatagcattgtagttcaagagctcgtctgtagtacatcattcctctcactagacataagaagataaaaacaataagatctggagaatagatataagtttggcagcttactagaggatagaaacattcatagtaccagttctggcaagtgtttgaccacggtaagatgcccagatacggacatcatccatgtacccttttactgcctcttcattttctgggtcaactccaatgcgttctagaaagttcttccattcatctggtgaagtgacaaagcattactcattaaatttttactatgaacacagaaataagatgaactacatttaggatacactaaaatctgatgagtaagatggttgatagtatggaaaaccagattggtggaacacatactctttcactcttcacatttatcatgtcactatttttaatttgtaacattgatctgcggatccttcacgaattgtgttcagcagtttttattgataaaaaagaatctgcaactcacctggataaatcttttgtagatagaacaaaattgaaatgccatcttcattcttcttattcagttcatgagaagaatagagcacttcctcattataatatggagtcaaaacactaaatagtggagtttgttagaatgtgaagttcctcaaaatgagtgcagaggatagtaaattaataacagaagtaacactgcgcattatgtacaggtgtacagggctgagtgaagatataataaaaaattaaaaacatcatatcgttaacatgatttatttcgaaagacatgaatctgaatatggttaattaaaaagaacatacatttgtccatgtctcaatgttcacatgacgagcacttgtgcatatagctctataaccatttatctaacaaacaatctgatgtcccctcccaaaaaaaaacttcagtcagtagggaaaaaaaaaaccttatcaggcatcggaccatccccaattttcagtttggttctgagcaaaactatcgggttcaaccggttactactgtttcatttgcatctctagtcttttatgcaaaccagaccaggtacgggctctagtttcccccagtttaaccgtcggtccattatagttaactattcaaaatgcagcatgtatgcacggaatgtcatattataaaaaatcgccgtacagagttttatttaattaatttattagtccacataccaatatattaggatatgttatgtacaaacaaatatggtgtaatctaatggtcttatagatttaggcaggtatcagaatctcatcaatttctgctgtaaccaacatatgcagacagaataaacttagaaatcaaatctacccatacttctgaaataaaagttcattgatgataaaatgcacacctaaatgaaatcatatcatgaacttgaggtgcttttggcattttcatgaacagtgagtttgcaaagaaggtgatcctacgccgagcatccaaatttgttggtacatccattgcggaatccttcatagtcaacaataagtgcaaccggacaaactgggagcaaaacatctatttcagtattaaacaattaagaaacaactttcagagaagtcacaatgatagttgcacaccttctccttccaaaacgattcctttatcatatccatgtctaaatgtgtgaacctctgctttctctcattctcatctttcaaaatactgccacagttttcaaacaattaaaccaacacatttcatatctaaggaacttattaattacaatagttcttacccctgtccatctttcatgaaatcccgtgtagtaatttccataaaatcttgcagagcattaatgatttttctctcagcagtaccatcagtagattcattgctctgcaaaatgagtgataaatacagattaaatgtaatatatatatacgcagaaaaggaactaataaaataaatccattcattcttctgcaaaacgagtgattaaatgaatctgcgttaaatgtaaatatatgcagaaaacaaactaataaaatgaatcaggcataacagttgttaccagtagatgcaataattttgccagcgtgttgctgactttgccaatctctgccatatgaaaatcttccaaaagtgtattattttccacactatcaagcactgttttatcaatggcatcgacgattctgcagcagtatgtcaaatgagccaaatcagtaatttctaatatattgtacagaggaatagattcaccatgtaaatgaaagagtatggcctttacttctgatcattattgtctagcagaagattcttaagaataagaaccaaggactcgtagcattctatgacagcattgaatctagcttggtctagtctgattttttcaatcaactcatggtaatccccttctttagaagtcatggccatgtgaagagctgtgggtacctggtatattcctgagaccatgagcatctctgcaaaataatcaaataatattggataatttattatctatttctgagcaaacaggctttgcgcaccttactggcaacaaggaaaggaggccatggagtaacagaaaaactacttgaaaatgacggagccatcagtatgtccctttctctatcaaaataaaagttgagggttaaccctacagtgaatggcatagtggaatactattcaaaaaaagtttacagttccaacctatcacttatgaagtcttcctctcgtaaggaattgatgaatgaattccaaacacaaaaaaatctcccctcaccacatgcttgctgcaatgaaggtaataaaatcactcaaaattcaagtgcctttagcaaatactaaagaaattatgcatttctatgtcttcagcccacctaaaagggaaacagatcctaacttactgccctctgactttgagtggctgacatgtgggcccctagctcgcgggcccatatgtcagcgacccacatcagagggcagtacgtcagaggagattttccccctaaaagatggcccctgtatgcattgtagccacctacactttcattctcactgcatgtaaaagggtaaactcggatatccagatctcttgtttatataatagcttcagcctacctagtctcactaagtcggaagtttcacaatcttagaggtgttggtaggatcacttctgaactacacacgctagtctagctgaaaacctgattatgtgctgctgaaaagcttagtaacttaggaagggtacatgtccttctataggacttttaagtcggtgctacagtagaagggcgtgtacccttcctaaattagtaagcttttcagctcagtttcagctagactaaagtacagttcagaagtgatcctattcctaccaacaagaggaaatttccatgcttgaaagtttcaaaatgacatttgaaacttccatagtaaatgttttctgaaaatacaagatgaatttgcttcacttgaaatatttcaagttttgagtcaaaagttgtgaagccaatgtgaaaaaatctctgcttttgcggtagggatgaagagggagatgacaattattacgtgtgtagaggggggtttctgcagaggagatagctatcagatgatgaggggagtggagtctcatttacttaggctgtccgtgttaagcatagttgtaaaaaggggaccagactggtggttcaatcagaaaaaccagaaccagatctcagcacagtttggttgcatcaaaagaccagatgtgcatttggacccctttgaacagctcgaaccaacagtcttgaggtcatgaggtgaactggctattataaacctggaaaggctgggccggcaggggaggaagagtgtttgtaatgggccaaacggaagactaatcctttccctcaagacccaccacagcttaatttctttggcaaaaaacacagtttggttgtgccgaaagaaccaatgtgcattaaactgggacaggttggcctggctggggaaggaagagtgtctgtggtggcccaaacaaaatcctaatcctttccctcgaggcccaccacagcattcttttgtcaaaaaaccagtaaagggtgtgtcaatgggatccgatccctggttgagagattcaaagcagtgtgccttctccatcctaccatgaaggctgctgcattttaaatggaacatatactgcatttaagtatattaatattaaccaaccacggtttgactgcctagaccgactgtcagcgatgggttcacccatcaatctgactttttaaccatgattagcagtcccatgaggaaaatacaaacctctctatgcgctgttgcatggcttttattgaaagcttctggcattgatttgaatctggctcttaacatgccaagggtacgtatctacattaaaagaaaaagaagatatcttacaactaaacatttttaacactgcaaatatattgtcatacataaaagagtcactaacctcaccaacatgactaagggcacctgaaacacccccaaatgcagttgaaaaaatagcataccatatttgtatatccatgaagtacacctataaatagagcagtaggttatatcaatcatggaacaatattagaaccttccaagttcgagaaaaaaaaattgaaccttcatgattataattacataccatgacgattggggcccatatagtaatgacgacaccaaggttgtgtggcactgttaaaaattaacaagaatattgtaagtaaaatataatcaccataagaaccatgcagataacatgtatatccaaaataacaagagaatattagaaaagaaataaggagaagccccatatacttaattatatagttgcccccctcccccaactgccacacacacacacacacacataaaaaataaagaaaactaagtgtagttaatgtatttctctcttctctcatgaaaccacatgacctcaattgtttgtagctttggatgatcaaactacagttcaaattgtctcacttctcttataaatagcctcaattgtttctaacctttggatgattaacctatgcagcaaattatctctcttcacttttaaagtcacatcatctcaattatttctagcctttgcatgtttgatcaaaggtgtaaattgcaaaaagcatataaaatcaattatcttgcaccatattttatcattgtggtacagtattcacgcagcaatgcacagggttttcatctaatgttataggaaatgaaatcaccaaatgaaacaacattattgcaagagaacaaaatcaagtttggccctcaacctctgttggaaagctattcactctgaactcaaaaaaggctgtcttccccagtactctaaaatctggacagataacaccctcaaccctattctatggtggttttgattagagtaaaatgcaccacgggtactaaaacttgaaaggtgggtgcacttcagttgtaaattgctcaagcaagtcacacaacttgtttcgggggttcaaatatcacagagtacatgtcacatgaactatttgttgctaaattaaaaacttttggcgtaagttgatgcacttgtgaaccgcagagcaaggttacaagtttcaagttaagcaaattaacctccatatttttacgtgcactcctacatgcatatgctttcagtcaacacaatcgcatagtgcttagcaataaaacaacaaaattcatcttaaattggattttactgtcaatacttttacaccattggtttatttgtagccatgtttatgaaagaaattaatatggcatccaacttcgaagatgaacatcccacatggcatatgttttatgtgatttgcacctcggaaacaagatgggtgattcttttgagctatttgcaaaatgagtgacttaattgcacccaccttacaacttgtggtactgctggtgtactttactcattagagtaattcagaggggacaggattgcattgaacatttggtccaatctagctatatcacaagatacttacggaaagggaagatttcatgccactcatagttcccaactccttggttaagaaggaactttgtcggaccaataattggggatatctgcacaaaacgaaaacacattccatagagtaaggaaaaaaagaaattgcatacattaaaactgttatcgtaattcctgttgcagaatagaagatagatatttttttgaaacaaaaaataatagacagtacttctttgtcaaggtcttctaaaattgagttttttacttggcagctgtgtaaacattaatatagctcattattagattttcaatagttgtttccttttatatggtaaagaagacatatcattttcaaacttgtatatatttttctagatttttcattttttcagggcaaacaaggttaagtctctggcccataagactactcggtactcacgcccagcatggtacagcatgtgttgtactttcaagttgtagtacctgcggtgcattcattaggtcgagccaacccgactctgtgtacaggagctcatgtcagaccccatttagccacacctacccaaaccgctgagtatgcaggagccaacatgcataatcaagccactaagacaaatgtgagcattagatgcacgttcactggtgtagcaggcactggcttgtactatcatcactgtacatgagagcacaggggagagacaagagaggaacaacattggatagaagaacaaggaaacatcactctcactaacatgttggaagtggcactagccaagccaaaacaacatgaagtaataatgaacacatggttttctatttttctgcaacagaaatttctcaaccttgag

SEQ ID NO: 7188 - DNA, 63284 bp, Oryza sativa
  unsure (1)..(63284): unsure at all n locations
tgaccatgtcgtatgcgcgtactgaccatgacaggccccctggcttgcacactagaatctgactgatgtgtccatcgccaacgattgcagcgacaaggcttggcaagcacaggatcagcttgcttatgtgcagatgctctgagccgcggatatgcatccatgtgacagggtatgcagtgccttgttgatcgtacttagcaactgcatttggtggacggaggcggacgctggacagggcaaggagcgtcacggtggcgccggtgaagggattcaccaagaagcagccgtcgtcgcgcgggaagacgagccgtctgccgcaggtggccttgtagccagcgaagccgaagccggggaagcggaagggctcgtcgtagggggggctgtagaaggtgccgtccgggagcgcgagcagcggcagcggcggcggcggggggaggggccgctgccgcgcggtggcgcgccactgcgggcacaccgcggcgaagcgcgcgcggtcggcgtgcgcggggaggaggcggagcaccaggccggcgatgtccgccggtatgtccgaccacgacttcggcctccgtggcgtcggctcgtccgccatcgacgaccttgcaaagaaacacaaggaaaaggaaacacgacaacgttgcatcagccgacgcagccgaagaagggaagcacgccaagaaaaccgaaacgcgccacactcacgcaggcagaggcaaaacgtcgaacagcttgcgtgcgcgaccacctataggcggaggatagcaggaggaagagcaaggagcaaggagagggaagcggcgggagtaagtagaggagatggaagaggtggataccgcagtagatcgatggatttgcgatcgcgcgggcggccggagagacgaaatcgttagactgctgcctgctggtgtggtgagagccggagaggcggagacagttgacgagaacgagaggaggcagagtgagcctcagcaggcaaaaccagttcagctggttggcagcacttttactagcaaaaccctttttttagtctatttttttcccattatctttctattcaattattgcgaagagtgaatcagtgaaatacatggccggtccttaaacttgtggtgtggtgttactttggtccgtgaacttgaaaattacatgtttagatccgtgaacttggtttaatgtaccacccccgatccaatcgtcatttgaccacgtttgaccgccacgtaggcaacactttgcgctcagcccccttcacatataccttcgcacataacttgccctgaactcaacctcatggattagcggcgggaggcagcgcaatacgttttcactcaacgtagacgcatttgcactctccacccctatgcactcaacgtatgatggatgtctatgcttattatatattaagcatgattcgttcgttacatttgtttaataattgcactagtttattccctactaaagttatgattattatcttgataatttggattagaatatgccgaattgtgaccatatttccaacagggacgagcttggagaatccatgaggatgcctagtgtgcaagacgcattgcgctgcctcccgccgctaatctggccgcactgtgcaacctctatctgacctatctgacctcaatcgttggatttttctttccagctggttttctacctcagccttatagatcttaaagtaatgcagtgcttcatcctttgttttcaataagtacacaaagcaaaatctagtgcaatcatctatcagtatcatgaaatatttctttccccctttagtcaacacactgttcattttgcatagatcggaatgaacaagttctagaggagccaaattcctcgcctcagatgcactgtgaggcttgcgaggttgtttcgattgaaaacaggtatgacacttggaacctttaactaaagcaaattttggaattaaactcatgttggctaagcgcgtcatacaaccaaaattcacatgacagagtcgcgaatgccacacatttgactcgtcatcattgcttacatggtccaaagaaaagcggaacaagcctccgctatcataacattttctaataaacgttccatatttagatacaacacatttattggattcaaacacaaatctaaaatcatgtctacacagtagagagccgctaactagattcttctttattgaagggacatgctgcacgtttttcagctgcacggtctttcccgaagtaaactttagatcgaccgtaccaacaccaagaacagccgcaagcgacccattttccatcaacaaggaggaacctctcccgacttgataagaagaaaacaaggaaatgtcagcacacacatgaatattaacaccagtgttaacccaccaatcaggtgagtgacaaataggaagaactgtaggtaaaaatttaccataccccgatgttcctccgcccttgctaatgaccatgtttgcagactttctgtctttgcgcttaggacagtccttggcccaatgcccaggcttgccacacacaaagcagtcacccttagcctttcccttgcctttcttcttaaaagtagttgtagccttgggtttgacatcaggcttgactttcttgttgttatgggatgcttgagggtttttcttctataccaaattggtactagaactcccctccacctttttgccgcggttgtcctttgccctcgccttctcctcaacacccaaagagcctatgagatcagtgacactgagctcttgcctctgtgttttagagaagtagcaaagtcggaccaaaaaggtggcaatttggctatgatacctcccgccacgaacatgtctggcaactcatagcggttgttctcaagttcctttgccagcatctgtatctcatgagcttgttccactacagatcgatcatcgaccatcttgtagtcatagaactgctccatgacatacagctcactgccagcatcagaaaccccgaatttcgcctcaagtgcatcccacatttccttcctgaaggcatgtgcatgtacacgtccactatgttgtcgatgagcacactgatcaatgctccacggaatatgcaatccgcagcctcgaacttggcctcctcctcaggagagagaggcggtttactcagtttgccccgtgaaacaaagaaacattgcatcgctgtcaaccatagtagtgcacgtgctttccatctcttatagtttgaaccatcgaaagcgtgcggtttcagtgatgcggcaaatccaactaccgaaaaggacctatcaggtttttggattgttggaaatatggtcacaattcagcatattttaatccaaattatcaagataataatcatgactttaacagggaataaactagtgcaattgttaaacaaatgtaacgaacgaatcatgcttaatatataataagcatagacatccatcatacagcaatgcattgaaaacattgcgctaaacagaaacacaataagaattaacgcagtaaacaatagtatagagagattatacccagagaatggccctccgctggattgtgaggcataattgtctccgttgatgaagcctccagtaccatcctgtctagccgtacccttcccatccgcgcgcgttggtgttgtccgccgacatggtgaggatcgcaaccgtgcaaaatccaagaaaagagcagtcgcgttgaagaacgctcccaaaaacatgattgcccgcctacccgtgctagcagcgcaagaacagaaggaggtaaccagcgacaggaagagaggcacagagaggagacccgagaggactgattggcgatgggagagaggcagagtatttcccgagagtaacgttcgctcgggaattaatcgtgtcgttaatgccgaaacaatctctgtgaattaatcgcgtcattaatgccgaaccaatctccatccgttgcgctgttggtgttgtccgccgacatggtgaggatcgcagccatgcagaatccaagaaaagagcagtcgcatggaagaacgctccccaaaaacatgattgcccgcctacccatgctagcagcgcagtaacagaaggaggtaactagcgacgggaggagaggcatagagaggagacccgagaggactgactggcgacgggagagaggtagagtctctcccgagagtaacgttcgctcgggaattaatcgtgtcgttaatgccgaatcaatcttcgggaattaatagcgtcgttaatgccgaatcaatctccgtttgttacaaaacatgagagagagagagagagagagcagcagcagcagcagcctgcctcgccacggccacgggccgaccggccggcgcgcgcgcgcatgtggcagtccgcccactatctcaaccggtcaatagggactctcctctagttctctttttaagttgagatctctccacttaaattcccgacgtggttttattacctctaacattaattgtgggcctatggaatttaattgaattatattgggcctagaccatttattccaacagtccctgtcttgaagttgtcggaagaaggtgttgttgatcaagtacccgttgcgcaaggataaggttattttggagcgcagagcaatggcaattgctaatccggaccgcattttctatacatgcaaggagaagaatgagaaggaagaacgattttaaggattttttttggggggattctggtgtcactatatagctacaaggagatatatgcgacgtgttgtgatgtggagggggctgagagcaaaaatgttgtctacataggtggcatgccacgttggcggtcaaacgcagacaaaggacatttggaccaggtgtagcatcctaaaaaattacaattttctagttatgcatcatgtcggttcttatgttcttattaacatcctaaacctaggaaaatataattaaagagacctcctaaaactaacttgcttaaaacttcttcgtttatttaattccttttatgacttttattaaaaacctatcttgagatatttcttgatttgatttcaaactttcttttgctaaatctttctttatttaaatatagtttgaaaacccctttttacttttatgaattatggtccaagaaaccttcccatattcccctagaacataaaccaaagcaattccaattttattggaattaagtgtcaacccatcctttgatcttaaacctcaattcaaatatccaaatccttacttttgacctagccactgatttaaatcctgtggctataatacccttctcggcgcaagaataatattatgaataattgctcttgtgctaagaaaataggtttcatctttttatccaaaatccaagttccctattagcctcaaatacatctccaaaatccttgccaaataatttgaggctaacatcctatttatttcccctccatattcttcccacatttccaaaaatatatccaaatttaggagtcctattattcctagtgcagaaatacccctacttcttatttgagtacttccaaataaattccctcaaactccacttctaaaaatattgcactcaaataaaatagaagatctttattttggaattcacatataaactccctccaaatataaccccatctatcaattctactcaatctgggccgaagtaccttcacctaggcccaagtcagaaaatctaatttccctccctctctctgtgggcgcatttggcgcccaggctacggccgccgccgcccacagtcctgccgccgtcgccagccaatcaccgaacgaggccggcgccgttctcttcgcctccactccaccgacgccgtgccttgccttcctcctccaatcttacggcagccaccacgtatgcgcgccgcccttttcgtccaatgggagaacgaagccgacgccgtattcctcttcctcacgccactgtcgccgtgccttcctcgtcttccaccggcgaaccgaccttcatgaaccgacgtccacctcttttcgccatccgagccttgagctcttcttcttctctctctcctcccatgtccggccgtcgccgccgacggtcgatctcctccctcgtagcttctctatcctttcccttgcgccactatgatggcgaatccattttacccctttaccccttcccttccaccttgagttaagccaccaccgccacctcccaaaccggccggggctaagctcttgccgctgctgttccggccatccctctcttcctctctaccaaccaccgacctccccgagtgcgcgtcgaccgggaacacaatatgccgccgacgtcgccacactttggccactggaagcccggcgccccgctcaccctctcctctctcttctctcggctcactgtgaggcagaggaagaagagaacgaaggaagaagaaagagagaaagaaaaataaaagaaaaggatattccctgacaggtgggcccctatacagtaccctttcatattttctagatttaattcaaatcctattatttagaagcccatatctcctaaatcatagatccgatttcagtgaaacttggacctaaattcatctaaattcaaaatctacattttgataccaaatttgctattttaatattttatttgaatttacttaatttattcaaataccatttgaataaatatttgatttaatcttataattgaatttacaatttaaacttacatttgcttttcaaatattttattttatttccaaaataccctttagccactaaaaagttgccggttggaactttacgccttacatggggacgttcgtgcggtctaccgaccccaacgtcggaccgttggttgtaaagcccagcaaaaccaaacctaaggtcgaagtgctgctcctggcaccccacgcctcgatgcatatagtggtcggagcttcactattccctcgacctccacagcacgccgcacagttagctctcgggctctatgtgatcctagccgctccaccgccactcacggttgttggagtaacacttccgcccccactaatcttacaccaacctcctattcctctagccgatatgttgtctgtcgacaccggctagagaagacaccaaatctagtcgttatgctgccaactctagcaacgactagcaaacaaccaaaccctagccgataccttcttagttaaattccagccatcatccaaattccatatcctctacaatattacctatccaccatattctccgccacctactctccacctaccagaacctatatataaactatagagcctaaccgatgcgctatcctattccacaattggctctaagatataactaaaccccagctattatattacctaaacctaccgccatcaaatactagctagccacatactcgcttaaccaagacaactatccaaactagctacttcccatccttccaaccaatcaaagccttcacataaaatataagcaaccttagttgcctgatcccttctccaccttagcctccaacccttcagaacctccaaatgaaatagtagcccaataatcctaataccctataaaagagataggctataccctaaaccctagccctcctaatcgtttaccgctttcttgctattttatggcttttattgaatttggttcttcctcttcttcagtagagtctattatatttggatggcaacctgtggtatttcgagcatcggataatcaggttgcctatctcggatttatttgcgttggagcaaggtaagttattattcctcctcttgagcataattatcctataatctatatctctattctatgcattagccattcatgattttaaatgcataacctgaacatatagcaaaccagatatgctagcttttgcttagccatgcctagttagattgcataaaatataatgaacttagattgaaacaatacggtagaagtggttgatttccgggtggctagtactgttccaaccgatataagactgccaagtacatgtgaagaacatacgagtacgaccgcaattctcgtatgggcatagacctagctgattaagttatctagcaaaggtgatacctctgtatagtggttcttcttaagtcctcgcgcaggaggcaattctatgccgagcagggcaattatgatatttaccgaggcacaggtaaatatacttatattgatagtccaggggactatgttatggccatgtgattttgtgaaccctgattgcgatgacatggtgtcatacaatcagttctctctaaagacctcgggaacgccagaactcctcacactgctgacaacgttacgttcagagcgcatggggactagagttcatggaacaggtaccactaatgttaataactgaaaagctttgccatgacaaggctaatgtgtttggcacgtcatgggttgcgggtaaagcgtacatttactgcagtaaagtataaatgaatctattcgaatagccgtgctcacggatttgagcattgggactcatatagtatttggttagaaacttaattccaaactttattaaatactgttgtattaaaatcattacaggctttctacttatatattctctgctttctgcaactaatcatagccctactcaaatattaccatttcatacattcattattgaatataatagcttgctgagtacgttgtactcacccttgcttcaacccccttttcacagtcaatttggagttcttactgaagctgggagttcaatcacataaattagttcccttttaacctagtcttcaaatcagattatttagatggtttaagtctataacaaaacagcaaagttaggccattctaaaacttctgttgtaatagttagccataatcttgtaaataccctattactttatataataatatctctttcaaagatatgtctaaacgtatgcaaagacgatccagattattgaacttgtatcaatctactgattcagggcttgatacagttttaatatgtcggttaccgaatcattagttttgggacccggcaccggggtggtacattaaactaagttcacggatctaaacgtgtaattttcaagttcacggacctaagtgacaccaccacacaagtttaagaaccggccatgtattttaatctattgggaagaacgagcccatttggtagttcggttttcccctggcttctcaagctatagctcaagcatgattcattaacaatttgctttttaaaaaaaattattttgcaaataaatgctccctcggtttcatattataagtcgtttgagtttgactaagtttatataataatttaacaacatctaaaatatgaaattagtttaattaaatctaacattgaatatagtttcataatatgtttgttttgtgtcgaaaataccactatatttttctatttttctataaagttggtcaaatttaaaaaaaattgactaaaaaagttaaacatacaatatgaaacagaaacggaaggagtgatgttcaatgtctcggtgccaacgacagagtcgaaacttgttatccttagcatacttcttttcttctaaagtgaccgatggtatcgatggggtgacaccaatatcatttgctatgaggttcgacgtcaactattattggtgttgactgttgagctcccgcacctatcatttaatctgagagaatgtgttctacctcgatctcacattttatccaaaagaacgaaacaaattataggaatgtaaagagggaagggagtagctatatttacggcactatatttttcaccaaaaaatagtcagcatgtatttacattgtaagtccctaaattacatatgtaaatttagtatatttataatgtaagttttaaaattacatatgtaagtcccaaaattacatagtaattacatgtttaagtagtgtataagtgagatgtaagtggagtgtaaatttgtataaagtatagtatgcatgcgtgtaaaaccttgaactaatgaagatgttaagctttaattaatcgtgttgcactactaaaaaaatacccattagtgccagttcttaatgcctaaaaggtgctggttttgcggccgacactttttggtcggcacctatgatcgaagtcattggcacctataatataatagctgccggatatacccctagaaccgagactcatatggtactataggtgccggtgtctgtaaataacgggcacgtattcggatgaacgaggcaaaaaaaaaattccccagccaagccgagcagagcaagcactgtagagcggataatatccatcaaaaattcattacatcacaatccctaaatccatgaaagatccaccatccaactatattttagaatcaaaattgacaaaaaggaaaattcacagaacataagtatttggtccagaaaaatcgaccaaaaaaattcaaaggaaaatgtagtctgcaattagactttgtatcttaagtcccaattttttccaggaacatccaccaacctgctcgatgtaggggatgacgatgtcgtcgatgagcttgaaaattgcaacaggcagtccacctcccatccgacgagatgcacccgcaccatcgtcttcctctcgctgtccacctgcacacacgcatcatcacatgcccaaatcagtaaccatcacagcaagaacacgcaacagattgacaaggcctccgagctcagcacctcggcggcggaggcgcccaaccctgcagctgcggcgccatcagagggaggagctcgccgcctgcttcacgccgccggccgctggtgccggatccacagcggaaaccaccgctgccgccggatcccacgccgtcaccgccgaatgcgccgccgcaacccgtcgcccccgcctcccgcctcctgactcccgcctcccctcccgccggatccggcggaggggagggcgccgccgccgcccgcagcttcccatctcaccgccgcttacgtcgcctctgccgggatgccgcccgaccgccgccgcgcaagagacgagaagcagagaggaggcgagagaagacgagagagagaggcgagactcgagagagagataaggccgatagagagagagccgagactcggcgataagtttgactcgacggtctggatcggctcggctcggtttggaaaggtgccggtttttttaaaaaaccgacacctataatttattattggtgtcggttctacagaagacccggcacctatatataggtgtcggttttttatttagaaaaccggcacctatattatattaaagttgtttttttaataaaccggtacttatgttataggtgtcggttttttattagaaccggcccctataattgtttaaaggtgtcggttttatgtgttttcagtccacggaggagagaaaaatattataggtgccggttttaactgttccggcacctatagtgccgatctctatgagcttttttttagtagtgttggcagtcgcaacgttaggctgccatggcaatatgcacggccaagatcgcattggcacgggacaaacgaaatcggacgcttcaaaacgccgactgtgatggaggagaaaatgtgtttgcgattccaaagagggaatattgcttcggtcaattttcactatgaaatccaactctaatccctacttaaagcggactatataaggtgaaattattattatctacacctacatatatgcatgcatgcgatttaaatagtgatataaaatttaacaagatgaattatgatgatgaacaccagacaaacctaagtctaaattcgatcctacaccttgccgttatataaggcgatcgatcccctgcatcccataaaaacctactggggcttttgcctcagccctactcaacataatcgtgtagatgtaacacacttttgcgaaaacgctttgtgttgggcgtccgatctggagagaaaaatcagatgcccacacacccacaccactcttctctcaaccttatctcttccccaaccccccctccctctctctctcacatgtcactctccccctgtacttgagcgaggcggagacgaggtggagcgcggcggacgggtcgccggagtcgagggaggcagccgcggcgtggaggcggtggaggggagagcggcgcagggccgcgcgtagggagcccggcaccgggtacgccgcgatggctgcgcggaggggcgaggctgagttcaccgacgcgcggggtcctcccagcggcgtggcggagaggaggatgagcagagtgagcaccgccgccacggaggctacggggaggaggcggcgccggcggagttcctagtcgtcgtggtggccgtggccgagggagcgtagctgttgatgcgaaaaacacacactggcttgggagatctgcttaactccagtgcatatccaaagattgatgagatgtgggcgtgccagtcagtttgatcctgcaactgacaagatatgtaaactgtagatcaaatagccgatcggctaaacagccgatagagcaatcccagccgatagcgatagggttttgagctatcggctatatgtccaatgtaaataatgatataaagtcaatcggctgataataatataatataacaatatcataatccaatagaaatcaatcggctagcaatgatatgatagaataagcacttatccgaaggttaaagcatacatcggctagaggtccgatgccataaaatccacagattagattaaacagtgaaacctttgttgtcatcggctaaatccaacttatatatatatatacgtaatccttataagccgatgcaacgtccagatatcttatcggctagcaccccgataaaacattagcatgaacctatcggcttaacaagacttatattatcaacaacaatctagtaggtcgaacctaaccgatacagcacgagattgtatatgataatctaatacccttaatgtgatggatataacaaatctatctagaacgacattgtgattgtagagatatatcggctatgatagaagatcagacttaaccgagacagttccagctaaaccgatgcatctctaaacacaatgtaattaaagatagaatcgagatatcaggtaggcaaatcaatcaaccaaaccagagcgatccaagagattgaagcgatgcagccttaaacgacgccaacgtagatgacagattcaccagagcccggcggaacgtaggacttaccctttcgccggagatcgaaagccgatgcagccccgcgtcaggtgcccaaatcccaccggttgataagtaaaaaccttaggaaagagggtggcgatgcaccgagagtagttgtattgatcgagattgatagattacagggacccctggtacacaatttatacccttgggcctatagagtccttgtcggacaagaaacaaactttctaaaagataaaacagaaacataaagtccttatcagacacactttcctaaagataaaaggaaactaataaactattcctaattaatagatacaattgccttcttcggactcaatccgcacgtggcaatcctcatgaagcactttaaacgaacccaacaatggttccaacatccccttgtcggaatcggctacatcggcttccttgtccaattcgatattagccgatgcacaccgtagccgatgcagttccgaagccgatttatactctgtttttgttgccgatttccttccaaatccgcttcggtcttaactccaaatccaatgtatgatttaccaaatttggtcgttaacagcagcattccggcaccgttgaagatttggccaccggggtggaggaagaagccaaatctagaccggtaaatttatttgatttttcaatgttccagtctattttgtctcgatgtttctctgtgttaaatcgaaatgtttcactgcatttttcaatggtgtttcacatttcaacaacagtataaacttgatgtttcatgtgtaagatacaaatgtttcaatcttgccggtgaggggtagaagatgaaggtgggttcatttttatttgagttctagagatgttgcaacctattgttctatctcgttgcactttattgtgctaaagtgtttcattttgtttttgtttcagtattgcactttactgattcttcgtgttgcaaccagtctatttcagatattgcatttgattgaaacaattttgttcaagcaatgaaacatttttcctcgatcgatgaaacattttcgttgaaacatttttttcgtgagtggtgcaacatgtgaaacactttgtgataatatagtgcaacaccgtccgatctattgcaaaagatcggacgtccgatttgtagcaacctccacacttttgtttcccctacgccgcaccacgccaccccgcacggctgctggctcgatacacctgcccgcccaacatgtgcaggattaatatcatgtttttcaaccttgctaataagttgcgatggtttagtaactcaaaatatgatcaaaattttgtatgctattctcaacaaatacaccaagaataaagcttacaatcagcgtgagttgtaacatctcttattgcataaagaatggtattacaaagttacccatcttctcttttctctcaagctcttccttttcagcaatctgtttcagcgtagtccacccctttcttgcccgcttccttgaactaccagacatctgagcagaaccacttgctacagatttatttttcacacggtcctttggagctgacttggtaggcattgtaggggccttgccagtaactgaacttggcatctcccctttcttgttctgaatgcttcttgtcttgaccagttctgcagaatccttatggtccgtcacatccaccagtttgttctttcgaggagtaacaaaacttgatccgactggaaattctgcttttgaaggaaaatcgggttggcatattgcaattttgttagcagaaacaggctcagtttcatgcatacctttttcacttgtgattgttaccactattttctgtgagacattctcctgatcagtagctgatgctgactgattcagttccaccgatgaacacgctacctccttttccatagattcgtcaagaagattgggtactggactttcctcatactcattcttttcaagattttgttgtttcaacccagatgttgactctagttgtgagaccgctgcctgagaatattcaaagccctcttttatagttactaatctcttgttattactgtcccctttcaactttatgctggttacatccatgccaactggctttcttgatgataacaagcccttcataatattctttccgctgccccttattaggttttggtctccacagaaatggcacaggtaagaaatgctgttctggcaagtgtttaacttcttgcgtcgctttgcttttcttttgttgttctttatgcggattgtgcagttgaagcctggctgtaagactgtttcacacctgcaaaagtttggagaatgtttcttcagaagtcctatagagatattgctctcttctacagtagtaatgcttatgatccagacaaatggatacgcgcagtagaaaaaaaaaacataactaggaaactgaactacaaagtactcattataagatgttttgggttttgaatagattcatgcatggatccatgtatgtgattcatatgtgtccaaattgataaggatgttagtgaatctagatgaagaatggagaggccaaaacatcttatagtgtggaactgagggggtacatagtatgtcaaaatgttttgtagtcgctttaacatggctactttagtgctcacatcatactatagatgtattaatcataattatgggttgacttccaagatttagaacaaacacatggcaattactatgctgttatttgttcaagctttgcttcagccatacaacattatcaggatgactactcatttcaatttcttataggcaaaatttgctacaagacacttaaagtctgtggcctttactgtgagacactcaaagaatatgtatcttctcgtggacactgcaaaaatgtggtaattagctgttggacacccgagacattattttattattttcggtggagacggagagagaaacattggttaaagacaagtttgcctatgggcccacttgtcaatctcacatatcctctctttctcctttcctcttcttcctcatgctgctctgttgctgccactcatgcccctcgaactcgcatcatcatcgctgctctgcagaacaccatcttgtcgtcgttgcatggcatcccgacgccgctggcgatgcgtgacttcgggtgacgtcactgacatgtacctgtgggcgaacccatcgagagggcgggagttggaatttggaacgcgttatccatctgttgaggtggaggcggacatcgccgtgacgagttgccgggcgccgcgacgggtggtcgacttcccgctggtttggtgccgacttggcgcgtagcggcgtcgcggcacggccacaacgaggcactctactctatggcgatcatccagttcaacagcattggcctccccaaggacagccgcaacctccaggccggcccaactctgcacacgcgctgcatcgtgcgggcagaacgacgtgctccgcgagctcggccactacgtctcggacggctacggcgtccgccactccctctcgggcgtacgacgcctcctcatctaggccaacctccgcgagctgtgcgccgcggtcgccacgggcgggacggggttcgtcgtggcgctcggccacaacggcgagtgcaagccaccgggcccgcacatgtgcctcctgagcgactacgggtgccatatcgccggcgtggcgaggcggctcgcgcacgcggcgaacacattcctggccgaattgttcgcgttgcggccgctagggttcggcgctagcgccggggcgctccgatgaagcaggaagaagaacagtactccgggggcatttcggtattttcaactctctttctctctgttttcaccggaaataataaaataatgtatcgggtgtccaacagctaattagcacatttttatagtgtccatgagaagatacacgttctttgagtgtctcacagcaaagaccacaaacaaactttgagtgtcctatagcaaaatttgcccttcttatatggtagcatcagtatacttaggggacaagatggaagaatagccacacacacatgcaagattgcaagaaatacttccttttagagtaaagagataattgtacatgcaactgtcagtgacacagtgttttgaatatgtgaccaatgaagtgctcattctcccaccaattctctgtacggatcaattttggactacaagattttctaaaaaagaaaaacacaatcatttgtttggacttagtgaacaaggttacagggtatgatgctctcatgaactagcagtttttaagccgtgtgaaacagtattgcaacaacagtggttgctgacagataacagaataaatataactgaaaaaaaaacaaaactacctagtgacttaatcagttcaagtcaatatgaactgttgttttgtgaatagaaggagatttacacaaatttggttagaacttgagtaatcaatcacaaagagagtttgagaatgatatgcacaatggatccaactaaataaatcatatgaataggttttgattttacaatatatctgtaaaataggtttcgattatttgctataaagaacttcaagacttggttatctgtatcccataaaactgatttatgaaatgtaccgatcgagtacattaaagctacagatcactctgtcattctcactgatagacaaatgattttaccaataaaaaaagcaagtgcaaaattatatgaatagctgaattaacacgacaacatagcatcaaaaggctgcttgatacttctatggtgcataggaaattaggaatataggataggacgatctgtttaacttttgggttctatagtatctagccggacaagtccttaaactggctaaaatgctgcttagcacaaaactactgcaatttcttagaggtatgaggaggattatgatactaataatatctgcaatggttggggggcagattggctccttcaatatcatgcaacaatttgaaagacgatgaaccacaaatgaggatctttcagtagaagaattgagcactttgccccacaacagacaggcaaattctgaaggacgcgagcatccgaccgaggtgtagtaagaagtaagcagtgaccctgacctctggcataggaaggtggaggcggccagaggtatcccggccgcctcggcgttggcggcgaggcgtcgccccagcagggcgccgagggggcccgccccggcctccccgcctgcccacgccgccagccgctgcaggtgctggaccctcagcagggaggccgcgtcagcgcgcgtcttcccggagctctcctcgcggagcgacaccgcctggttcccggccctgggcggcgccgccggggcatggccatggccgccgcgcttcttccccatgtagccgccaagccacaaccgcgaggaaggcaacggggcggggggcggggggcggagggcggcgggcggcggcgcgggagggagtaagcggaggcgaggaggcggcgacggcgagagtgtctgggtcgttgtgggccggttgggccacgccgccgcttaatttggactagcttcttttcgcctttcaggtttccagttcgagacttcgagggcatgttgatacataaaagaataagttcaccggaggtacctcaacttaattttttttaggtccttaaacacaaaaccagaaatcttcacccctaaactatacaaaaccatacactaaaggtcctatggcagtatatacagcgagatttttttaggtcccttaaatacaaaaccagaaatcttcaccctaaactatacaaaaccgtgcactaaaggtcctatggcagtatatatgggtggttctatggttcataaaagggtccataaaaggacatgggcagccaacagagcaaaagttggctctgtttcgtttgaatttatacttaaattcacgaattggtccataaaaggggagaaatcagaatcgcctgtcacctttgcagacgaggggacgccattgaagttagttgtcctctgttgtggctgggttttcttgttcagcatctactatgacatccgtgccctgttctggggtagatgagccagtaacttgggtggctggatcgacattttcattgactgcctctgctacttcacaattctccaacagcgcctgagctgacgtgctggatgagagcacattgttggaatcattgtgatccacatacataggttccaccattagttcaatctggcccatttagttaggattttccagatgtccatcttgatcaacactagtgctttgctgtgggattgcagagcctggagcaggagtggctgtatcacactcatcgatggctggtgtagctgagtgactgtgttcctccaactccagtgaaggacatgggcagatgacattgttgaaaccattatcctcctcatccataggctcgagggtcattgttgcatcatccaccatgtgaagctcttcctcttcctgatgctgagcttcttgatcggcatcaacaatgttctgttcagcttctagcaaaagtagaggcatgtcttgagcggcagctgattcaacatgtggactagtagcggaaccaccattttccttgatctcgccaaggtcatggagaacatcctgaaagccatgcagaaactcaaagaccaaggcttgtgtggttgtatcagctgtggatgtcatggccatcttggccttctttaccataccatgcagtttatcaacctacaacaatcagcagacccttcgagttaaatatattagttaaattatgcatggagtgattgtaaaactatttgaagtcttgcaaagacaacatatatctgacacaaatttaggtccaatcaactatagaaactgatcataggaactgaatagataatataggcttactgctttgcggatcataggagccttggcttgatactgaagatcaatggaatcatcaggctgtaatgaaggtcctgcttccacatcatcactgattgatggtacaagataccgccgtgtaactcctgagtaccaatgcaggtactcctcataagacgatgggtcatactgctctgactctggaaatatgcgctgccggcgggcttcccattcctgaatgtactcatgatgtgtctcttcccagttctcatgttctctgccacgtcgactaatacgatgcagcgcctgtagggtaggtcgaaaaggtggtggaatggattggcgaagcccaaattgccgcatcactcgctcaggcaaatacatctcgactatcggaaaatttattagtggagcttgtgtaagccacaaatctgcatcttttgtacaaagcaatggcaagcttgaagactcaatgtgcaagtagggttcccacttcacctgatcagctcgctgcaggttcagttcatccctgtactgcttaagacagcgtgtagcattctcactttgtgtgcgcgcacctacccaacgaaagccaacaggtggcacatcctgtggaatgtctgtctctgggcacaggggagaccggaccaatggtctgccaacatgggagcgctcccagctccaaagctgcaagagaagcaatgaaccaccaatattcttgatattgtgggaggaagcaacagaacaaagagaacggtataggaaggccagcactgcagatccccagctgtatgtcccaacacgagaaagatcagcaatcaatggaagatatatcagactcatccgtcctgttccatctggaaatagcaccccacataaaaggctcaggatatatgctcgaacatgcctctccacagtctgatcatctgctccttctggtaattcatagaaatgcttcttcagccatttgtagtgcagaaaagattttccaggcattgatggtcctcttggatcatgacctagacaatcaatgaccatctgcgcataatcatgatcagtggtagaacaaactggacggccatcgataggaagagctaacaacattgctacatcttgtagtgtaactgccatctccccagaagccaagtggaaactatgagtttctggtctccaacgctcaacaagggcagtgatcaatgccttgtccaattgaggcatcttctggcaaatttgtgagagcccaagaaggccagcatccctcaaataaggacggtatctctcatgaaattttaaaggtttgtgatgtcgcaacttcaactgctccacagcctgcaaaaaacatgacctcagtggcactgcgaagtttattctgcctacaataacttgtttacttatgcaactatgacaaaacttaattgctcttggattaacctgatcaccgaagattgcatccgatcggtggttgatcttagggttgagtaatgtgttggatacatgctctgctgctgggcttacaagacaaggttgctgcgaagtgaactcgatattgtcctctttatcagaagtagtgctcggggaagaaagtgcagaggtttcatgaaagtccatatcattttctgccaaagcacttctcccacggccacggccacgaccacggcggccaccacctcctctccttgaagacatggtcttgtactgttcctgttttgaaaaattcataagaccagtcagaggaaacagcacagacgttgacagtaaaaaaaacataaacatgtgttgagaagttagacaaggcttaagccctgaagtatgcaatgtgtgtgatcattttagtagcaggtccgaagttttaagaaatgcagaggggtctctccactaacctgatcgccaaaaaaaggagaaaaggggaaaaaaaaagaaaacatggctattcctctttatgactcgcttggaaaagagaaaattcacatgaatttgacaacaatcatttcaattcgagcgttccagacgagcctacatcgagtgaacttgctatattgatctaaacatctaatgatccacatacgcatgtcacaaaccaaaacacacagtggcttccatttttaacctacgattttccagtgacaaccaatgaacagagatttgagagtgagaatctatggaaagatgacattagagaacggtacctgcacccgcgcccttgaggactaggcgcctggctctagcaaaatttgggttcgccaacggcgcgcccacggctacatcccccctgcccccctcccaccagtctggctcgccggcttgctacgcccgcggctcacccctccgccccgcgaccacggaaatccggcgggccggcggcggccgacggggagacaagctgtagatcttcgctttctgggaggggaagagtgagccctagaatctgctttcccggggaggaggcggcgaggcgtaagccgtaaccctagtcgtaacccatctgggattcactttgtgcttttgatacatcgatagcagcttcctcctgccagcacaacgacggcccatatagccataaccccagagacccatacaatgcgccgtacttgtagtcaaaacatttcttttgtattcattgaagttgagttgtggattcttagtgaaatatgtgaatattacagccgcactcaaaattccttttttggcttctagctcatactccctccgtcccataaaaaccaacctagtactggatgtgatatatcttaataaaatgaatctggacatacatctgtccagattcgttgtacttagaatatatcacgtcaagtcctagatttactttttttgggacggagggagtacgtatcttacggtgcctaggattacaaatggccagaaaagcgatgtgtagagcttcgttgtgttttttatggagattggacaaactcacataactgaagttgtgagggtgtgaggccaaacttcgatcgaggtaatattgatgcagtcgacaagaggcttcgatgcgattatgatcaaacttctgctcggagagttttggagcttgcaatgaggtgcactagccggtcctctatcaaaagaccaacaatagcagaagttgtatctgtttgagtgaaatattagccacggtgaaagagacatatacaagtagcagctatcagtacaatagtggcacgagggagacggaaaaaatggcccatagttattcatgaatgttcctgtataatcatgtgatgaataatcttgatgatgaacgattgtcaaaggtaaatgtttattgaaaacacggtgaacactatttaatgttggtgaacagtttgttggcaatgaccgtatgtattcatgcggtctaaccagggtagcccgatggtcagactagcagactctgagaaggagtcgatttcgggttgttttcgtggaatttttaaattgttttatgtttatggctctagatggtttctatttatatgtgatattatttgtgctgatatgagttaagttggtacgaacttgtacttgagttaagttggtacgaacttgtactcagatatggagtttctttgttattcatgtgcaggtgttgcttgaggacataggagtatagccagtgatggatcgggactaggcttaagaggagttaaggtcaagacggtcaaggatatcatacgggatacttaggctaaagaacaatgcacgtggagatgaaggtttccatatggcatacacgtggtgttgtgtccatatgaacagatgagataaatttggattgaagtctaagtttagaaagattggagtgtagagttgacaatgccatgaaaaagagaggacagcctactactattagtatttgggtcaagctgaaatgctagtgagtcatgcatgattaccaagctaaataaatactctcacatcacaacgaaatgttcagaaaaggaaggcacaacagttcaccatatatcacaagagaaacatgctaattacacaggagaaacatcactggatagaaggggcagagagatgtaccgttcttggtcagtttgtcctagattttggccttcacaaccttgccatcaagccagagggagtggtcctgccataccttcttgatgtcgtatgtttctcctatttccaagtacttagcttaaatgtgaaaaacctgcaattaatatataggagcaacctgaaatcagaatgcaaataactagcagtggtagtagtagtagcggcactccatcaatctcttttgtgagtgaacatggtaaattagaggtgattattaacaattggaaggtgacaggaattttgtttggaactgtactaagctatgagctttacatgtgagaactgtctgaaattacagcaactttcagtgagctatttgcttatgcaagcacaggttttcaggaagatcacaatttttttttattgttctacagaaactggacagctagcacttttgagtatcacatcaaggtattcttgtaagaaaaggatgacctcaatcttcaagtctttgatacagtgttaccattatgtatttccagtactaatacagcataagatcttgtcatgagctgtataccatctaagctatcaattttcaacagcctgtccattgttcagagaggacaaaaattttacaatagtagttcaaaattccaataaatgaatcctaaatagatgcagttaaatctgcacctctgctctgcaccttgttcattgaagcaaccaagcaagacaggggaaaacagagagagctctagacagatcaaagtatacaagtaaactggattttttttaaaaaactttctctacctctacctgatctacacgatatatatttctggtgtgtatgcatgatcaactttgcccaatcaaatgaagatatctaactctagtggacaattcaattgttattatgtgaggtagaggcaaagaaggcgccattttctctaattttcttgcaaataatacagaaaccagtccaaaaaatgattaaattgctggatgaagaactgcttttctggagaacagaaaaaaaaacaatgacgaacatgctatagaaaaactggcaagagaagctgtcctctgaaaccttgggtcatcatcaatgaggtcaattctaatgatagcacttaaattttagctgtccaacacactacaagaacaggagatactcgattgtcatataggggctttcccattgtcatactgcaagtctggtgaatgtttatttcaagcattgcacacacttgtctttctcgaatctctactgaaaatattacattctccttatgaatcttgctactcaaaagggctcgaattgatctgaaaaaacacaggttctttatggatggttgtatggcgtcatgcatgttaatattcagaatatgacaggctgaaactaactcggaagaaccccaagaatccccatcggcgacgacttgcagtgagtgcagatccaagaaagaaacacaagaaccccaagaatcacggacctggtggatgggcgggtacatggagttggtgcagacggggcactcgagcagctcgtggacactcgtcgccggcgggacgacaaggcccccaaccaccacccggacccctcctcctcctcctcctcctcctcctcctcctccccccgtgccccctgcccccctccgccgtcgacctagaggggcggacttggacgccgacgtgggaggcggcggtgtgggacgtcgacgggggaagagggataacgcaggggcgctggagaggccggcgacagagctcctaggcagcggccatggcgccgacgtgggtggtggcggcggcagcggctggagtctccgcctctcgcctctcctggggatttgccgatttgggggaatggccgaatggggctccactgggctcacccattttggatccaataatttttaaccaaaaccaaatcggtccaaaccaaaacttttaggtaccaaaccactccagcccatttgtggtggcagcccatttccccccatccggagttgctccaattaaggaaccgaatcgtttggcccatttggccccaaaccattagcaggcttacaggtacgttcttaatttggagctgagatttgtctctcgtgatagtattagcgaaggggatctgatttaatttacggtgtagtacaatcggcgggttttgattgacctgacaaacctgtcaccaccctaagtttaaagaattggaagtttctaaatggaacacaaatttgtcctgacgtacccgctcagtaactgagcaaaaccatcgccagccagaattggtttgccacaagaatagcagaatgcagctaaaaacagggtaaaaaaatactacagaagagtgttttcttaggaacgaaggaaacagggcttaggaaataatcaaatgatgacaagacagtcatcagcacccagctggtttgaattggaagtcaaacggggaatgggtaatgcgttcaaaccgtaccaaactctgtcttcaaaacttcaaccacgtcgttgatggtgaaatggtgaattgaatcaacaccagattccagattacacgggcaacagtttcattacatgaaagaagagaatgaatcaccacgttgaactgacagatattaaccatttttgaacttgcctctccctcatccggggctgttcatgtaacaaatgttaattacagattatgcacagccaagctcacatgtacaacaggggacaacgccgcatcaaaagccaagtcaaaacacaattacagagctcaattgcaaagctatggcaacaagctacaaaaactgtatggcgctggcgcgttttttgccaaaaagaatgatgtctagttatctactctcactgtgttgtactagtatgaatgaacctccccgcttgtttcagatcaccaccaagtcatgcaaagacaggttcagttcttgggcaagttgtgctgattgaccaccccgcctgcaccaacaaaatatgaaaccatcacagaatgtcaggaaagctagctccaacaaatgacgtgggtagcaaaaaaaaaatggtgcacacgaacaactgtcagcaagcttaagaaaacaacagtctgataaaggccgagtttagttccaaattatttcttcaaacttccaacttttccatcatatcgttccaatttcaaccaaacttctaattttggcgtgaactaaacacacccaaagtaaaggataaagcatctcatacagggaggggaggggaaggaaaggaattacataattaaggggtgtagaacttgctgaatcttttgcaaatggttaaaacaccgactgcaacgttgcaacctgtgtacaatacacaccagcgaagtcagcaacagtccagttcatcttgacatagacagagcaataggttataggatgctacaaacgctgcagttttttaaaacaatggttcctaactgaagtgcagggacaggacccacttgtcacctcacatccagtgtctctttgcaatttgcaggttttgcggcgtcctttaaatagcattcccttgaataaggttaatgcacgtacctctgctcagcctgaatatcaactccaactgctgaatgagctgacaatgttgaacgaataactggtccaaagatctttataagatccaacaacaattccaaagaaacaatggcatgcctacaaattgaaattaaaggcaaagtaaccataagacaaagttactactaaaccaaacattttctaatgtaggatgccaatatctccatggttttgtaaagaaaatagatccatgactttgcttgcaatagaatgaacatactaacaagaggatagacaattcaattcaacagcagcatcttgtgtctacatgtgtgcacagagcatgtgcgcttaagttactatgtatcacttggtccagtcagacaagaaccaacatgccaatatatcacctttcagccttgctggtcagtaaccccgcaagaacaggcagaaagcttaagaaaatgtctagactgaagagatcaagtttcctcttcagagtactaacaacatcagcttgaacctgtaaaaaaagagtcaaaccattagcagctaaagaatacgaagtacatgtacatccaagaataacgcacggcatcttgagaaatacttactgcattgtcgggcaactttgccactgcagcaattgctcctttgataccattttggtcaaagacatgccgcatcatctgaagacagttaacattaatatcatatgctgatggagtgatggctatgatatatgcaacttttactagttttcaaatgctttcctcactgactattccccactctccacttgtaggataattagtagatggtgggaaaagtgcatgtcaatgcataatttgcatacaggtgtagatcactctcatcttatatcaggctatcagaaataatggagctgattaattttagggtgttgctggattgatcaacaatcttcactagagctgacttcaccttcaatttagaggtgtgtacacaccaattgtctttaagaaaatgccaataaatcatttaacgcaagtatcaaagaaaaaggtaatgttcaattctaagttgtctaattgtactcaatagactaacaacaataggccattttccctgtactgaatagcctaaagaacacagaagagcttcttttttgggaatacgcaaggagcgcatctttgtattaagaaggaataaatgtatgcataaagcgggccaaaaagacaaagcgaaggggacagggcacaggagaagaaccaagaaacaaaagcctaatctccaactaaattttgcgacccttctctactaacatgagctaccaaagcagggattgcagctctagctagccgccacagctccgcttcacccgtcataacccttacaacctccgcccaagatctgctcttctggttgaagactcgattgtttctttccttccagatcgtccatgcaaccaacgtcgcgatggtgtcgaaaccccggcgatgttccttgaccatcctcttgcgacagtcgcacaaccatgagaggaacgagtgttcattgatcggtaagcactccgaatgcccgatagctctgagcgcaacccaccacagttgccgcgactccgggcatgcgaccaagagatgatcaatcgtctcttcgcattgatcacacagaacacatcgatccgggtgcgacaaaccacgactccggaggcggtatgttgtccaacaacggttaagagctaccaaccaaaggaagtagcgacagcgagggggcgccaaagattgccaaattggcttgtgctggagacgagttcttccaaaaaagagaacacaataagccgagcgggaagagtattctcccgaggtctcccaccgccaagatagagagtccggctcttcggaaagctgcactgaccgaaggcaatcccaaagcttgaaatactctaggatcgcttgaatacccaacgccgaactggatgtcctggatccatcttctatcagtcattgcctcggccaccgtgcgatgattccggagacgagcagggactgcagcatagacagccggtgctagcgacagaagagcttcttcatatgtataatctatcatgcaaaggtatgcaagattggttccctgtttattggatacaaaaggtcaaggaaggaattctatggtgcacatgagctggtaacaaacaggagtctgcaagtaaaagatcagagacaagacacacctctaactttgtcagccgagattttacggcatttataaattcatcatggctctgcatcaaatcgattggaatcattgcttcatcaattgttgacaagtccttctcatatgcctgacttggttctgcctgtccattacaaccattgcaaaatataatgatttgagtaatggaaaaattcgtaaatgctagagagcatgaacaaataaaaatggagcaaaggtaaagtcatatttttctatcccatattctgattttatttctgaaaatactccaatctcccagaagtacttaagtccacaaaacattacattatgatttatgacaatctggtttctaacaatactttatcccttctatttctatctccaaatagcatgtacttcgcagtaaggggaaaaacgaatacagaaatttacattgtataatatgcaagaataagtatgtatgacatgtggttttattccttgacagaatctgctcgttggtggatgagaggacgacggcggtggctaccctagagcagcgatggaagcaccaacccttcacaagagctcggacgtcgtgctatagggtcgaccaacgggcgcggagtccgtttctgcctctctagtcctcacgccgtcaacaacctaggccgacaagagcacgatttttcctgcctcctcaccgtcgccgccagccatctcgtcgtgtgtccccaagtcctactgctgcgcctactcaatgtcctctgctgcgatggtggcgtcgcacctgtcatcatcgttgtcgtgctcaggcatcctacgccttctccaccgcaaaggccaccgtgccgcttgcccacttggttgacctgctctagctcctgttccacacgtccgtcttcactattatcctctcctactgccttgtccttctgcccctatcatgtgcaccctctgtgctaccaaccggcccgccttctcccactgcccctttctgccattgctgccatcgggaaggatactcccctcccaataccatcagtaacttaggacgaggctgctaacttggatagagagggttgcttgttcgtcggcgctagaggggagaaggtggcaacgagcaacaatgaactgaggagctgggcagtgtatcggtaggggtaagaggagggagaagaaagagagatgccactgacatgtgggcaccacatactaactcaggcagtttgatcaggtcaaagagccctgccagcgaaaattgcccccaaatcgaccgagggaagcaaactacaccggttttaatatttaagggtcaagatatatgatataacgttgagggaaacgacttagattggagctatatttgagggagtcaaagtgcacttatttctaacgggaagatgagtacagtgtgttaaaactgaggccgatggttatggcccggatctagtatgggccagaacgggccgttcagcgtagggggtttaacgggaaaaagtatactttaactccctcaactatcgcccgagtatgattcatgtcctccaaccacaaaactgggtatatcaaccactccaactatcaaaaccggtgcaaacaatgtccctcagtggttttggctgacgtggcgcttacgtgtcattcttgaccgaacctttgtcctacgtgctgcttacgtggcattagaataaaaacagaaataaaagaaatatgtgggacccatatatcattcacacaaaaaaagtattgtgggatccaatgacatgtgggacccacatgtcatcctcccactcccttcttcctccccctctatctcccttcttcaattgcatacaccccttgcacctctcccacactcacttgagctttgtgttcatccgcttagtgtgtttgagggttgttctagccaagagtcaagtacattgcttccactgtagagctagtgtggcacttgatcatctccgagccgggtcatcgcttattactcttggaggttgccgtctactagacggcttgtggaggtgttgcccggtgacctctccgaggagattgtggaggaggcccagcgccggtttgtgagtggtttggagttcaccactttcggagtgaaggaagaactacccctagtgatcgaggcttagatagtcctctccttgggccagctcccaccttgcccaccccttgacgaaggaggcgtgcggtggcttcgtggttgagcggtggagttgggctcgcctcaacggggattaggaaaccggcgagtttccgaacctcggtgaaaaactccttgtctcttgtctcatttatttgttgcatttacatttgtgtaatttacattcatagagacatatttgagcacatatcaccctaggattgcaaaacttaacttaggtgtattttactttcctagagatatacttgagccactatcactctaggattgcaaaacataacttagttgctttgttagacttatccctcaccaagcctagcaacttatgttagttttgattaggtgtcatttagttttaaatcgtctattcaccctcctctagtcaacatctcgatcctacacgtgcgctgagggaggagctcccggccgtccccgcgcgggtgaggagctcgctgtcgtctgcgcgcgggggaggagctcgacgccgtccgcgcgcgtaggaggagctcaacaccatcttgccggtgcccatcggcatctcgagcagcgcgtggccgcgcgtgtcgagggcgcgctttagctcacccatgtatcgcggccgccgctgctcccgctccctaccgccgtccccaccgccactgccaccgctaccgcccccgcccgctgccgccgccgctccccaccgccatccccaccaaagagaaatgccgagggaaagagagagataagggagagagagaaagggaggaggaagaagggaaggagagggaggatgacatgtgggtcccacatgtcagtgggtctcacgatactttatttgtgtgagtgacatatgggtcccacatatttctttttattttttgtttttattctaatgtcacataagcgccacgtaggaaaaaggctcggtcaaaaccgccacataggcggcatgtcatccaaaaccacatcagttttaatagtggttggaggacatgaatcatactcggggatagttgagggagttaagtatactttttccgggtttaacatgatgtttcgccttctcggtccagcggcccagtttagaagaacgcgctccgacgggaaaacgagataccccactggggccgtttcgtcttgttctcgctccctcctcgcgccgctagtccggcaaatcgaccgatgtttgcaggcctgcagccgcctagcgttgccggaagagggcatcgcgatgagccatcctccccacctgacccagccccctctcctcgctaccttccctccctccgctggaagcgcgagatatcaaagtcggatttatcctttggccactagctaggtcctagtcctacgatttgggatctgatgcacgccaagcgttcggagctcagccaacaccgtccaaagctctcacgaggaggccccgggagcggcggattgatgaactctccacttctccaggctccaggtacaaaccaacacttttgtggctttctgcttgtacgcattgcctgatgaattctgtcaacacattccacgcgtacatgtctgaaacggcattcatcagactagaagacaatggagatcggatcaactcctgaaatttctaatatattgaagggatgatatttgaacattacaagctcttggcacactaaccaccaccaccacacacttcccacaatggcatgttactttctgaatcacaaaagaaagcaacagaaacagccatacatagcttcaggtagccttagcctaagctcacaatctcacattactcaacctcatagaaacttcaagcttactaccaaaactagtggcctcctcatacttacagaagaggtttatatatctttcgaccacaatcactaagagattcagaacaacatcagactgacaatgctaacaatgccaagcagcagcccaatacttgccttcaacccagcagctccattcaagccccagacgcgcacatcatcgatcactggcccacagagcgagctgtggtcgtcgcttctcgtgttgtaatacacgctgtagaacgccactcgcgtcctctcagctcgtgctgtgaatgtcacattcgcagcctggcttgtggcattacccatgggcgagtagtggaagttctgggcctggtcacctgcgaatgccatgacagccattggtggctggcatgaatcccctgctgagcccaatgtgaatgtcaggctgtactctttctgaggggttgtctcgaccatctgtgagatgatgccttccttccctgatagaagctcaatggcgcgcttcccttggggaatggtgtactggtcagagtcgacaaagcggacagctcgatttgactcaatcatccagccaggcaaggcagacgtctgctcatcgaggttggttgggagaagcaccccaaagctcgtgtttggaaacatccatggaccctcctcaaagtctccattcgacaccacattatctgttgaaagaagacaacaccaagtgatgacttacgaaccatacacatgagaaatgaactagagcacctctagctctcttaagacatcctgtaaggatatacactctactaggtatagagataagcagaactgtcataccctttggtttgtctggagtgaagagcttctttatggcaacgttgtcaaggataggcccacaagtcggatcatcctccataccagggttcctgaactcaaggctcgcctgctcatctgttgcctgaaaagccagtgcatatgcatcccagccttctatgttgtacaatgtctgcaggtccactgtctgtgatgcaccaccgagcacagacacattgagtgactctagctgtgcacacgttcaggcagcactgaacgtgatagcatactctgagcccttctcaacctgcaccacctgccctatacttgcatcgtttccaagacgtacagcatgatcccctgacatgaaaatccaaatattaaacacatcgaatacaaatcaatggtgcaatttgattgatcagaggacagaaggagaaaagctctgtaggataccctgtggaacaataagaatcatgccaccctggtgctggcctgctgagatgagctcgactgtcccattgatcgtccagccagggatcgatgatgcaccctcagcaactgaagcagatttgacaaaaccaccagctggtgctgtctcaaagtcaccattgctgagcaagcctgttgtgcaaagagatcacttgttcatgtaagtgccaaggtcaatttagtaacagatctccgaaagtaacacggctgcaatccaagatcaagaggcagaaaatatgtttctcaagaactctacttaatatctacccatgttatatgcgaaagtgttcccatgcaagtgaagccaagtacatctatgcaagtctgcaatgcaataaaaccataactattttaagttgtgtagctctagcctattgtaggataggacgaaccataaatctgatcccccactgaacctagtacactgtgcgctggactatctttgttatggcatatataaaataatgtacaactcagactgagggtgcgtttagttcacgccaaaattgaaagtttgattgaaattggaacgatgtgatggaaaagttggaagtttgaagaaaaagttgggaactaaaccaggcctcaattgaatggcactatacaactccaatcaaatgcataacagtgacaaaaaaaaacatttcagataaaaacttaaacctttctaatcaaacatgtgtaacaagtgaaatgaaccatcacagtagagtttgaggaagttcatttccaagactggtttttcttataagtgacttcccaagcttgtttttttatggctaccttcccagttgaaagcatggttgcacagataaactgtaccataattaaatctcctgtacaaaaaattaacagctaaaacctctaattcagtactataggagagaaaacatgtccatgtttttctattgtacatccaatgcatttcattggggcactgcgggtaggccactttactgtgcttcaatgtccttacaaggacagccatgtgactatgcacgacgatattatgtggtgaaagtgaaacatccaccaaccctaccctatccaccatcccaccatggagagccccatgcagtggtccagactccagagctgcccatgtccggaggaaatcaccacggcccgtagcgtaattctggggaggttaaggtacgaaaaattaaagagacaggcatggaccctcacggccatccttttaataagccatttgacctttttactggacggttcattgaacacgtttgcaggacactggctcactggtttctgctgctgtgctgttcggcctggatccaagtttactactacgccacatttcattttgactttcatgcaacttcgtccttgcatagaggttcatagtacctcctttggacaagataggaaactgaaactctttcagttacaagcctgaagattttctgaatctttcaagtggttttgttagcagcattctgcacccaacagaatgtctctctcatcatacaggacagctcacttgggggtttttagtcattttcaaacataaaattgcatgattcatagaaaaggaataattttataaagatatatacatgcagactactaaactcgaaggcaagtaaggaataggggggggggggggtattaagcaggtataaatatttttatccaattaatgtacttaaaagaagtggttagtggttacactggtcactgcaaaaaactacagtcgcaggaaagctttggaacaaattgcagtataactgatcagtttttggctgtccagacttcaataacaggacaggtttggataattggtatgaataaatgttatctcaacctccaagggccaaggctccttcctactttctaggacctttactttgcaggtatactgaaccatgctctacaaaaagagaaaaaaaaaagaagggggggactatcacactccttcctcacgagtgcaaccacatctcttgattcctagggcacaaagctaacttcttggcatgctttaccacaccattttcctaggggattatttttctcttctcctacccacccttcaaatttctcctcagtgctatgtatatgtgctaatgaactccgcatttgttatacaaatgtgggatgcggagaggtactaaatcgcatgatttctctatttgctgagatctgtgatgcagaaaactacccatccccacaaactccagccaaatattccacaaatatgtcaaaatactgccttggatcctccagcatcaaaagaacagcagcactactgatcctccagcaagggcaagaaacagaaacgatcgaagagacagcaaagcataccatcctccaccgcagcggccgaggccagatgggagggcgccagcagaagcaggcccaggcacagccccagcaatgcgagcctcctcgccgtatctccctccatctcctcctcctagccgcctcgagctctcgcctcctccttcccccctcgccgaggaagaagaacagtggagagagtgagccgaagtacagtgtgtgtgcagctgaccgagtgagcgagccgagccagccctactcactgggctggaggcagctctctgctcacgccctgctttttatgggactccgatggcgattcccttttcctttggcactttgctggccacccccattattctatttttctcgcaggcctggcctgtggggtctgaaaggaaaggaaggaggagcagtgaccactgaatggtgagaatgccgtcgatggtcaatactctagaggtcaccctgccttttgcttttttttcgcagcgttttggtagcactttttgtcgagcaccaaaaagaggcgccgctgccacttcacggaaacacgactgcagtatagtagaacttgcctgtgtagtgtagttgtgttctgcccccagtagggcagtagtggagcctgacccaaaatctcaagggttcctagagctcctctaattttttgccccatgtaatgatacctccgaatgatttcaattaagcaagttgaatctgtacagcacaggcttgctgtgttcagttcatgtctactccagctccagctgtcatatgtcagctaactactgactatgactacacatttcagcggagcaaattttggatgaaatctgaacagctgtgacgagttggtgttttaattctttaatttactgaagtactactacctagcagtagttcatttaccgaaaatgatatgcccgtcctttgtgttattgtgtatctctgagactctgacagcattgggctgcagagaatgtgtttttcaggaaaagaatgtggctggtaccgtaggagtatgtatttgtgccagttggcagcaggatttgttttctatcttcttttggaagaacttgttgtttttgggtctataacttgtgttaaattgtcattgccctttttgatgttacattaccatggctgtgtttagatccaaagtttggatccaaacttcagtcattttccatcacatcaacatgtcatatacatacaactgctccaatttcaatcaaaatccaaactttggatccaactaaacacagcccatgtgaagctgtcaacatttcatacatgaccatgatgtacaatgatgttccacagacaggccacctcattttttttaatttagaattgttttaattcatttaagtctttgagatttgagaccatgcataaggctagtggcccacaacttctcaaatttcccaacaatataatttctatacgctttaaaaaatcatattaatctatttttcaagtttttttagctaatacttaattaatcatgtgctagcccttgcttcattttacgtgttgggagggaaggggtctgaacacctagctaggttcgaacacaccaagtttgtatcagtgttcacctcttcgatttaatattagattccgaacacggtgatatgattttctttggccaaaatttgataaattttgattaatttcggttgaattttaccacttcaaattcaaattatcaaaaactattcaaaatttcacttataacctactttcatcctgcatcgaaacagcgtagttttcgaccagttttggttgaaaatagcctcggtgatcatttatcctgcttcgcccgtagagcgaacgctgaacttcccctctcagaatattgtccacacgtcgggcgtgggagcggtgaagcacgcacggaagcagccaggccaaggctacgtgacagcaacggggtgccgtgttgccgaggcaggccaccaaagccagtagggccctgatgattagcaacaaaagcgggtgcctgccgtgtgggctgccctgcatccatcggtcggtccatcgccctccgtccccatccccaccgtcaccgaagcgacgcgacgcgacgcgactgctgcttgggatttgattagttgtgttgagagatggccacaccgcaactgctgctacgccgcgccttctcctcctccttcctctcctccccattccgccgcccgccactccaccccgcccgctccttcgttcccccccgcgccgccatggcatcctccgccgcgccgttccacatggtccagatccagcgcgacgacacggtcagtcactctcactccactcacactacgctcgcccaatcagtccccccctccctagggttttgggttttcccgtttcccactgtttttatttaggaaatatatgttcggcccgcttcgttgcggtttagctcccgcttcttgtgattcccccccccccccccattttttagagaatcatccatgcttcttgtggtcgaggaggtgatctttgagacatgaatatattcgtttttagaactcactttgccgctttttccccgccttcccgcattggctttacctttaaccctttctccgctaattagatggcacataatgctattgagtcatgacaaatagttctggctgtcatgaatttggtggatactcggtatgcgttgagattgttgtgtcgttatgtggagtaatacaacgattaatccattcgtttccggttttcttttgcctaatacggaaaccgtttgcatccttttccttgtattaatttctatggtatatacatagaattgatcgaagtattgcagacgcgaacttgctagtacggttttacagtgccaacgatttcacctggactattccagatgtttcagcttatctgtgccttttcatatattcacttgattattctgtccatacagcttacctgaggttgttatttgttggtaagaatgtgcattagccttgtacgaagtaggtacccaatttctctccaaccagaaaattgtaaatgtgggacacttttaaaatttctcctaatctaagatcagttagctacttagctcaatgaactaaattggctggaaagacagcttgctataaatatgtggtgattggtgaaaataaaaaaagatgatgtcactgaggcattagtcaaatttatgtgagttttggaggcatatgccatcacttgatgctctgatgctcccactttcctctaatcaccgagtaagcattacttccttcgatatacaatgcatactgtattaaacttcattactgcagtatgacagcggacataacctactatagtagtaattgtaaataaactaccatctcaaaaaaatgtactttgtaaactagggcatatcacagccataactgaacaaaaagaagtgccaatattttttttcttgatttcttgcaagctaatattaagattctgcaaccttcactctacatcatgagaattgctctttatatcgtaacggtcgcagtgtgacactaagtcaatagtacttgtacatgatactatctttttctctgtagtaaactggtaatgtggtttactcataaattaatctaatgctaatctgcagacttttgatgcctatgttgttggaaaagagaatgctcctggaattgttgttttgcaagagtggtggggggttgactatgagatcaagaatcatgctgtccacatttcccaaattggtgaaggatacagagctctcattccagagtaagatcatatcttgtggttctttattttgcaagaatttcctcatttgtcacaaagttaaaatggcataatcacattttccagagagtttgtgtgctctttttctgttgagtttgatgcaaatcagttcatttgccacaatagagccacctctcctgcttctcccgagaatgaccattgtgggtgacacttcatcgtcttcaacgcatgcgctgactccagccatcatcacgccatgccagctactgttgcatccccccatgctggctccaatgtcgcctttggttaggagctaggagagagggaaggaaggtggaggaacaatatgggaaaggaggcagatggctgggcatgggagctcattctcgggagaagcaagagaggtggctggagcttacacataattgttgtgcatgtcattgtggcacatgagaaaattcccattcaactcttgtaaatttgagcatgccactcaacttctttgcacacagcaaattttcattcttcagcaataattagcatcacgtattcaaaaacaaagttctaggaatggatgcttcataaatcttaatacttagcatttcgtttctcagccaagaaacttgtttaccaacgtgcctttttcttcagtttgtatcgtggtaaggttgctcttgatgtagcggaagctcagcatctgatggaaggtctagactggccgggtgcggtcaaggatattcaggcttcagttaaatggctcaaggcaaatggatcacccaaggtagggctcgtatttgttcttgtttcattgttttctcatgttttctgtactactgaaattatatctccgtccaccatccaaatattttcagatgccatgacatatttacccaactaactcgtaactaattatttctgtttgctgactgaacttcactggtagattaaaaagaactagagagttaaaaatgcagcatttgtatcttgttacgtgcttactttagatagaggtacctcgggcagaaatttcagcaatagcaattgattggtttgagtaacagggagacagaagaagtaagagcattgttgcagtgataagttgtgctgatggagagggaaggagatttcttaactcttactttccataatggcaggtgtatagtctttaaaggaactggccctaacaaatgttatttagagatgacttagtaaccagaagataaacatcgtaactgtcagattcttggttacagaaaataaacctaggtatattccttgatttcctacatatgccttttcatgggaagtaactaatcatggggatagattactcagctgagttggttgcttgccatgtgcctaacttgctgcaccttttaggggtgtacacatgatgtattgacatattatcctaattgatggatgaaacctagcaaaaaaaaaaaattgtctacattctgatgaaaccatgcagaatgtaatgaattgcattatgataacttatattcctccatgtaggttggtgttactggatattgcatgggaggcgctttgtcaattgcaagtggagtttcagtcccagaggttgatgctgttgtggctttctatgggacaccaccttctgagcttgccgatgcttccaaggcccaggctcccatccaggctcattttggggagcttgacagttttgttggatttgcagatgtcacggtaagaccacctctcatatgttttgtctattttgctatgtattgacattatgcttggggcaacttgtttaaatttcacattcatatactagtatcggcattgttgaatagttaccttttttgttcaaggaagggcttgattccatacaatttatctgcctagaatgatgtacattggactagagaatgattagagtctacttatagatgctcaattgagcattttgacctgaaaaatctaatattattaataggggcacttattaatataatgtttcaggcagccaagtcgctggaggagaagctcaagtcatctggcgtgccacatgaagtccacatctaccctggctgctcgcatgcttttatgaacacatcacctgaggccgtcaagaggaggaaggagatgggtctgactgatgagaaccaggcagcaattgacctggcctggtctcgcttctcgacttggatgggtcgtttccttggatcggcgtgagccatttacgcatatatgttgtcaacctgtcaggttgtatgaataaaatcattcaggccagatgcagagtaattaagtatacccaaaccaaataattgtgctgtgttggactatgtgaacatgccatgctttggtttgcgaattatctgtggttttactgtgctttcgagattgcatatatattctgcgttggcctcaatttcttgaatatctgccgcagggagcgggatttgattgtgaaactcggctcaagtagaatccagcgatgaactagggtcgagaacggatcctgccgaaaattcaaagagttcctataaaatttataaggaactttgttagcaaagaatatttttgaaaaaaaaaattcaatttccattcagtttgtgaaccgcacagtcaaaagaaaacaatttacaaggaaagaggctttccttccttaaaagtaaaggaataagttcactttagatctcttatattgagatcgagtttgaatcatgttcttaatcataataacaaatataagtgtctcttgtcttataatactagagtaccaaggtgtgagagcagtattatgcctagttttagctgatttaacgggctaactattgtgcctagtttcagctgacatggcgagctaagttagtatgagacgcatgtggatcttatatgtcatggcctgcacaactcgcaccttaccgtcctcccttgtgatctcttctgttactatttctatacatttgttgttgacattgatctccctcgtactgaagatatatctgacggcaatttatattacacataaattaaataaagttgtttgggtttgcagatactatataattattgcgtcaaagcggaatggacaaacatctgttcctactgaaacatgtaactccacgctctaattactaacagtggaacaggaattggcaaaattaaccaaaagtaagaggtattctggtgtcagtttgtagtaagataataaagcaaaagaaggaacaggtggcagtgaagttaccgtaacacatggttgggacctgcagattttgtcacgctcattaccgcaccgcatgattagaaacaaagagggcaattcgtgtccaaactgcttactccacaaggccacctaattaattcccaacgcttcccgtgtctatgataccatcacttcttgcatcgatcgtgcatagccaagttccccgttctaaactccaacaacatctagatttttcctcgatttctgtttgcacgttttttaaactgctaaatggtatatttcatgtgaaaactttctatataaaagttactataaaaatcaaataaatccattttcaatttttaataattaaaactttattaaccatatgctaatgatttatctcttgttacgtgcacacttaattttcatcctataatcagattcgaacggggccttaatttgcatgcctcccctcatgttctatcaggaaaattgtaaaattcaagcaggctggaaagaggcaggatgaaggaatgcaagggaacagctagctccaaaacatagtggaactggaaggtgtgattgctttcatagaaaaatcgggaaaaaaaagtggaatggaaggtggcgtgcagtgtgctgaagagtgatgcgcttttaaatagtcaaactaatacgtcgtcgatcaaccccacgacacgtggaactgcttgccaactaggtgggcccgtggtatggcttcaagagctacactcgcaagttctccattcacgctgatgattgggacccacgtggacatgtcagcgcatacctatgcaaacgcacgtcgtttagaatctcgtggtgtatatttccgcttatgtagagcggattttaggttttttcatcgaagtttattttttagcctttgcttttagatcgctaaaatcatctatataaaagttttatttataaattacttttcgtttgtaaatatgtcgtttggcttattctacgaataagcgaaacaatagggctgttggttaatgaagccaagccttacattttttttattatgttattttcgattgaccaaatattccaacaattttccatttcttattatttcggtcagcatgcctatcaccattacagtgtacttgtcaaacgtaataggagcgaaggactagctagaaacggaaacagatctcttgactttatgcagattgcagttgtgccantgacatgtaggccatataaaagnggggtnganatatnagtggnacaactgcaaactacacaacgttagggatgtaaaatcaaaggtatttttgattattattctgtgatgaataattgggcattggagattattagttttgttatttggaatttattcacgaagtggttttggagatgattggagttcacaggtgaatctacaggaaatcgctgttatttcatgtgaccggtcagaccgggcaggtgttgccggtcagactggcggtgatcgagcagtcggaccggctagcccacggtctgaccggccgactctgtgtcggtttcggtttcgggttgtttgtttggatatccgtgattatttcatgattatggcttctagatggatactatacgtatgtaatactgttgtttgctactaatgagtcaagttggagatagcttggtctcggaatatggtttctttgtttatttcatgtgtaggtgactcgatgcctcgggagagtatttgcggtgatggaccgggagtcggcttggggataagacgacgtctgtggtggtcagagatcatgcgggatacttaggctagagttgatgcacgtggttgatagagattccatatggcatacgatggagttattgtgtgcgtatgggatgcggagtcgaatttggaaggagtccaaacttggtacgattggttatgtaaagtttctttcttatactagagggtttcctaaggtgtttaggactcgtagtatgggtttggttcgtgcctttaggctgcctacctcaggatataaatagagggggagcgtgaggcttcccggtatcacttttgtatcgcttttgagagtatttgagttgagttttgagttagggttttgagtttagtcgaaatttttgtaaggagtgcagttggtgcactttgtaaacacagagagaatcaataaagtcgtcatccactttaagagttcttcgatttgtgtttcaccgggtctcagcggtctaaccggcgatataccggtggtcagaccggcggcacgcggcggtcagaccgatggcatacgggtggtcagaccagcggcggcggcaacaggcgcggcaggaattccagggcggtcaaaccgggagatctacaccggtcagaccggcggctacgcttcggtcagaccggctaatctactctggtcagaccgatctccatcgatttcgagagtaacttttatttcagctaaaagtttttggtttttgggtataccaaccattcaccccctttggttagcttagttcttgctattcgattctacaggggagtctcatccgccaggaacatatctagaaaagcacaacataatgacagcagaagggccttaaaagagaatgtgttcagcatcctcaggcataccacaaagtttacatatgtgattccccctcttcagtttatcttgacctattgtacaacagactggactctatcataccaagctaggaagtgtttaattttaaatgtttggggcttccaaacatcccgtatcatcatcagctattccctagaaagtcagacatatataaggtcttattcgataaattctcaaaagagaggaattgaaggggattgagggataattctaaaccacaataggtattgaattaatccccttcaaatcatcttcaattctcttgtaaaaggattaaccgaacaagatctaaagtggtttggttgaataagattttactttttgttaaagtctagcagagctatctctaccaggataggccttagcacctctcaagtgtacctcacctacaaggatcttatgttcattacttatttggaggagtttacaacagaggaatttgataggacaaatatctctccagataccatgcctaaaaagaatgtactcccccattccccacaaacaactgtaattctcgccaaagccactctttcatagcatgtaatcctttctgaaactgagaaactctaccattacctgtctaaagaaaaaacctctctctaacatatactctatgcttactatctctaagcaagagctggaatcctaaagcttcaagagtttcattgtccattgtccatttagcttggtgaaaaatattcattttgctggacgctactaaacccaaatctccatatataatcttttggtctagccaaagcagaccatttcaccaaccggcacattatatcatctttaacaccagtccaaaaattcacgatttcttgatgccttccaatattgcacccctctggtaatatactataccctgcttaatttcgttgactattccgatggcacacggttttgctagcaatctgggctgttctttcctagctgctggttttgtctggcaacatgagtgtacactattatatagtgtgacaattacctcaattcttcctatatatatatagaggaacacctattgattggactatcttaaacacacaatgtagtatgtcagtgcttgttggaagactggagagaagcaaagtggcaaagtggcattgtatggtcgctacctaccatgactaattattcagttatgttttctcttagaaaagatacaaagaaaaataagtccttacaccaactatttctccgccttcaataagcttggagctttttttttttattggaataagcttggacctttggtattatttgcaaatgaatgtggaacaaatacacatccatccatttaattcgccttctgtttgtcggaagagtcaatagagataaaagccatatgatttagtgcattttcatcttaaaagaaaatatgcatatgaagttaaattaggagttcttaacccattgatcattttctaagaaatggtatgctttttccccaaaaaggctatttgcagcataggtacgacaaatcaactataattttcacaaaattttagctggatacatgagattttatatgtgtaagttgaagctggaaaaacaaatttcactgtacaatttaatttttttatttcagatttcttctccgaggaatctattactttctctcaatatcaagtttagacttggttatttttagataagcatgatcttaattattttctgtgttaaaaagatgataaaaaaaatctcacaaacctaggccttgtgagccagcttgggcatatggatgaaatagcgaggttctgaacttctgatcatattgtttttcatgcaggcacccagatgtgattcgctgatgcaatgcaacctccattcagccagtcgagatcagttagaaccacgaagcaagacacgaagcaagtagatgcattgttcaccacgggcgcgttgcgctgaagatatcaaaaggcacggtacatggagaacgctgcttgctcagcatgtcatgcagcacattacctctatattcccctgactagccgatgagaaaatgaggccctccaactcccgacgcctctcatgcctagcttgagatatctatgccacattgccagagatgcagattgttgagttgcaagtgtaggactggcatttgcgaacatcttgaactggcacttgtgtaggactgactaccatatcccaaacagctgtatatgtatcttcagctgcttcttgtaatggtcttgctagcaatcacctccgtcctccggttgttggttgcaatgaaatactcctatttggaaaccatgatcgcactaatttattacaactaaagggtggccatttaagattttgtacatggagatatggaggtatgaggcgaattttgtcgatatagttaaaagaccctgaatagcattcacacacggttcagaaccttcatgaatgattgtttgattttgtgtatgtatgtgatatgccgtcataaaaaaaaattacgtgcatcatatctttttaaggatgtgcctatccatcagttgacaagcacgggtcactgacaaaatcgcaagggtagatattcaagtggttttgccccgaaaagaaaaggaccctttaatttgggctatttttaataggaaattagataaaatatataacactcaccctttcgagataataggctcctatctgttggaaataggactgcaacttctgcagtcctcaagctcacataaacaagatgaatacacaaactaataaactggtattatgttctcgcataggagtatgtctcatgatcttacaaattaaagcactaacctatttacatgggacatcaagtcattttaatcaatacgctaattaaacaactgacccagtactaccgacttaacaccacatggacagtgaagatctacggcatggtgtcctcccctgttcacacctctcagcttgtgagcttgtcacaaaattaagatttgacgactggctatgctcaataccctttgattacttactcccgagatatatacaaatgtgcatcttgccttaccattttattagctaaattaaatggctgaaaatgttatttgattaataagtaaattatttctggttaaatggaaccaacgagaagtttagccagaaagaaataatgatgtaaaattatcattgaccgtaagatggccggcacgatttttggccggcttaggaagtggtgggccacattattattttttaagcccgccatttatgttttatttatttccaaaaattcatttatgaactttcttagccatttaaaattgctggaaaattatggtcaattatttgaacacttagaaaattatttctagttaaatggaaccaacgggaagtttagctagaaagaaattaatgatatgatattatatttgaccaacgttaatatgatttcatgtcaatatttattaagattattatttctttaagccatttaatttatttctagttgaatgggaattcaactagaaagtatattatgatttcatgtcaacatcactatgatggtcatttccttattaacttaattatttatagtcgaatggaaccaacgagaaattcgattagaaagcattaagatgtgaagttatatttaacccacgttattataattgcatgtcaattataattttgttcctttcttatttctacccaatggtgatataattaaggaattaattttaagattattcataattatttatgaccaatggtgctttgactatgaaattctaagtttattttgcatatgattgattaagccatggtaaactaattatatgcaattatcaatgcttattatcagttgcaatactgagtaaattatttctagattaatggaaccaacgggaagtttatctagaaagaaaggtgatttcattaagattgttatttccttaattatttctgcccaatggtgatgtaattaaggaaaaaatctaaatatcgtcaatcattattttcttcgtcattttagccttaatggtgatatgacttagaatcttatttatgccattagtgctttatttcctttatcacttttaccttacagtgatgtgatcaaggatctctaattcgtcactaagcttaattcctttaccatttctgcccaagggtgatatggctaaggattttaatttcgtgtcatttactaatggcattatgccctatatcatatctacctacttatggtaatttgatttaggattttaatttcagtaattcatgataacattattcctctaaattctctgtcatttcataatcttttctaccctatggtgtttgattatgaaaatttgagttttatttgtatgtgattaattaagtcaacggaaattaattgcatgcattactaatgtttaattaataattaattttctcagcattaggacagcttaaggctattcagcttcttgatggatcaaattacgttgagtggagaaataatgtgtttattaacttagccataagagaggatccgcccgaggaacctcaaccggctgaagaactcaatataattggggaagaatatgataatctcatgtgggcctacaataagaagttagccaactgggagaagtccaatagaatgtgcttaatttatgtcaggggtgccatctctccagaagttattggagaaatcattgactctaatgacattaagacgtatctggcaaacattgaagaaagttttgaatttgcacctgagactcatgccaatacgcttgtaagtgagatgatcactagtcattatgatggcaaaagtggtataaggaagcacatccttgagatgactcatatggaaaatcaactcagatccatggatatggaaatatctgatggatttttagtgcacctcatcatgagatctctaggtcttaactatgatccattcaaaataaattataatacccagaaagagaagtggaccatacaagaactgatctcacactcagtggaagaggaagagcgccaaagggctgaaaagcagaagataaaagaccagctcaacctcactaatgcctttgataaaggcaagaaggtctatcaaggggaatcctctaataagaatagcgagccagagggcaagtagaagtaaggcgagccgcaagctcagagtaactgatggagtgaagggttgttggagacctcacacttagtttctccaacagttgcaataatatcttatttgttcaccccattaagagaaaccttattaattatttaaagtcatgtgagaaacgggtcatgtccgttatttttccaaacagaacatgttatattaagcgtgataataaagtgattggtcttgcccttgtgcacgacaatcatatttgttctttggatgactatgtgactattataataattgcatgtaatgacaaaagatgagacgtcattgaaattgtgacattgtaattgatgtcacatttctaggggaggttggaacgtctcataagttggagagattctttcccttggattgattttaattacgttatttaagctttaagggaaaaattcacgaagttaagaaattagtcaacaagcgaatacttttggttatgtttaccccataaggctatgtttactcataagagacctccgatttcctttaagaaatttaagatactaatgctaaaatcaaatgaagttatgagatcgaattatggtggtaaacactaaataaagcttgttcaccttataagacattaaaaataagcgttcatccaaatggtttttgaaccatgtaagaataaattgagattgatgaacaaaacaaagaatttagtagaagtttctaaatgagtcaaaatagtaggccatttaagtgggttaataaaattttggctgactctaatggaaatttcgaacaattcaagtgaggtgaacaacttcatgaaaattaatggtgggaatttcattcaccggtactctatactaatgacattttattgtcaagcaatgcatattgctgatagaaactaaagaaaatttttcatgaaaatttttttggtctaaaggagtactgggcttatatcagtaagttataaattaaataaataatttgagagaattgagttaaagttagtcaagctgaaattaaattataaagataataatttatgattcagctgacagttagctcaaatctggatgcatacagatttggcatacatttcttactaggaatcttgacagtatttaaatccagactagaccactggtattaagaatgctttgtattatttgcaaggcaactttaagtaacatgctcatatttctaaaagtctatttgtcggtgaaatgggtccgggggtacgcatcgtgaggggaggcggcttccccgtccggcacgtggctgtacggccggccccttccctgcctcccccgggggggggggaggtcagggggttggaggcccgccgagggaccctcggggggccacgtcaccctcccctcgggcccgtaagggccacgtcacacccctcaggcccgtcgagcgagccaccccaaggagggtcacccgaccgctgcgtggccggatgagccacgaagcaagaggcgccttgagggccttaattgcgcggcgccccaaccgtcccgcgccgcattaaatgagacgtggggggagggggggacgtgcggcgccgcacgattgacgcccgtcaatcagccctgaccagtcggtcggtggctgattggatgggcggcggtgcccccacgccccgtcctgtgttaggcggagtgggggcaggtatgacccgtcccatcagaccagggtcgagtgcgcccccctgcaaaagggcgcatccaccgaagtctctcggcatttaagagggaatggcagggatgtcccctacgacggactgaggacggcgctgggccccgcctaagaatgggcgaatgccttgcgtccggttgaaggcacggttggcagttagatccaggttaagtgggccgccttccggagaaggagtagataggggcgctgcatgtggtatccccttaaactataaaaggaggacctcgccatggggaaagagagagaaaaaaagaagagggtgcttgtaacgtccagagataatcccaaacataggagtagggcattacgtcttttagcggcccaaacctttataatccctagtttccagtttttcctcgggctaaaggaagcggctcccgatcctcgcgcccttctccccggccgaactcacaaaggggggtctcacgatcacccgctagagaggagctctcctcgacactatttgatctcaaaattttagagacatttggacacttattttgtgagatgtgtggatatttataaagattattaagctaatttagattaagctatatccacacataggggagcaataaccatggaaaagctccaaaataatctcttactgcatagtcgacgatgcaattagatttttaaagcatgttatgattaatcatatatttaagaatttttcccagaactaagagtggtaaatagcgctcataaaccactcaaaaggtgtaaaccacccaaaattatactgtgctataagttgtgcactaattaaacactgttttctattctagtagcagcatgttgtgtgttttcttcctaacacattgatatggttgtgaaagacatgtcccaggatcaaattattaagctaagcatttgctcatggatccatactctaaaggctcataaaattaataaacatttgctcatggatccatactctaaaggctcataaaattaagattaattaagattacgttctggccagtacatatgtaaattagagccttactaagatcctggatgagggggacttaatttttcaatcaacacccactaagttaagcttgagtttatttgagtactatagtgagctattgttaacgaccaaatttggtaatatgagtatcggagatgaagatcaaacagaagcggaatctaagacaagaatcgttacgaaaacagagcaagaatcggctaagtccgaattggttgcgaccttaatcggcagagttcgagtcggacaaggttaaccgattgagccgattttgacaatacgactcggtatacgttatcgggtcgagttgaagtgcttcatatggattgccatacacggattgagtcctaaggaggcaattttatctattaattaggatattttatgtaaattccttagagataagtttgggcaaaagtctgccgcaaagacttatggtatcttagagtttgttagagataagagtcgtgtccgacaaggacatattttgtaatctcgggtataaatagaccccgagccccatgtaataagataactcacgttcaacaacaatttcagcgcatcgccacccttttacgttcgttttgtttcgatgagttcttgctttcgggttgagctggatcagtttcgatcttcaactagaggtaaaacttgttatggcggcttgcgttctcaggattagtgcttccatttttatgatactctaattttgttcatgtaagttgtcgagttatcatatatcttatataatctctgacaatatcgctgtctaaccttcaatcggctaatatctatcattagtgggtagccgattaggttaaatattgacgttggcttagattatataggatatctaccattccataaagcttccaatagcttgattgtctacatattgtctttcttttcatacttatggctgcatcagttgagtttggtctcataagtcgtgtttagaactatagtctctagcctgcttcttggttgttgagtagagtagcatcggagtttcagccaatcttacctgatttagctttatgtcttatgtgctcaattgttatgctagatctgccctttgtgttaagatcctattgcatttaggtgtattaagctctctgtttgatatattttacttgctttaatatcttaatatagagtggtgtcggagtattagccggtgcacgctagatctatctgatcggctatgctgtgaacatctataatctcatcgttaatatatattttgatctaagtgatttatactgtctcggcatggcgaccgatccatcccaatcacttgatttaagtatatatcgacataaagattatgtgctgttaacatctacagccgatcgagtagatttagtttcaattcacttatttacaactgccgatcgattcacatatgacatcggctcaaagataaatgatatgtcatcggtggctggccgatcggctatcatttatggatttaactacagtttctttgtctctatttcttgttgattgcaggatcaaatcaactggcacgctcatgaacctaaaaggcaagattttggacctgcactggagttaagcagatctcccaggcctcgtgtttttcgcatcaacacacttttggcatgcccagtgggaccacgagtgttaacgacttcttcccgttggcccaaaaactaccaccgtcaccagggacaggagtcaaacctcccgttgctaaaacaggagctgcaaatccatcaactaaagtgaatcccagcaacatagttccagtcacattggataagctgacagctgaacaaaggggtgagcttgagcaaatgatgagcagcatgaaggatcaattcatgaattcttttcaagaaacccgcagaggcacaatcgtccataagtacaagctgaaggtagttgcagccgatgaggttggctcaagctcttctccaggtcatgcaggtaccgtggctggctcaggcgacaaaggtgatgttcctaaagatggtgcagttgaagatcttggtgaagatggcgaccaagagcgtttacagtttaataactttcaagactggatcgactatgccgtgcaacatgctctgatcaaccaatctggagtgctagttaatactttgacaaacatggtgaagtctgtggtcgatggcacgatagctgagcatcaaactacagggccagtttatttaccaggaggtgttttcccgaactatcggccttcgatcacaggaaatcaacagggtgtttctagtgtaccaccaatccagccgatggcaccagtttcaactactgcaccagctgcgtcatcatcggcacaaagacaggtggtcaatcctagattgttgaccagagaacaaccacaacatgctgggcgaaatgccaatcggctgactcaggaacaggttgctgcaatgtttctaccaaatccacaaacagctgacccagtacagtcaatgctgaatcagcaaacgccgccaagacagcaaacggttcagccgattcaacagcaaaacttgcaacatgtatcggctaggttgagaacacctgataatcggctaaggcagcatgctgcaaatcaattggttcctgagcacttggtccataatgtacaggccgatcagtcagcaatacctcaagttgttcctgaacatttggtgcgtaacattcagccaaatttcaagaattatcaaggaggtaatttaaattatcaatataagccttcgtcaccttatgttcagtaccagcaaacaggatcgcctcaaccccaatttgctcctcagtttaatcagttcgagccgatgtagcaacaaacgcaaggagtacctcagcagaggccatgggctgatatgattgtagatgtgatgagggagcagtttgggctcaaaccaaaggacactggaaacttgtatcggcatccttaccctgaatggtttgaaagggtttcattgcctagccgatacaaagtgccggacttctcaaaattcttaggacaagacaatgtttcaacttatgaacatgttagccgattcttggctcaatgtggtgaggcatcggctgttgacgccttgagggttaggttgtttcttttgtctttgtctggatcggcattcacgtcgttttcttctctgccatataattctgtcaatagttgggccgatctggaaaaacagtttcatagctatttctacagtggagtgcaagagatgaaactgtccgatttgacaacaatcaagcaaagacatgatgagtctgtgcaagattacatccagaggcttagggagatgaggaataggtgttacagcttgtctttgacagattcccagctagccgatctggcttttcaagggttgatagcaccaatcaaggagaagttttcatctcaggacattgaaagcctatcacatcttgcacagaaggtgaccttacatgagcaaaggtttgctgaagctaaaaagaatttcaagaagatcaatcatgtatatccctatatgtatgattctgaagagcatgatgattccgaagtagcggcaaccgaatgggtcaggagcaagaaagtcataccatgccaatgggtgaggagctctaggaaaagaggagatgtttgactttgatattactaatgtgtaacatcctgaaaattctcaacaataaaaatcactaaaattttgaactttttaaaacttttgcatcatgctggttgttatgattcctattgcttgccaaaccataaatgatcaccaagaaagtaaagaaaagaactacatttaagcaatagatataatttacgagaatatatttaatcttacaaataattatgcacaagatattaaaagcaaataaaagaaaagttattataaacctattttatcaaatatgaaaatatttgaataatgtaggtgtgtgccataatatgagtacacatgaaatgatgatccttcaaataaactgagctctctgtatatataatagaattatgggagtatttaattcgatatgtagatcgatattgcaccaagttcctaattgcatttagggattgaaatttaatatattaaacccctctatataaaataaactaacatatagataaattgagctaatgtgctaatgtgttaataacagtctcattaggaaattatagaatctttaataaaacttaaatttggacaatattaatttgaatataaatttcgatgaaataacttagacgcggtgtatttttacattgtgacaaaattagtggcaacagtatatttttcctaattgcaaagtaccctctaaaatcaaaaatagttggctagcactgttcattagcccctaggtgttcgatttggtttctagccatcccagctctctttctccccactgctgcgccaccctagccggcctcgagccccgcccgcaccggcaccatcgctgtcgtgtcaccatcaccgcgccgcgtcgccgtcgcctcactctgccatcaccgccgcgcgccgttttgtcgccattgccgtcggcctaccacgctgctgccgtgcgccaactcgcgccctgcgccgccgcgtcatgtcgcgtcgccgtcgccgcgccgtctccaacccgccgcgtgctgtcgccgtcgccgtcggctgcgccgcgccgagccccgcaccgctcgtgtcaccgtcgccgtcaccagcgccgcgccgagccccgcaccagtcgcgtcgccgtcgccgtcgcatcagtgcctcgcgccctgtgcgccgctgccgcgccatcacgtcgccgtgtgtcgtcgtcaccgccttgagccccgcgcgccatcacgtcgcccttgagccctgcgcgccatcatgtcgccctcgagccccgcgcgccatcatgtcgtcctcgagcccagtgcgccgtccgtcgcgtcgaccattaagccacccttcccacaccctataaataccccccttccatcttccttcctccccacacaccttggctgccatcacaaggcctagccccatctctgcctctttctctttctcacacacatttcatcgaacacctagcgtgcttgcgggatcttcttctctactccacccccgcgacatcgaacttcgtcgttcctccatccctcggtaagtcctcgctcctctggcctcccctagttctgtagaaagtatagtcccctttaatttcgccaattagcaaccgtcgccgtgccggtccggccaccgttctgccgccggtgagctcgccgtggacaagccatcccggagctcctcctctccatctagtgagtaaaatggaacccccacactccgtagatgctcacgccctcgtcaatttggttggaacttagccctagcgccctatccccttgcaacccgagctcggccatggtggccatgctgcgccgctcgacctcactccgccgcgcgtcgccaacggtggagggatgtcgcccgagttccgccgcaccttccctggccaccgccgtgccggcctcgcgccgtcgtggttgcgcccagccgcgccccgcgatgcctccctctctctggcgagaggtagaagacgactcccggctgagtcgctgacaggccgggcctgctcctcctattttcctttagaaaattaatcccgtgaaaaagaaaatcaaagctttgaccccacatgtcagcagctgttagggataaggatatatttcggattaaaaataaatgaattaagaacagtgccttttcacaatttctcggatttattcaaatttgaatctttaaactagcgtaacttgctcattttagctctgattcgagtgaaacatgaatctaaattcatctaaaatcataatctttcaaatggtatataattcactatttaataaaatatatttataattataaaatagttaataccaagaaattagataatagtcaatttaaaaatgtgctaataaataaaattgatattgtactgtaaagtagatgtcaaataattgtctttaacatgctttatcactgtaaaacccatgtaaactaattaaaagcattgtttcaaattaattaaagcataggaaatgctagtgccatttattaatatatgtccatatataattatacccatgacgtccaaaatatataaataatgtttagcctcatattttgtgactaaaatatgaacacgcatggatcagtccttagcttatttgtgaggaataataacagaccaattataaataaaccaccaaaatgaagttgattaatagcatagggaatagcatatagttgatttggttagcatccaattattgcccgaacagtaaatcactcatggatccactttgatcacatatacggtatatcttgtagtaaataataattaatcaataaatgatccaatattaagacattgtgcacacacataatgtacatcccgttatagctatacggtacagtattaatttgcgtgttgcatatattaaattagagggagtttatgacaaacatgtatattggataaatactagttataaattttgacctcatataatccaagttcaattgtaaattaggattattcattgtaaaattatgtgatgggatagtccgtaaccataatatgattaacctaaatatttctaacatacaaagcatgggtaattgttaaccttttataatttattttgacaactaaaatatgtacataattagaataaagcctccatcaataaaataataatacaaatgattcacagtaattatttgaccaatccaaaatccatccggcaacagaacctctactgtataaccgttctatttagatagatgcatatatagccatttgctagactaaaccacatattagccaaatatgtatcccataaatgctatgttggttaactcctaaaaagaccatgatgacaacataaagattaagaaaccttagttcttagcttgattagaatccattagcaaacacgagtagtatgagcaaccctaggttcgaccccaacaactatattttgtttgtacatatttgattgttgtttgaatattggtttttctcgcgtattatagaatttgtatatcggttagtcatgaggcaacatatgctgcttccaggaggtgaaggttgatcaagattgtatcaagaataaggactatcctgagcaggcaagtcatcactattctttgtacatgttgatcccaattgcgaaattgttttgtttactaataaaattgcatgcaatgatgaacatcctacttgtgattatgccatgccttgattattgtttacccttaaatccttgtaaccatgatttacgtataagtccctagtcaactatgacaaatgcttagaaatgctactctagatttatgcatactcatatttatcaaatgctatatgcttgggcaattacctttgggaaggtaattgagatgcggcatgtggagacatgagcgccacattgccatgatattgatgacatgatttgtgaaaggaaaatgaaactaaacaaatgttttcgactggggcggatggaggatttgggtggtatccggaaaaaggctagtgccgtccctggtcaattaaggaccgagccatgaagttaagcatgaaacgacccccgtacaaccgtacttctcgaatgggtatagacctagcggagtagatagctgagcggaggcagtatccatgcatagtggtttcttgatgtgtgaggcaggggctctacggtggggcagccattggtaggaccgcggggcatgtgtctacagtggtgtcgccatcggtaggactgccatgtgagaatctaaacataattataaattaatgcatgtgtgagtcttcccttcccgggtgcgccagaactcctctcactgctagaaaccgtgtacgcctagagtgtatgaggatgtaaagttcatggagcgggtactgccaatgcgaggttatcgaaaagctttgccgtgacgcgtcttatgtgttgggacgaggctcatgtgttgggcagtcgcggagtgcgggtaaagtgtacatccactgcagtgtgagtaaaccaaatctattcgaatagccgtgctcacggttattgagcaccggttcatgtattacacttggctagactctaaattcttaacttgtttgggatgggatattgcatgattatttttatgctgatggagccacttcctgagaggagggaaggtggacgtcctcagaaaaccatgacgactcaatggcgggaagctatccctgggatcacaatggatggtggacagaaccatcgttgtttaatgtgaacactggtactaaaatttgatcagtctatgctaggtcttaggcttgtgaaaagatttgcaaaacttgctttgcgcaaaggaacctgaagccattccttgaaatactctctatcatatgcatcattgctgtggtggattgctgagtacggttgttactcacccttgctatttatatatcttttaggagagtgttgaagagaagcccttgttagtacgcttgcgtacttgacaagatgatcggagtgcggtcttgttctaggtctcgttccccagtcgactgcctgtggcatgttaaccgggcccttgtattattttgtcgtccgctgttgttctctgatagttgttggcctacctggctctaatgtaagtatttaactcttttagcttgaattcattcatgatatgttgtgattcaactatg

SEQ ID NO: 7189 - DNA, 118315 bp, Oryza sativa
  unsure (1)..(118315): unsure at all n locations
cacccaaggtgccgccgacagggtagtcatgttgctagcggccaagctcgccgaggccgtgctcgtcaagaatttcgagcaaggtgagtggtccgtcgcggacaagctggccatttcgttgctgctcaccgcactacgcctcttcgtgtccaagtacagccgttttccgtacttcacgaggccgaagtcgacgccgccgccgccttcctccggtggccgcgaaatcaagcccgtcaacctgcagccggtgttcctcgtggaatgctcccaagcgatgctcgcgtcgctgctccgagcgcggccgctctgcggcgagcgactccgagaggcgcgcgccaccgccgagcgcgccctcgccgacgccgaggcggagggcgacgacctcgcggcggtcgacgtcaacctcctcctcgccttcctcgccgccagggacggggacttcgacgacgcgctgcggcggtacaaggcggccgtgcagaaagacccgtcggactcccagccgtacgagctcgccgcggcgctctgcgccatcaacggcgacgccgcggagtcagaggcgtggcggcgagacggcaagcagcacggccgcgctactgtcgctgtcgccgtcgccgagcttgagctgccagccctcctcgacgagctggtggtcgcggcggcgctcggctccgggattctgacgaccctcgacctcgagcgtgggggacgacggcgcctcgtgttggtcgccgcgtggagggaggtggacgcaaggctcgcggcggcggtgctggacgacgacctgacattgccggagcgcgtgcagctccgcctgctccgccgtttgctgcgcggcgagacgcagctattgctggacactgccagccatggactgatgaagaactccacgcgtgagagtgactgaagtttcaggcttgtcttctcgcttattcttacgtttatcagctaaattttaaaattttcattttagatttgattttaggattcttttatcgtattttattttttagccttggattctaaactgccaaaaatatgtatataaaaattttatttataaattatgtttcatttgcaaatacgtcagtttggtttgattggccgttggtgacttggtgccatacttaactgccatctttctagctcaaaattgtttttttttcttttatggctgcagaattgggaacgcgctggacatcttgattcgtgtctacattgttggggaagaggatgggaagttaagacagtgagaaataaaggtggatcagtatgagaatttgatttttagtctcaatttcttttaaattagcggtgggaactgggaagtgatacaagggcaatcataaccctccatttaggatggtgtctatggtattaactacattcacatgtaggacttttaacttatgtgtcactatattaattaagagagagagagagtgaagagagaaagaaactgggtctcatgcaagatacagtttcaacacgagaacatatgcactagacactatcaagttttgcattgggagaaaatagtgtcttcatagtagatgaagaataaatatgattggtaaagaagagagatgatgtatttattaatgacccactttaagaaatcatgggttgtgaagtgtagtttccattgtaatgtcttattgatatgtcaccatagacactgtttatggacactatgggttgagactgccctaagttggtacttcttcaatttgcttgtcgttctccatatgttacaaattaaatcgttgtggcaatttacatcgctaccgtattaataacataacaataatctttttaaggcaagtattaaaatttccagtgatgagtacaaatagtagtatggatgcattgattatgggtaagaaggaaagtatacatctcggaaaatgttttggagtatgagaacgaaaagtactttcaccaaaattttaaatgctagagcgataagaaaattgaaacagaggttgtatggagctaggggtggaaacgaggcgagccgagccaggctcggctcggctcgtggaagctcgcgaaatgccaggctcggcttggctcggctcggctctccaaccgagctgtacattaggctcggctcggctcgtggtctggctcgagccggctcgagctggctcgtgagctttgcaatagcagcagttgtattgccagcagcagttgtgttgctttgcaatgacttggttattcagataataactctcaagtccctacaaagataattaagtatattatatgcagccaacatataacaaattgatgggcttttttggttttcagccagaagtctttctattcaaaccgagcctactaagctcgtgagctgctcgcgagctggctcgggctcggctcggttcacaaacgagctaaaacccaggctcgggctcggctcgttcaggattcgagccgagccgagccaggcgagcccgagccgagcttgagccgagttcacgagcccgagctatttgtccagccctatatggagctttgatagaaactatatctttgagaaaacagatgtttgagattggtctagacaacctaaagaggagcggctacatcggttctcctaataagtaaatgacaaagccaaaatttcaattttcaaacttaattttaaaattgattttaagatatttcaacgtagtttctttttcagcattggcttttaagtcgctaagaacacatataaaaagttttacctataaattgatttttcctccattcctaaggacccctaaatcttatgctgtacagatttgggttcaaccgttgtaggcgagttgtctggacatgcatgacttgtttgccgttggatagtttccaagcatgcagcttttgccgactttcaactactggtggataattcattgcaactaataaaagccaattgaaacgcagcacacatgccacacatcacaaaacgcatgcaacccgacggttacagggattgagaaactagttgaatagacagctccagtacagaccataatggtcatcatgaacaaacagcagcaatgaatgacttaaacacccaaatgcaaagggtccgtctgtgaagattagttagtaaattgttcccttccaacaaaaaaagttaataatctacagccataataccaggatggatcatgttatcgtttcagtatcagccatccaacaaacatagcctacagaatcaatgtattcatgagaatatcaacagcgtcagctgcaagtacatctatctataaagcaccataaatagcagcaaactattacaaaactgctaccatacgaaaactatgttagatggcatagtaaataacaagatgttaaacaactccaaagtgaaaaccacgtcaaaacgagtatgaaactgctgcagcagcacgaccaatgagtgagttgggcaggctttgcctcttgccatgcttccaaccaagtgtgctttgcattccatgcacccacagacaggcctcggtgttacagcaacagccaggtgccgcttaatggcaacataatgcaggagacgggagatccatggagaaacacaagtcttgtagatcaagagctctaatcaggatacagtggccactgggcacagatgattcaacgaaattcagttataaacctcagcattgcatgcatttcgcacctaaccttctaaaggatctttttcagccactaaacactttacagccctccccctcctataacaaatacaacctatacccagactgacaaagggaaggggataagaagataactaaaggcaacaaaagttttgcagtacaagaaccttcatgactacattgtgagcatccaaacaatgaaggctattattgtccatttccaacaagccagatcaagacaagaagataatccccataaagaaattgtccttctctggaggaaagcatttatagttgccaacaaaatgcaccatttcatatgtccaaaacaggaggggggactgtattgtgatactgcaaaatagtataaaatactaagtaaatctcagagcatgtacactaataacagtgattgacactaccaaattcttaagcagatgcgctacttgagcaaaacaagaaaacggtatttaactaataacatggcaaggagcagtagtactgacaatctcagcggagaaacgaatgactaatgaatctccccatcttctccaagttcaccatcttcaaggtcatcacgtgtgccatttctgcgggagctatctcgatcctttttgtgtcttttgtgccgattttcactatcagagtccgaagcatgggtatgctgcattaatagcattcataaaatcattacatgttctaactaagtttactcaatcagataaacaaccatgtgatttacaaaactgatttcctgctgaatacaaatatcaaacatgcaagagagatataaggtatagttgattagaaagtcaaaactttgtagattttgacccccaaaaaagtagttagtcaaattacaagtaaatttgcagtaagaaggttataccaaaagattcatcaagatgccaatagattcatattacatagtgctttcaaacaatagggagcactttaacaagattattgctggtacaagggctagagacaagatttctggttgaatacaaatatcatatactttatgcaagagatttacaaggcatagttgatttacaaagtcaaattttgtagattgtgacaaaaaaaagttggtcaaattataagtaaattcataaggtattttttatttatacttatcaaactttacagctttgtttggggggtgggggtggccaaaatacaaagtgcatttctttacctactgaaaaatactgtacaaaggttataccaatagattcatatttcaaagtgctttcacacagtagggatcaattaacaagatttaaggacatcctatgacattgctaataaagtaagcagcccatctaatattattagttcgaaggtggtatatatggcagtgttactttttgcttgaacatcctaaacccaattctcccatttcaccaataaaaattacagtattaaaataccaaattactttttggtagaaagcatgaagtgatggcaatgtcagcttgtaacggttcaccaaaagctgtgacagacatgtttgcagtgtcctacagccactatggcttttacaaacaaaagacgacttaaattttagcacaaacaaaatcatccaccaatgagtccaaataacatcacaagacaaaggcaaagcacagtctttcagttcaataaaagttggtaaacgtatatcagcactaatatttggtgagggtggaaggtactcctcaagggatggtggcaatgtctgctgatatatttagcactaaactggtagtttttattatcctagtaccggggcctgtatgcatgatacagtgccatatcagcaccaaatcgccaatacttagaagcttgatttgcacgaaagcacaaatgttataccttccttgatttcttgcgatcactgctatgtctacgagactttttagagtcatccttctcatccctttcagagctcacatcatctgcagtgtcatggtggtgtctcttatgcttcttttccttgtccttttctcttttcttgtcttttgagccatggctatctgcatcaacagcatcaatatccatctcatctttcctcgaccgatcctttcctttgtccttttctctttctttctccttgtctctttctttttctttgcgttctttctccttcttttctttctctttcctccgttctttctcttcacgttccttctcttttcttgcctgaatagaagatacaaattcaggcgaaaaaaacataagtcaatgctacacctgacaaagaaacagatgctgctgatacaacatacaagtaacgatgtttcaaccatgttatacacattctgacaccttcaagaaatgcaggtaaacaatatatcatatgataaaacagccatcagtacattaccttttcttcctccctcaagcgctctttctcttttaacctttctttcaagtggacaacgcactcttcgaaaagctctctagagtatgtttcgctgtccaatgccctaatgcaaaaaatagtataaaatcattcaaaacccaggtaagacataaataacataaaagtatgacagaaaacagtcaagcaaattcagtcattcaaggaacatgtattttgcaaaggaagctcagttaaaatctgattcaggcaattcagtaattcactgccttgcttgccatgtttgtgaacagatacaaaaaccattatttatagagaactgatttgccatacttactgcattggacacaaattttttttatgtgtgagctataaattgtattgagtaacaatgtaacatacagttagcacaagagaatctaggtcctaaaattctgcaatatgaattaaattatatataaaatggatgtgccacagtactctgattacaacatctcaagacttcaacgcaaacttttcttcgacccatcgttactatggccattcatcacgacaaggcgacccagcactctttatgatctaggcagaagggtgtacacagggtgcgaacgtacacaacaaaagaaagaagagagcaagaaaatgagaaaatatatgggtcaacaatgcgttcagcaagtcaccacattagcttcgtacacttaagtcagcggaagagcctatttaaagcccaccaattctttttcctcagctgccctagcatagtagaggtgcaatacgtactcctccctctcccatacagagtagcccctccttccctcttgtgcaataagctataatgtggtttgtgcagatccatggcaggatggaagcaccaccacgcagggtgagtttccactctcatttccctcactccttgcccacaagatggagccacaaaagttcctggatcacgaggaatggagtccatcttttggaacgcccttgcccacaagatggagtcacaaaagttcctgaatcacgaggaatggagtccatcttttggaacgctggttaagaatgcgggtcgagaacaaatgtttttgggacgacatccacgatgtacattcggaatgagagaagattggagaagacagagcatgacaaggcgtggaatcgaccaatgaactcgagcgatgctctgcttgcacaagagggccagacgttctcctatcactatctctttatgttgtgaactaggccaaatgggctagcgtggctcattaacatgttaaccacttaatcatatctgagaacctctgttctcttctcccacatagcccgcagcttgcgccctccttagccaccaacatcagtgcccccattgcgcgaccacctcttgggcgacaagacaacgcaagcctcggccaacgctatcaccagcccctcgtgcaagtcgattcgagggcatcgactgcacccctgtcaccatccatttctctcttctccacctctcccttcccctcttcagtttgttccccatctaatggctgaggcaacgccatggagacttcatagaccaagcagcgaccaattgacgcccccatccatttctctcttgtccactcccttcccctcttcagtttgttccccatctaatggctgaggcaacgccatggagacttcatagaccaagcagcgaccaattgacgcccgggacgatgatcaggcaacgacccatccacgatctatgatgcgtcacgacgacgtggaatgtgggctcgtcccgcagaccaggtttcttaggccttgccttgtggcttcagcgtcatctaaacgacaccttgaaatacatggatctaccaattctgattgcttccccccacaaaattgcaagattgaacccacgtatcctatttaccaccaggttgaacacaagtatcctatttacggaactaacttccttccagctggcaaagccagtacaccaaccagtttagtataaccaggaggcatggtaaacatttgtcacaatacagtaattttcagaggattgcccttacttgtactcttggctatcttcgaatagtgctttagaatcatcccatgttgaagaagctgatatttcctgcatttttttcaaagaaatatacatcagtacaaaaaagatcaatctcaaaagtgtagtctcgtgactagtctaactgactctatagataatactgaactatttgcccatgctgttgcacctggtgtaaagcaaagtgcattcatgaatgtaggttccacatgcaaccatttctcctaatgtcctccaataaagctttaacaaagtgccaaattcgtatgcctttacgatttgaaatgaatgtctatccatgatttatcaatatgcaacaaaagtaaaacaagatggacttctttattttggccagtttctgtgaccacattgcacacaattagaactatactagataaccttgctgtcacctttagaccaattttactgtacataaagtgggtaaccctaattcaattatcaattcctcaaaccattgcaagtcacagctataggaaatcatcaacaaaattagttctgacctaaaagctttcaagaatcatatttagtgagccataaaagctcatgattcatgcactccaacaacaccagtagtatttatggttccaactcatcaactatttttctatgcaaaaacataaataataccacatctgtgaattataaaagaatgttaccaataactaacaacttagttcaatgagtaccaaagtgcagccacttttccatgatatctttcaactacacacttcgaatttgattaccagttaccaaatacagttcattgccatgctaccaatcatccatataatttttaaaaaggaactacattgtaaattgattttatcagtactatatatgcaacaaaagtataaataaatgaataaaatagaaggcatttatggatcatgtcggcagcccaaaagtcttccaggctgttaaatagttctacactgctatgttaactttgtcctgaaaattgctggactttggataagcataacaggacaattcaatgtaggtaatcagcaatcaataggcatgatgtacaacaaattacagagtgtcataccttgattgagtacaaaagatctgagaaattttcacccagacgctggcgcttctttgcttcctttacctccttttccctgagcctttcaacttgatcatcaaaaataagctgcagcagatccagcaaagataagtaacaatatcgacaaaaattcttatcagtcctacaactgaacatggaaattgttaccgcaagaacagcatcaataatacacatatattatcatcttcatcaaacataatcaaattttcagggtgacaaaacaataataccttcatgtttatgtttgttattcctttcaaagtatcatcctccgtaacagcagtttcgaaatcctctagtgtccatgaagtcgtcataggaatctaaacaaaattaccttgtcagccagatggcaaactaatttctacaggtaaaacttacctatggagcaagcttgtaaaataaaaggtacctttccagacttcactgcttctttaattcgggctttgtcatcttgatactgagataaaaggatggtaggtacataagttcatgcataacaaaaaataacagatattccagaatttaaatggtgattgtgatgagatgaaaatattgtagactcgtgcttttttgtgacatgatggaaataaaatttgttattgtgttttacaaagcatgagaatggatagaattaacatctttcagcaggaccaagatgtaggtttttgccatagttgctggccacctctattcactacagattttacttgccatgataattgcaattccaaattcaggcatagaggcaactatagcacattgatgacttaatacattggataagcaagagtatactacgaattttaaaggccaacctgtttctcaagctcctccattacatcttcaaacagatcttttggcattgaaccacttatgttcgaggccacagccaagtacacagaggaatctttaacctgtaaatcgataattttatgaatcaagaaaaaaaatgttgtcattttaatcgtatttataaaaggtcgatttcaatgacctgggcacagtaatcacgccaacgagtttttgcagtaagcattccttcagctacatgttcttccaacatcttgcgaaattcatcacgatttttgcgctcttgcctccttacttgttcctgacagaattgacttatattaaacatccatagtggttcaagacatcgaacaaaaaaaaaagaagtgaacgttatgtgaccaaaaaaaccttatgtatccgcttgtgctcttcctcttctttctccagatcccttatatactcctggattgcacagaaatgcatagttgaagcacaaaataaagaaagtcactgcagatctaaaaaaatactaacttggaaaatctccagtcgatcgatcttttcaagtcgggaacagcgttcatcatcctcaagacgttcttgaacttttctccactgggtacttgtctgcagcacagaaatatatatgtttctcattgatgaagctgtttgcatactaattgactaaacagttaataggagtagtaatgaaacaacctttatgaattcacatgactcgagaaaagctctatattctgctatgtgccttttgtgctcttcagcagccctggctctttcctataacaggatgatcgtagatacttagatcttgatccatacagtcaagtcatgccagaaaaatctctagttttgttcttagacatactaaaaaaactaagaaattgcagaataagattcccaaaagtgtattctacaaacagataagcccaacaccaattaaaatttaaaaggggaacagaatttctataagacagaaccttcttctgtagttccataagatagctctcaaataagtcttcacgctcccttggacgctcaacagcactaaaccgttcatcatcctcaaacatagttattgctttactgcataacattgaacacgaacaaacataaggcatcctccagcacccccacaaaaagttacaatgtaaacagcaactagaaactaacagtttggtaaacaaaattgcatcgaactatcacaggactgttattatgtatgaatagaagcttgaagtcagtggcgcatacctccatcttgttgatgaagtaagctccttagattcctaaaacacatagcagaaagtaaaatagtcagtatagtcaagacaaatgagtattagtaagggacataacatgagttagatatcttacttctagcatagctaaaaaatcatcacgtgccttccgctgtttgatacgtctttcttctgcttcaagctttttcctctggtttagatactgcaaaaacaaataggcctggcttcagtgaaccactaagtgaagaataaaacaatgcaatagaagacttcaacattccatgtaattgctaagacagattctagctcgtacaacaaagagctaacctcattaaaagcttgcttcctctccccaagagttttgagggcaccataccttttgtcatttatgatgaccctcatagcctagacatattatatcagtgtcaagcaattcattaactgatatcgattcaagtaaagttacatacctgatcccatgtccaatcagactcaacatttgatgattcaagcagagctttgaacgcatttttagcttcctataagtcaaaagaaaagtgtacctatatgagcttaaaacttgaaatgcacagtcaattcttaatatgtgcaagtttcccttaccaacttattagcataggtcacaggttcttcttcactagttttgtcttctactggagtaacattgatcttccctggaactgccatggtctttttggcctcctacagagaatataagcagcataaatgtacaggtatacacatataaacacatacatacagacagacacacaaacacacaaacacgagagtgagatatatcaaatgcaaatgtgtaggcacttagaagagcacaactgtgaccgtcggcatagcccaaccctaagtaggcctaaatttcttctaaggaattaaactcaaattgacatgcttctgtcaccactcactattccctacgtcccaaaatatagctacccttgtagttcactgagggagtaggcaggatgatttccttatcccaactcacgctaaccccagaaaaaatatccaagacttgaaatgaaagaataaagatgtagcaaatgatatttctctatttggagtaaatttcacaaaattacagatatattgaccaagctatcgtaaaactatagatttaatactaaatttatcacaaaactacagatttaaggtggagtattgcaaaactacagatttagtaacaaagttatcacaaaactacaagtttagcgcatatttaatcacaaaacttggacgtttataactcaaacataacattagtattaaggatttaaaccataaaatctttagttttgtgacaattttattattaaacctgtagttttgcgatacttagtcttaaacctgtagttttgtgataaatttattgttaaatctgtagttttgtgatatatatcaccttaaatcaatagttttgcgataatttggacaaagtatctgtagttttgtgaaattttgcatattttcttttcgtattaaacaaagcatacatatccatgtaaggaaaaaaatcagtgtttgcttccatccgaattgagtcacaccttgggatttgtattacagcaattcttgtacaattgtccaccctaacatacgttccaagtaagaagtagcatgtatcatggcaatattgcacaggatggtgataatagatattttcaactgaaaattcaccagtgtgggaataatgctcagactattaagctacttaacatgtagaatatatccaatcaatcctaggaatcacagataaacgatactgttacggcaatacggggatacgaaatttttgaaaaatgtggatacagcaagtatacacatatttcaaagcaggaaaaatatggagatgatatgatattgagattacattgttaaaattacaagcaatggcatgagaaaataagtggtacatttttcttacaatctcatactttattaggttcttaaatgactattgactcccatagaagtatcggtgttaccagagtacaggatttatcagacgtaagttcacagtaattttgaaggaccagaacatatgtttcacattaattttgaagcaccaaaccagcttgagctatcctaggggatctttagtttctttcacgagattacttgttcagataagattttgtttctttcaaatatttgagattaaataagactgttagtgcttctctcatctcttttcatgaggatttggcacagttttgaaatcaatgaaagacaagctaatctatcgcctaactcccattttctctagtgtctactctcccctgcccatcattcaacaacatagctccaggcagaagaggtcataactcaattatcatacacttgcaaatattaagaactcaaactataagtctagaaccctgtgagaggacaccacatgtacctccaattcttcagcagatgctccattttgagtgtcagcagtgctagctagagatgggtattcgttattggctctgaacaaatcatataacaactatattagcaacatttaagtggtgactggtgaggaagcattgagtaaaccatcgacagttacctgctaatccctgcatcacttgcaactgatggaatttctgtgcttataacaggagtaacaacggtacttggaccaccattttgcatggcagtattagatgaactggaggtgttctccatattgtgcgaagggccagcaccaggaggaacagagttcgctgctgcatcaagtgtacttggagcacccataatcgttgtggaggactggttagcaggtacagaagaaggttccacagagtttgaagtgggtccagaaggagcaccagcagttgtttccgtttcttgatcagggcgtggatttgacgccttctctgctaattcacgcgcaatctaaaagggaagaaaaaattgtttatagatatacaacaatattcaataaacaaatataaaatcaaacatcaaagaaggctgggaaacctttaactcatctggaatcgtccatttggattgctttgtcaccttattgtaatagtacctggaatgacagaataataagaaccggcaagaaagtgatttgtttaacttcatacagatgtgatagcatgtgttccatcaagaacttactttcgaccctcttgtgtagtaaattctttccattcagtagaggcatcagctctctgttacatcaaaaaataaataattaagaacacgtaacttttagcatagcaaagatgcagaatcaaagataaagttgaagttgtaatacgctaaacgttccatacatcatttcagtaagaaactaagaacatgcattgtcctctcgtggaaagagtaaagagttcattctggaaatagaagtagtcaatatagtgatgaattccaattcaccccctttagactttcaagatggtccaaattgaataagcccctcaactttaaaatccagtgcagtttacaacctgatggtggaattggtagtagcaataccaatccaaatggtggctatatcagacaagtcagcaaaagcccataagccatgaaaggaagtcattgcacatattcaggaaattcatgtaaaaataaacacaaatctctctttgactattcctcctatatctctcctctttctattagatggattaccaattaatttagcaacttaaacttaacaagaccaagatgccatgtatgtgaccaacatgacagttgcttaggaaaccacaaccgaagagtgtttagtacttcctttcaaagtggagatgagtcagtaagcagttttgtagtgcgtgttaggatatggactattgtaaagtagatggaagtagaacagaccattccataaattttaagagatagacagaacaccctaagggaaatgtaacaagtcatgacatgtttagcatataaaaaattaaggtaaccgaagaatatatctacaaaaaggtaagtgtagatgacacataagcacacagcacaactaacctccaacggtgtcatcaactcagcaggtttctcccaacttgattgccttgtcttcttattatagtagtaccttaaaaaggagagaaatagagaaagcaaccaaataagaataaaggtgaaaacttgcaacacaacaaaagatactgagcaccaccagaaagttaataacaaaaggtaagtaggtaaaatgattcaacttactttttcccatcagctgaagtgtgctcttgccagtctgaagagctagtttcgctggaattgatctgttcatttgcaaactcaattattgcaaggtaaggatgtcatatttgataaagcacagtagtaaacttaatacagaaaaataaactgattcagaagagatcagtgatatttactgaaggcattgtagcggaagatgacatcggctgatgcccaggctgcacaagaggtacattctgacctggagctgtaccccaagattgcactatgggaggaggaacagatgatggttgatactgcagtgtagcctatactagtatcagtaacttatcggcaaggggtggcattcaagatccggcaatagctttgtgaaattaaatacatatatcaaatgaacaaatagaatccacaaagtgcaaggaaaaataggacttgccgtataggatggaggcggtatagggcctcccatggtgggcatatggcctccagagaatgtcgctggcggctgcagaggcccagatgacataggtctagctggctgataagccataggaactgcttgtgatgcaggtggaacttgaccagagtgaggcaagtgctgtgtaggttgctgaaaatgtggcatctgacctggcatgccaatattagctcctggcatggcctgaccaacaggtcgaaactgctgccccggttgcatgaactgaggaggttgttgctgatgaatcaccggcctaaactgaaattagagaacgagatgacatattaggaatgtaaaatatgattaaaatggtccatgctgtggatacaaggggaaaattcaatcttccagtttacctgcataggcatcggaggtcccagattttgtggtgggacactagagcccatcatagggggcctagattgctgcttgagagagagagaaagagagaaagaatggtaaaaaattagcacatcacacgacaaaaatcaaaacttcacactgaaaactgccatccttaaaacaaccagacaacatttacctgcggtggcccagaaggttgcatattacttgccatcaaagcacatcaaaatgtgatgcgaaaaagaggaaacaagtttttcctaatacagtggctgccaagtgacaaggaaaggaagaaaatgacgggttaggacattaaatgcttacggatcgatcctcttccgaagataactgcaatatttaactaaactcaataacaaacttgctctgccagctgcactttggcacagtatttagacacaaataacgctgtgttagtatttagtaaacagggtaacggataccggcttttggatccttcctctccctccctctctcagcgacagaagcgaaagaagagaacttaccgttaccataaaaacaaacatgtcttatatacatagccaatgagctaaaactagatatcagtccagtgacctactagcgggtatagattagacatttgaacacaactggtctcctaaaccacatgccctcatatacatatccatgaaaacagatttcaaattttatctaagcacgacccccccccccaaaaaaaaaaaactaagggaggatcgaattatcagaacaaaaccacgtctcgtgttctgaaaaaaactagggcagggacagatgattccgctaaaccctaaaacaactaccgggagcaaatctatatgatggataagggcgattggtgcctatcaacgagaacagcgaaacgaacagaactagaaaagcagagctagggtttcgttactcttaccgcggggaaggaaatcaatccaggtccggatccgcgccacttccagtagaacggaggacgacgacgacgccgtctcaaccacgggagaagacccacccgagagaagtaaccccccttcgattcggggtggcaggagcgcctcggcggaaggagacctagagggcggagcgggttccggcggcgcggggcgagggcggcaaggagcccggcctcggcgccccccctgcgagattacggttgccgcgcggcggcgcggggcgagagaccagtagcgagaagagagagagagagggagagatgcggcggcgttgtctccacacgccggcggcgagggcggtgtggggtggggttggggttttagggcaaaaagggggtgcgggcgccgagtcgggcaaagggcgggcggggtggggttggggtcccaaaccaacgggttaccgatacacacacccctttcctgtctgggaccgtgggacggcgcggggtatgtatgtgtcaatgtcatgtattgtatcggcgagggagagacgctgcttggcgttggatggataatagcaggcacgcgacgggagttttttgctttgggctttcggagtcgcgttcctcgcctcctagaaggaataagttcactccaggtccctcaatttgtcgccgagtcttgaaattcgcccctgaaccgaaatatcaggtgtacctcatcccaactcacaataccatgtcaattttggtcactcggcagtaaagtagttgtttttagctgacgtgatgagtgggacccaagtgggcttgtcagcagccaactcgtctccctgtccctttcccttttccgtctcttcccatttctcagatactcaagcatcgagcagggtagtcggtgaggagggggtcacatacgatctgtagtggtgaaggggagggacttcctcatcatcatgcgcgccccgactgtgcacggggagtccaccctgatcatgctgagctgcacctatcagagcatggtcaccatggagaccgtccacatgggaggcgacacggggatcgtccctctcatggtggaccccgtgaactacgacgtgttaccgaaggtcgagtaggagctgcaccatgtctaggccacggaggacatggtggtcatgcgcaccgccaccgagcagagcaacttcaagctggttgttgccgtcctcgaaaagcgtcatggcgtgctcaagtcacgcgcggaggagctatacgacaaaccgcggtccgtgacgtaggcagccgagctaagggagatgcaggacagggtggtgatgcgtcaggagatagaggactttggtaggggcttaatgtgtgagaaaagggataggaaaaggtggaggaatgggttcaccttgacgaggtggagttggtggcgcgaggtttggccaacggggctccggtgagggagatcgaccggcggcagcgtggtggccagacatggtagagagagaagacaagagctctaagagtttggttgtgggggaaaatggagacatcgttgtctcttataggcagcgaaaggtggttgcaatggaattcgctgatgaggacacggtagtggcggcttgagatggaagaaagcgacgccggcttcgtcttcctattggttgcccatggtggttcggtttggtgacaaacaacggatgacgtcggcagggtgactcacaactgaggttgggcagcggttagggctgtcaacgagccgagctcgagcgagcttccatgtgtaggctcgaactcactatagactcgagtcgagctcgagccgagtctaggtttgccacgagcttgaagttgagctcgagctcggctcgttcgagcttcgagcttttctcaagcctgtttggtgcggtggaatactggaacaattcattccattcaaagaaaaagctgacactgtgatgcatgattagacggctaaggccctgtttctttcagcttgggattattataatctagattattgagtcagattactataagctagattgttataatctatagtagaataagcggttagttgtttctttcctagattattgggtttgcaagtctaaagagagagtggggtggcatggtgggtaatttttcacccaataatctggaaaaaaactcacctaaatgagcttatcagattataataagctgggctccagattataataagctacttcaataagttgtctgtttctttcagcttactcccaataatctggattataataatcccaagctgaaagaaacagggcctaaaagtaatactagtgctcctatgtatactaatgcaactgtgcaagccgcacactagtactcctactctcttgttgggaaatgggacaacaaatgcatagtgctccctctgccctggcactgccagtacttgtgcagttgtgctactccagtactactagagaatttgaccgagtaagaaagagagagaaggggaggaaatacctaggagaaagaacatgagccagatgttgaggctcgccgagttattcgagctcgtgttggtaggctcgtgagcttaaagtcaagctcgagctcggtttgattcttagacgagccgagctcgaatcgagctcataacaaatcaagctcgagtagctcacgagcctcgagcatttttgacagctctagcagcggttgcttggcggcgacggcaagatggtgatagcagtgcgtgtgccacaggcacccacagggagtttggcagcggtacaaggagcccggccgtgcctacatgcccgtcgccatgagctcccactcatggcagacacccttcatggctaacatgtggggcccacgtcggtgtcactcgccgcgtcagccaaaaccggccattatactgctgggggactaaagttgacacggtattgtgagttgaaggatatacctggtatttaggttttgggacaaatttctgacccgacaacaaattaagggatctaaattgaacttactccctcctagaaagagataatgagaatatatggtgtggactggaccgagattagggtttgagcaggcttaggccctctttgtttaggcttagaccctctttgtttaggcttataagttaacttataagccgaaaaatctaagcctaaacaaacgagcaaccttttcatttggctttttaaaagccataagccactctaacactattaagccaaaagctagattagagaagcttttttggcttatgtgaggtagatgtatggctccgccactaaacttaggacattaatccaccgacttataaatcatataagccaataagctgacttaaaagtctaagcctaaacaaagagggccttataagtcaacttataagcctaaaagtctaagcctaaacaaacaagcagctttttcatttggcttttttaaagccataagccactctaacactatgcaaaaagctaggttggagaagcttttttgacttatgtgaggtagatgtattactccactactaaacttgggacattaaatccatcggcttataaatcatataagccaataagctaacttaaaagtctaagccaataaacctaaacctaaacaaagaaggccttagtgcatgtgctggtgccaacttgccaaatcttaacaggccatctaggatgaatttagatgattaaatgggcttagtatatataaattttatcttactaatgggccatctaatggtgaacaggatggttaaatgggtttagtatatgtgctatgtcctttagcacacttgccatattgtaacgggctatctggtggtgaatgggaatggagcgcactccactgggctcaactgaggatgatcttagcatgctaagcattcccagggtgaaaaataactcgtcaggttctagccctactagactcggggggaggggggcattgtcatcgctaacctcgtagcccgtaagcctttgtgagttcactaggcatccatggaaaaatacttgttggagctgctatggttgtaagtgatgcaaaacatgtgaagtaagtgcaagtgcaagatgttgaatgcagatcagcagtaccacatagagccatgtagcaacaagcttacaatattgtgagtctgctatggtaactgacgcataatgttgtagaattttttttagcaaggctagttgatttataatggagtagcttttgcaccgtagcgaataatatgaacatcaaatgggtaggaggagctcctcctatggcatttgactttttgtcttttgcagtagtgtgttaaatacatcccatttggaacatgttcgtctagccatcatgtcacttcagtgctcccttctaacaaatgagctaggttgatgcaaacctagctagatcaaatgatatattaacacgttgtcaccctttgccaatagtcgcattatatgctaaagtcaataatcatatcagatgtttaaatagttaatattgtggttggaggatatcaaatttatgatcattgtagttgttggttcataatcattctcctaccactacctattgcatatcatgaatgaaggccaaccaccactaactgcaacaaggttagttggagggaaataagaggaagaggcataaatatatagactttgtggtgatgacaaatatcatgaaataactagtacaacgtatagaagtttggttcgaggagaaaaaagaatacaagaataggaatgtaagagcttataagatgagaattgattgagcttaccggaaatttccttattatattattttcaagataggagttatgctaaacatagcaaataaagggtcaagttagagtctggtggtttctcggtcaataacttaaatatagtatcaaatacaccttaaataccctaataaagcatatcaaaacaataagcacacccattaaaggtagctctctctctctctatctatctctctctcatgtggaacaatagttatttcttcacaaaatcttccttgcgtgatgttgcttaggggtgttagtcggttgccattgccataaacatattgtggaaattcatgaaagaagctaacaaatcattatctaccaatctactttgttggagcatcacatgaggatatggcggtaggctcgtgatagtatagcacttttagacatactacatatatagttaacatcctagccattgttcttcactttgctatagttgtttgtgtgcccttcgacactattcaccattatcagctccacatcatcctacaacattgtctaatatttcacgtaacaagaccactaaatacatgtcttcctatgcttgcaagtatacccatcgcaaacaccaaggattcctcaccattccttgtgtgtccatgtattaattaaccccatgcatgactcacatgtacatttgagcaacatccatttattcatgtcttggtatggcacttgatcaatttagacacagtcaacatatacttatcaagtacacatgtcctcgaagcttatcacaattttgaggacaaacatattttgattaaaaaacatatttcataaaaggccaagtctagggtcatgtgtaacaagaaaataaaagtttaacaagattttgacacataaccgcatggatgcgcaaataagaaagaaggccaaagactagttcgatttagatgaggaggcatcaagcacgacagcaacatagcatatgttcttcattttaggctagctacttatttcattcaattatgaacagccatatgctatgctatacgtaaataacttcaaatatgaataaatttgctcttctattttatattcttttgtctttctagtttccaagtaatttttttatatggttgatggaaaaggacaatgaaggggaattctgtgtatcgtgtagctgctagagttcattatgtgagatgttgattaagaacttaatacatgatggaaaataaccttttttttgcttgtgatggtcatctcctattatcatttattgttttaatcccttaaagaaagtgtttcgtgttgcaaacaacaattatcactaacatcttattttacgcatccatatgattattaataatatacaaacctaatcacacatagataaactataataatattgtcgatgttttagatcacgactacggaatttgcatggtatggagattgttggtaccagagtatatggagggggtcgcagtcgccggtggtgggtgtcagggctagggctctccatccttgaataatgtcttcttcagtcagctcctatatatggcaattaaactcgattaatcagtggttgggtcgatttcgccttctcgtatagggatcagcctctatcgtgtttgctcccaactccttgctttccaagtagtagtactctaactcttcttccataacctctcccaccttctcaggcttgggaaggtagaggaggaagcggaggaagagggatttgttaagaggagagaagactcggaggagggagagatggacaggggctatgcgctggaagagaggatttccggtgtgggatgacagttgcgtcaccctttcttctatgaagcttgttgaaactaaaaaacatgaactctataaattggtatacttgctcaaactggtattaccaactacaggtggctacagcaagtgttgaaagggtgttctctaccatgaatcttgtgaagaccaagttgaaaaatagtatgggcaatcaagtcttgaatgattgtttggtcacatttattgagagagatattttcttgaatattagtaatgatgctgtaatggagcgcttctatgctatgaaaaagcgtcgtagtgataaacggcattagattgcattgtttctgctatgtaagacttattttggactatttgcattgtgttttaataatttaagacttaatttaatttgaactaattgtactacattcggataatttaagatgtaattgtacttttgtgcttgaggtttttgttttggcttgtccgccacactgcctccactacaagcaccatcgactaggccgcttcatcatcctagaccacacaacccctccccctccccccaccctccgtcatcgcccttgttagatccactgcctaggccacgacctaagaagatcgatggcctagtttgctggaatttgaaaatatagggggaagcaatggcaccaatgattggaaaagcagatatggcaaaataagaagatattagatatagaggggaagaagtggcggtggttggatctagtagagggaagagtagtggttgtcgtccccatgggtgtaggtgttagtcaatttctttgtgatggtggttggcaacaaatgtggaataaaaggtaggtagggagatataaatgtaagtacatgtttggcaaatgggcaaaggatcttgatgatttttttatggttctaggggctattttgcacatgtatttctgtaaaatcacattttaccaaattttgtgagctgaaatgctaaattatttacgcctaatcaaaaccactgcgcattgtgaagtaggatctcaaagagtacactcacccgatgccattccacaagaccggccactttgtattttctctactactataatagtggagccgttctccttccattccctctgaccgtactgcacatgcgcaagatgagagaaaaaaaagaaaagaaacgcttgaattcggtgctttaagctcgatctatactcccaacccattcccaattatatgggtcagtgcaacccaattatatgagcatgttactagtaaatgcttgaagttatttgcctagggcagtaatagaggtggcattacttgctaggtgagtttggtggaaagagtacaacatagagagaagcggatatgtggggattattgtgctcaaagattggctagcactccgatcctttctgatgactgatttgaaacttggtagcaacacctcatggtcatggtcaaatatagagtaggaaccttccctctcctatacatgtatatttgtttttgcatgcatttaactcagatttgctcgagtcagaggaagtaacacttgatcagatgaataacgatatgcaattttattggcgatcgatgctcatgcatatatattgcgcgtagaaaaccattatgcatgcatatatatgtcatcaagatggaagaccagaacaactcctttccataacatttcttactttaggagaaatcaacctctcctataaccttgaaatatttaaccccaagactagccaactggccatccaaatcaaagtagttaatctatggatgaaggaaagaatgagaaacacaacaacataatatctgttgcttcctcccctgctccaatcctgcacctgtagacacatatcatatcccccctaccaacaaatgcaaacatctgcatgacatatatgttctccctatatatatactagatgtagaattaattaagttatgatcggtaaggcacatgcatcatgcatgcatgccttttgatcagttgtgtactatatacttggagtatgatcagacttggagttgtgaccaactgatgagagccctagcaaagctacaaggccgtggtcttgtagtggtggtggtggtggtggtacagatcctgcaacttcttccacgactcctccctctgcatcttgagctgcttgtagaagttgccgatgaacgcctccgccttggtgaacagctcttgcttgctcatcatctgctcgccgccgcccccgccgccgcccttcgtccagcacccttcctcctcctcgtggacgacgacgtcctcgccgtccccgcccccgatgaagaagaggctcgccctcgacgggcacctcctcatcttcttggacttcttggccgccgctgccgccggcatggcaccgccggcgatgacgacgacgtccctgctgccggctgcagcctctaacgccgccgccttcggtgtcaaggatggtgaagcggccacaattacagcgctgctactgctactaccgttgacatggtgatgacgaccgttggtcgccgccgcagcgacgtcgacttcacctggtctattgctgtggctcagcctcagagctgcggcggcggcggccggcttgggcagcagcttgtcgtcgcgcgggccgctggagatggcggcgaggaagccggcctcgacgccgagggcgacgacgagggcgttgaagaggaggtagaggtagggctgcctgagggaggaaggcaccaaggggaggaggaggaagaggaggaggagggacgccatcttggccacctgggccagcgttggaaacctcttcttctccatggccatcaccatttgtagctagctaaggctactagagtctaggagagatcagagagagagtaggaggggatcgatcagggtgtagcttggtcacctatatatacacgtgcagtagtgtctactgtgccccgtgtgctctactgtgcaggacacaagcttttaatatactattttccttttggaattaattgaaaaaggcggcaaatagataagcttgcgtagcgtaggtggtaggagggggatagagatcggtgatagagatgacgcacaagaaagaaagaaagaaagaagaggaatttgtttgagaaagtatctaatcttgtgtgtgtgtgtggagttgtggggcaaggtcggtgagaatattccggtcgttttcatgagcaggggcaggcgtttctcgccgtggttcggtgagggggagggtggtggccatgtgggagatctcccggtgggatcgtccatcccccttctgcttaattttattccctgccatgcatgcatatgcgcttgcgcgtgaccggcggcgggccgacggctcgcgcgcggctcccacttgctgttgcggagggatatctctggatatgctgcctggaggtgcatggacaattggtcaattggactggacacatgactggaagtctggaatatggttgtcagggacgaataactgaagcattttgtcaaaaactgtaactttttttttaaaaaaaaagaggttctccatctagtcatcagttgcgtgaaaaatttattttccacccgcattcgatattttggcggtcgctatgacgtagtataatagacacgcaacccctggtgcctaattggctaactcggtgtgttttttgtcgattgcatcttggctcctctgttgttgcgtaaaggaaaaataagtgggcagcactcacggcttattatataccacctccgttttaggttataagactttcacggtttattatatatgtgtcaagattcattaacatatatataaatatgggcaatgctaaagagttttataatctgaaacggaggaagtagaagagaaactcccatgaacattttgtattacgatagttcaaacaactaatagtactatttaagaaataccatcatgatatatagtggccaagaatttttggttgggtagttctatttcacaagtaccggtgaagaagtagaaatttcattcacatcaacgtaccaaaattttctaacattgcaaatcccataaacaaatagaaatttaattagtttaaaagcgatagaattatatcttataccatcactaatcgactaattcaactagcaaggtcaaaatttacaaagataatttagattgataggagcaagaggtgcctcttgttcttgagtttgagcttcatcaaaactatcagaaatgatggtggttcttcttgagttacaggaagagggtgttgcaatcttctttgccctttgcagttctaggaagagggtcctgcaatcttctttgccctttgcttcatggttccgctagagtgatgcaattaaggccctgtttctttcagtttgaaattattataatctagattattgagtcagattactataagttagattgttataatctgtagtagaataagtgattagttgtttctttcctagattattagagcctaaattattgggtttgcaagtctaaagagggagtggtggcatggtgggtaaattttcacccaataatctggaaaaagctcacctaaatgagcttatcagattataataagctgggcttcagattataataagctgggctccagattataataagctacttcaataagttgtctgtttctttcagcttactcctaataatctggattataataatcccaagctgaaagaaacagggcctaatatctgcatttctattcatgcctcaccaattctaccatcctacgaactaatgacaaaggcactggcgaggggatggtggtctggcggtggatccatcgccttccctttaaactccaaccatgcgttgtctcccaagttaccactgtataccctctagattcagcatccctgaggttgtggtgttcttttctcctgaagatgaagatgaagatgaagattaagttttttacacaaaacgagataatattaacgtatgattgattgagttttaattattacaaacttaaaaaatagattaatatgatatttttagagcaacttttatatacaaagttttcgcacgaaacacaccatctagcagtttgaaaagcgtgccacgaaaatcttaattttcatctaactcttgctggagaaaagaacggaaccagttcattggatctaactgccctaacctcatggggggaggatttggagggggctggcagtggtgcttgggatgcatgcagagggcggaggtggccggccacggtgctctttttttgtggggtggaggggggggggggttaatgggaatttatttatttactattttttagaaaaatcacctatggttcagtaggttcgatagaggatgaactgtcataggtatggatattcccttgttgttgttccgatccatgtttcccaactcatctacgactnanattattnacccctcctccctcttcccccccccccccaacccccatcccaaattaagtcctaatcacccatccttttccttttgtcttctcccttctccgctttatggctccattgacaggccatgatatttgattggtacatattggagaacaaacaatgaaggaaccacagagatttcattcttccttgttccaatctcttgcaatcctacgagtgatttctattgggtgcttcacttcgtgagtaacacgagccacagccgctttagcgattttagtgaggaacacgagccacagccgctgaaagtacaccaggcaaagcaacttcagggagaaaaataattccagattggtttcattcagtaatctctagttttcaacttcgctttaaacaacatggtttggttgtgaaatcacataaaacaatgattgaactggtttttacatagttattctattttgatttaattgatcccgtgtttaacaccatgagagagaggaggcaataagagaaggacgaggaaaccaatcgagaagacgaatgtgacgtgtgggcccaccactgatgacatccaccggtgatcacttatgggacacggatcggaacagggaagctgcattctattatatgtaaatatgggtgatcacctcacagatgtgcctagtcatcattaaccaattaactatgaggggtgcctagctagcttatccataatacttccttcgtcccataatataagggattttgagtttttgcttgcactgttttgaccactcgtcttattaaaaaaaattagaattattatttattttttgtaacttactttattatacaaagtactttaagcacaacttttcattttttttatatttacacaatttttttaaataagatgagtggtcaaacagtgcaagtaaaaactcaaaatttcttatattatgggacggagggagtatttagctaggtttcatgcaattgtgagctagcaaaacctttgagaattgatattccttcacgagtaaatatttttgtaaaatatcttgaaagaaattaactgataactgccaactaattaatagtacaaccaatgaaactctataccaattaaaatacaatattgttcatgtattcagctctggtttcatgccgacatgatgtagtcttaaactaagacatatcatatatccagtatctaccgagtattttcgccaggtgatctcattgactcctcattcgtaaagaaaccaaagccaactatagcagctggagacagtatactgtgtcacatccaaataaattaagccacaggtatatttgagaatttgaattaggctccgataaagatacctatcctttatactttctgggcacaagtagctttttatcctcttatccatccagaagtgcgtatgaacatgggcggtttattctcttctttgcgtagagatcgctgtccttcagtttatatgagtgtagtaatctttattattgatgccagcatagcataaatacagaatagtaatctttatatatatgatcagtagattaattagcagaactattatagctagccctttcatcaaaaggtcgtgaagaattaatatacaaattttccgaaaaggaaaaggatgaataaaatatcgaagaagatctcagggcaaacgttcattccgtggccgggttcgtattccactactttaggagagactggataaaaagctgctcactagctgagctggaagaatgagaaaaagcacaagaaggttcctttaccgcctgatggatacaccacgttgtacaaacaccgtctttttaaaggtagcacataataatcgagcaccctatccattagaaaaccatctctaggtacagatattagtgaccgctacatctacgggcacatttaatttagttttgtacatttcacggtgagtgccgattaaagccttatttgtttgagctacgtcttatagaccagttccaattttgaactacggattataagttttggaattaatttatggtctttccttgttatttttgtcgtcatcacactcggacttaagttttaaactgctgaagatagaatcgtaaaagtcttagatattctaaactcattttcccgttgtatctgtcaaaaattgacttatataattaagcccatcccagaaaaatgtctgggaagaaaaatcgcgctttagcctttagcagcagagtggacggggaatatacgcagcagtgctgcgtcgtcgcccgatcttatcttttggctgagatcagtagaaaagggcggccggagaccggaaaaaggatatatgacgatgcgagggtgtttttgccgcaggtaggcgtcgaggcacagtgtgcacgcagcgatcgaccacagagacacacgtacttttttgtggcgtatgtacgtgaccgacgtacttagcatctgcaagagaccgaagtggtagatgacaccatgcatgcatgcatatatggagtcacggacgcgacccgtttcttcgcccggtatgaccggccggccagtcggtctcgtcaatagatgatctggtagctagagtgagcaactcataataaaaattattggaggttctatacatattaattatctaattattaactaatatactaattatataatatgaatcagctagcattgagtaatttaccaggtgcctgtgatcccggtaaatagtacataggttcaccattgggtagctataggtccgtgtatgtgtattagctagctgcctagcgcttactactctgtctaaaaaacgaattcctacctacgaacttggacacacatgtgtccagattcgtagtcgtaggtaggattggtctttttttttttacggaggggtacgtgttcaactgaataagaatgtgtacatcatgcatgcagtgcacaagctgttggttttttgctcacataaatatgctcaagctgttggttttctgctcacataaatacgcgcacacttgttcgtccgaacacacatactttcttttatattcacttgttgcctcaacaacctatttcttttttattgtctaggaggaaaatattagttcgaggtccacctatgctagaatacgacactagtacataactggtcatcgtgaactatggatgaaaacagatcggaaacgaacggaaattacctttatcatatttgttttcataatttttttcggaatcaaaatcagaattaaaaacctggatgtggaaatgaaatcgaatattatcgaatacagatacggaacaaataagacaacgaacatttgtcggtatataaaaatcccctcaaattgagtttccttaataaggaagagatatcgctcgtttttttagatcaatatctccaacatttatatcatcaatttgtaggagatcccacaattgtatgtgttcatggccattcccctaagaaacccacatgtaaatataattattcatttttaatcccaaatccttttactatatgtatagcttacttaccatatcacttatcaagttattgttgtataaattagagatgttatttattttattgttaccaggttagctagtgattctaagacacctctatacgttgaatgcaagtcaaaacacaccaaattatcaataaccctggacctaatgaagctaaagacaagcattagatggacagacaagagtttcacttaactgttgggtatattgaagcgtttgcttcataaggagaacgcattgctcaagatgacatatgaatcaaagcatattttgtgtctcttgggcttaggggttcatagaattcatgcttgtccaaacaactgcatattgtatcacaagcaatatgcggacttagaggcttgtcctgtgcaaggcttctcgatacaagcgaaagagaagttctgattaagggaaaaagtcaaagagggctggttcgacgaaggttgtgtggtatctatgttgacgatcgttaagtgcatattttaactaccaattcctgcgtaaaagatatcaattatattatcaaaacttagtataggactatactactaaccacttccactagttttggtaaatatagctatgcaggttatttaaggagaaaatacacccgacatgcaatgaaaatgaacccccgaccaatcacgtgcgagtacacggattgaggagcccacaagtcaacttaaaccgactcaaggtgaggccaaccacccgggaaccgactaaggggcccacctgtcatccaccgaccaaagtcggaggagaaagacggttgaggtggttcggccaaacccctgctggcgccgctaactgtcaccttccatgtgtcactccctgattggttcctgatggcggttatgggaggtcgatggccagaaaccgccatactcaaccatcattggacactataaaaggaggactccatcaaacttctcaacacacaactcttgagctcaagtagagtacaattcacttgtagttttatatttagtatgttagtttggtagagagtgacgggaagctccggaaggagtggctcgaaatatcggagttccttcgagaattttagggaggagtgccggagtgtcggcattcttccaacggagtttcggagaaagccgggattgttggccttcttctctcgcttgtacctcgaagaatgctttctttatcaagtaagtgttcgggtttatttatgtcccttaattagtttatttaactgagataagtattcttatcggtgtgggttcgtcgcttagtgtgcaactgagtgctctagcactaggactctggataaagaaggaagttcctacacaaggttagaatagtaattaataacttagacgtggtgtctaggttagaaattaacttcatttgttgcgtgctccatggaaagtaaggtaggtggcaggtggtgacagccatgtccgtccttcgtatctctccacgttcgggtacatcatatagctcaaggccggactcatcctagcagaccaggggagagccggtacccgaagcattcgatagagttttatctttaacttaattaactaattaaaagacataggaatcatttctagccaatttatcttaagttgttgtccttggattgaatcttgatcgtatattatacacacacgttccttgtgttcgatacccttggaatactctaagggggaagtgctacaacggtattccttgcgcttacggatttatctgtgatcataagaaatacgatcaatctacctatcgttgatcgtttcaagaaaatctttgctaatcttaagaaagtagagttatacccaattataagaacgtggatgaattcatcgcagggacccagatcgtgcacccaagaagtcagggtgacacaaacattttggtccatcaccgccgaggggagcgttttgaaagttcaagtgccattaatttggttttggtgattaatgataaatccaattacatgagactaatattgttataagcatttctttgtctactagtctcatgtggatatgaaagtggaatttgtgagaggtgattcctggacttcatatgagttgagatagaaacattcagtgatggtggacctaaatcacaaggatgaaatgcatggagatcaagctatatgtatcactctttttcttcgtgcacatattgatatattcatatataatatttttcatgtgattacgtaagcatgtgagactaatgttttgattgagccatatcttgtttaatctctttacattgaagacatggagatgatgaaggtatgtttttattttaatgtctatatttgatgaatgccttctattcttgtataggataagctctcaatgtttcatagctttttatgtatactcttgcttcacacaaatattccgtatgcatacatttagggggagcaaaccctatacgttagttatgcatgtatttgatccaagttattcactttcatttaattgggatctctacatttaagtatacaatcgagtatatgacacttgtggtgttgattaatactcaccacttattcatatccttttatatactcgatcggttagtcaacatgtgaaggttgacaactggatcattgggactaataattttattgagttgaatgagagaaataggtcccaaggattgcaaaggtgctgatgctcaagtgatatcattacacctaaatatactaaggatgaccaagtgaagatattgaagatgtggaatatgaagtggctactatggcaaaatggtgaaaggcaagcgatgcttggtcgggatggaccatgcatcgtgaagggtaagcaaggggcttggtgtcgaaaaaccaaatctagcggtgaagagcgagtgacgactttgtcacgatggaccgtgtgaggccatttgaagctacaagtaaccgcatcaatcatttgaagaatatatggtgaaacggttttggcgttgacgtcccttaagacaaagaaaggaagatggaaagaagtcattcctattgctataattttcttcctatttacatttgtgtcggtgacatgggaccgggagtatcatgacttagagacttgaggcagacacgatcacccacgtggcctaaccccctcgggggggggggggggggtcgggcccgagggtgatacggccgcccttctctttgtcttcccgaggggtcggaccgctcctgtctcggccccgagggccaaggcgccccgaccccttgtgggttttgcgccgcgtatatggggtaggtgagcatagcggggctcacctaaccacatttattgcggtttggacgagcgcatcacgccgcatgtaacgcagtgcagcgcactcgtttatccggtctgtgaccagtcacagaccggtcagatcgtgggttaggtggcgacaggcggtctgacgcacgcctcgccccatcccgtcaggacgagagcctccaagcactcgtccctagccggagccggcgtgttagctcctggagatggcacgttggttccggtcagatatatgccaggcttcatcctaaccattacaggcaagatattgtatgaagaagggcgaaatgcagattgataaactgacacgtggtcgacaagaatgaccgatttgtgaccggtctgacactggtcatgtcgtcagcagacagccatgttcccacgtcgcgcctgcttccggcggaagtggaggtaggtgtgggccgtcccatcagaaggtcattcggacggcaaccatacaagtcgccgtctgtttatgaaaagataggataagtccccacaaaaaagagagagatggggcatgtggtatccccttgagatataaaaggaggaccttgcccacttagaaaagaaaaaaaaaacgatcccagaacgatcgggggctggctagcactttgtagcttctccatacacagatccaccaaaacacaggagtagggtattacacttctcagcggcccgaacctgtatacatcgcccgtgtcttgtgctttttccattctcgcgaaccttccacacacagaccaggagcttagaacctcacccagggcccccggccgaaccggcaaagggggacctgcgcggtctcccggtgaggagccccaagctccgtcatctgacgcgccaggtagggggttctgcgtgtgttcttctaagctctcgcactttttcgtgtgcgccaagcttttcctgttcagcccaatggccgaacaagcaaaggcgcacaacctctctccgagtgttagcggtgacgacggggagccgaacccacgccgtcgagctcgtactccatcgccccctccacgccaaagtcctaggcgggaggaggcgctcgagagggtcgaaggatccgcgacttcgacatccacgggtgatggggaaggatggcgagatggggagcgtcgcctcctcgtctacggcgacggcagcacgccccagggcgcattccaagctgcgggcgcgctcctacgtcacccgcccgttgtccctgacccggagtctccagcccaacgttggctggacgacgtggctaacttggtcatgacggcacggcagcgcctaggtgctggtgggcggtcctccgccaccaagacctctggcgccgctaccactggctccgtgtcgtcgaggcggagggcgcggcgagcggcgacagttgctcgtcattctgccgccactccttcgtcagcgcctccgacccaggaagatcagcgtggggggccagatgcccgcatcgatatcgagcgccggcgtaatggtcggcgtgctccccacgcaacggagggcgcctcctcgtccggagtgtcacctcaacacggacgcggggatcagccctccgtgcccccggttggtggtgtcggctgtagagcctttgtggcgagccttcggaacgtccgttggcccccaaggttccggcccaccatcgccgaaaaatatgacgggagcgtcaaccccgccgagtttctccaggtctacacgaccgggatcgaagccgctgggggtgatgacagggtcatggcgaatttctttcccatggccctgaagggacaggcgcggggttggctaatgaacttgccacccgcgtccgtccactcttgggaggatttgtgtcaacagttctccatgaactttcaaggcacatatccgcgcccaggtgaagaagcggacttacatgcagtccagcgaagggatgatgagtcacttcgctcatacattcagcggttctgtcaagtccgcaacaccattccatgcatccctgcacacgcggtgatctacgcattcagggggggtgtgcggcacaaccgcatgctcaaaaagatcgcctccaaagagccccagactaccgcggagctttttcagctcgcggaccgagtggctcgtaaggaggaggcatggacctggaacccctccggttccggtgtggcagcttcggccgcccccggatccactgctcagacagggcggcgtgacaggaggaggaagaagaggtcagcccataccgacgacgagggtcatgtcctcgccgtcgagggcgcttcgcgggccacccgaaaggggaggcctgcgggcgacaaaaagaaggaggccggcgctcccagcaaggagcgcccaaccggcaagtggtgcatcgtccacaacacttcccttcacgacctcgcggactgccgcgcagtcaaaagtttggctgagcggacgaggaagtgggaggaggagaggaggcaggagcgccgagagggtaagtccccggcggttccttccggcaatcggcgaagtgaggccaagcagaaggcccccgccgaggacatcgatgacggcgatgatgacctaggtgtccaagagcctggggccaccattgccactgtcgatgggggagcgtgtgctcacgtttctcgccggagcctcaaggccatgaagcgagagcttctggccacggcccctactcatgaggcgacgcgccgggcgcggtggtcggaggttgccctcaccttcgaccagaccgaccacccaccgtgcgttgcccggggaggacagatcgcaatggtggtttcccccactgtttgcaacgtaaagctggggcgtgtcctcattgatggaggagcagccctcaacatcctttcccccgcagcctttgacgccatcaaggccccggggatggtgctccggccgtcccaaccgattatcggtgtgacgccggggcacacttggccgctaggtcatatcgacctcccggtcaccttcggtggatccgccaacttccgcacggagcgggtgaactttgatgtggcggacctcaatctgccctacaacgcggtcttagggaggcccgcgttggtgaagttcatggcgacggtccactacgcctacctccagatgaagatgccgggccccggtggccccatctctgtccatggcgacctcaaagtcgcgcttgcttgtatggagcagcgcgcggaccacctcgccgccgcgtccaagcccgagggtggcgacgagaggcttagcacatccgcccccgctgccccgaggcagcggatagtcacatgcgacgaggtcccggtcaaggaggttgccctgggcgacggcccgtccaagaccacacggatcggtggtcttctggacggcaaataggaagacgcgctcgtctctttcctgcgggcaaacgctgacgtcttcgcatggagaccggcggatatgcccggggtccccagggaggtggttgagcaccgtcttgccgtgcggtcgggcgcaaggccggtccggcagaaagtacggcggcaggccccggaacgtcaagccttcatccgcgaggaggtggcgcgacttctggaggccggattcatctgcgaggtcatccatccggagtggctggcgaacccggtggtcattcccaaggcgaacggcaagcttcggatgtgcatcgactacaccgaccttaacaaggcatgtcctaaggacccttaccccctgcctcgcatagatcagattgtcgactccacagcggggtgcgaccttttgtgttttctagatgcatactctggttaccatcagattcgcatggcaagggaggatgaggaaaaaactgcattcattacccctataggaacttattgttatacgacaatgcccttcgggttaaagaatgcaggtcctacttttcagcgtactactcgaatttctttgggtagccaaataggacgtaatgttgaggcttatgtcgatgacttggttgtaaagacgcgcaaccaagagaccttactctcggatctagcggaaacttttgagagtctccgctccgcccgcataaaactgaaccccgataagtgcgtgttcggtgtacctgcgggcaagcttctcgggtttttggtctctgcccgaggcatcgaggccaaccccgagaagatacgagctatagagcggatgcgcccccccagcaagcttagggatgtgcaatgcgtcaccggttgcatggtgtcacgcccggaatttctatccaaaattccaaacgcttacatgtgtgtgaaccctcgtccaggaatcagccgaggcacacaataacaaattgataatagagtacaaatattactctaattaataagcgaataaactgtcattacagaggtagatagttcctctcaatcaataaagatctaagcagcggaaaaataaataaacggcgcagacggctccactccacaggcagcttgaccaaggctacacctaatcctccacaccatcagcctcattgtagaactcttcctctgatgaatgattgcaaggtgagtatatgacatactcagccagccacgcagcaaatatgcaagtgcacaggataacaaaggatagcataatagggttgcatttgcaaaagcagcatttagcaaacatttgagaatttgataaagcagttaagtaattaaacaattttaatccaacgctatacaacataccctgttgtataggcccaaccattctgaacaaccaccccggctgcacagttctatctccaaaccaggaatataccattccaaaccaggagctaatcaaattattaccagtttaagcatcttttacaatgatgagaggtgtgagactaatcacgaaagacattgttagacccacccataaccgcgggcacggctattcgaatagttttactctgatcagaggtgtaccactgtacccacaagacacagccccacatcatgtcaccatgtgcctcaataccaccacggtatctcggaaaggagttgtgacaatacccctcgcataacacaatccactgcagcgcaccttcctggatcataatcacccccttataaacaaggcatggactccccagcgacccccgtgggcttatctccgccacttctcagtctggtgccccgcaatgaaccatgctatacaaaagataaagccgttgcccatgctggcttgtggttggcacggttaatgtttcacaaccgaaactcgtgaaccggtccttaattgtcatgagcacgaccaacaaaaccatgtgctcacaacccaccattaccaggttttagttggcacattaattaattaactaatcacgattgaccatcgtgaactatcatgaaaccatcattaaataatagtgaatcattagttatcccataagtgagctaatgtttctaagcaaggctaagcaattatatctaatatctagttgaaccaatataaataaagctcaactagtcaaattataatatcccaaggtatcaaggaataaggtaatcaagaacaaaagggctatagcaaacaataggtcaattccacccaatgacattcgaaaatagatgcaatagttgaatagaaacaatagctttaaataggatcaacatgctcaaagggttgtttgggatctgtgtgacttgccttgctggccttggaactcttcaaactcttcttctgcgaaaacggactctccggaaacgacggaatataagcagaaaagagcaaaatcaccaaaacagcacataaacaagcatgaacagtacatgtggatatttttaaagtgtaaatctcaattttagaaaaatttagagacttgaaccaactaaatcggagctaagatgaattagttatgaatttttaaagattaaatcggattaaaacacttatatcggttaaaattgaattatgacgcaataatgaattatttttgaaaaggaaaagaaggattattgcgtcagcgggctagggtttcggtggaccgggcgcacgggcgacggttcacgcgaacggacggccgagatcgatccaatccaaaacggacggccgagatcgaacggtccacgaccggctcacggcggacgaccccgatgacgtcggcaatgacgtcaccgacagcggcggcggctcggcggagcggacggctcgggcggcgcacgcttgccggcgaacggcggcgctaggacgcaaacggagggcaccagcacgtagaggacgacgcggcgaacacaccggtgaccaaaacggcggcggaagaacaacgaacgacgacggcgacgaggaggaaacggcggaaaccttcgggttgtcgacggcgacgaagctccggcgatctccggcgacggcgaaggggcggacgaggacggcgacgacttggcgagcacaacggtggccttcccgagcgacggcgacggctgaaacgacggcggcgcacggctggagcggcggcgacgacggcaaagctagggcacacggcgctagagcgattccggcgacgagaggcgaaggcaagggtggcgacgggtagaggagacaccgggggtccttttaaaggggctcggaggcgacggcgaaagcccacggcggcggcaacggcgaaggaaagctcggacttggagagaagaaagccgatccgattcgaactcgaatcaaactcattccaaaccgatttagccgaagattccaaaggagaaaaggtagaggagatcccggagatcatttcccctctttcaattcggccggagaaggaaaggagcggccggatttggaaagcggcggcggcggcggcgcgctagggtttcggcccgaggaggacgacgatcccgacaggtgggccccacctgtcagcgggcggacgcgcgctcgcgcgcggcggactgggccggctgggtcgaggagagagaagagaggttttgggccgactttcggcccaaagccaaaagagactttttaaaacctttttcaatttaaattattccttaaatgcaattccatttattaaaaatacttccttagctcaaataaatcccagaaaaatctaggaattatagaattaagcaaagtatttaatgaaattttatctggccacattttatattggaatttattaattaaaattagattttctcttcaagacttttaaaattatttctaaaaattccatttaaacaacaatttataaattttaaattttcagggtgtgacacatggccgccctaagtcggttcatatcgaggctgggagagaaggcgctacccttatttaagctcctcaaacgctccgggccgtttacttggacggaggaagctgaacgtgctctcactcagttgaaggcgtatctcagctctcccccagttctggtcgccccggagccaaatgaaccctcgctactctacttagcggcgaccccgcaagtggttagtgcggcgttggttgtggagcgcgatgaggacaatcctcattccgcgcacccccaccctgtgccggcttggcccgggagaaagcagggaggagaggcccccgagccgaacgatggcccaaggcccccgacgaccggagcaggccctctccccgcttgtcagacgatgccaggtgcccccgacccccaaggtggcccgagggccactgcgggaaggccgcacctatcgccctctgaccccgaggctaaccctgtgccgactcgacccgggagagagcagggagaagaggcccccgagccgaacggtggcctaaggcccctgacgaccggagttggccctttgcccgcttgtccgacgacgccaggagcctccgacccccaggacggccccgaggccactgtgggaaggccgcccctgtcgtcctccgaccccgaggtcatcggcacagaagaagagtgcaccccgcgaggccgcttggacaaagagcaccccagggatgtggcccctagcgaagaggatcggccccaccgaaaggtgcagcggcccgtctactttgttagtgaggccctccgggacgccaagacccgataccctcaggcccagaagatgctttacgctattctgatggcttcgaggaaactgcgccattatttccaggcgcatcgggtcacggtggttacgtcttaccccctcggccaaatcttgcataatcgagagggtactggacgggtggtgaaatgggcaatcgaactttctgagtttgatttgcactttgaaacacaccacgctatcaagagccaagccctcgccgattttgtggcagagtggaccccagctcccgagcccgtctcagtccccgaggccagctcgggcccctcgcagctgcctcacaccgcccactgggtgatgcagttcgacggctccctgtctcttcagggcgccggtgcgggggtcacgttgacctcgccgagcggagacgtcctcagatatttggttcgccttgactttcgggcgaccaataatatggcagagtacgagggactccttgcgggactcagggtggcagctggactggggatccgccgcctcctggtgttaggcgactcccagctggtcgttaaccaggtctgtaaggagtaccggtgctctgacccgcagatggacgcttacgtgcgccaagtacggcgtatggagcgccattttgacgggatagagcttcggcacgtgcccagacgagataacacggttgccgacgaactctcacggctcgcttcctcgcgagcccagaccccaccgggcgcctttgaagaaaggcttgcccagccgtcggcgcgacccgaccccttaggggagacggacgcgcctgacaggcccccgaggcccgtcggagtccaggcctcgggacccgaggggagcgctcccagctcccttagattgattgcttggatcgctgagatccaagcatacctcacagataagactctacccgaggaccgtgaagggagtgaacgcgtccagcgcatctccaaacgctacgtgctggtagaagggaccctctatcggcgcgcggctaacggaatcctcctgaagtgcattcctcgggaacaaggcgttgagcttcttgccgatatccatgaaggcgaatgcggagcccactccgcctcgcgcaccttggttggcaaagcctttcgacaaggtttctattggccgacagctctcaatgatgcggtcgacctggtcaggcgatgcagagcgtgtcaattccacgccaagcaaatccatcagccggcccaggccctacagatcataccactttcatggccatttgctgtctgggggctcgatatcctgggaccgtttaggcgggccccgggcgggtttgagtatctgtatgtcgcgatcgacaagttcactaagtggcccgaggcttatccggtcgtcaagatcgataagcactccgcacttaaattcattaagggcatcacagcccggtttggagtgcctaaccgtattattatggataacggcacctaattcactagtgaacttttcggcgattactgcgaagacatgggcatcaagctctgcttcgcctcgcctgcccaccccagaagcaacggccaagtggagcgcgccaatgcggaaatcctcaaaagccttaaaaccaagaccttcaacatcctcaagaagcacggcaattcgtggatcgaggagttgccagcggtgctctgggcgaaccgaaccacgccaagccgagcaaccggggaaacgcctttcttcctcgtctacggcgcggaagcggttctcccatccgagctcaccctgaagtcccctcgggccaccatgtactgcgaggctgatcaagatcagcttcgcagagatgacctcgattacttggaagagcgaaggcgacgcgcggccctccgagccgcacgctaccagcagagcctgcggcgctaccatcagcgccacgtccgggcccgatcactctgcgtcgacgacctcgtcctacgccgcgtccaaacgcgtgctggattgagcaagctctcaccaatatgggagggtccgtatcgagtgatcggcgtcccccggccgggctccgttcggctggccacgggcgacggcatagagctgcctaacccgtggaacatcgaacaccttcgtcgcttctacccctaaaggggaatcgggtgtcaggtttcgggctcgggccaaccccgcacccccatcgggcgtgcagggttggccgggggctaccacatatgcatattcttgtttctcttatatctgtatttcaataaaagcattttcgatttcctaagggctgtatctgtgctgttgtttccttttgaaggatcttgacttgaaataggtcactcgtgttcaatcttgccctcgggggctcgggtcggctaaaaccgccaaacggggcccagaaccgagccgtgccccggggcgtggtgaactccgggggggaatcggcaaaaacccacaatcgggtcacccataaccctcagtcaccgcgctcccggcctggccagtctcgacatgtggatctccccaggcactagccccgacccgagccatttgaggactaggacctgggcacgagcccttgttcaagccaagacacgaaaggatcgcggcacagatatcctcgtctcatacacacaacaaatagaattgacacaaaaaatttcctctttatttgattgcagattaaattagtctatacaagaagggggcccgaaggcctcggaagaagaaaagaagaaactatttaaagattggcgggggcctgggcgctcactccgatgcacccgggtcgccagcctcgtcgccactatcgcccactccgccgtcatcgtcctcctcgtcggagttgggggcgaacgcgagccgaggggccgaaccctcgaagctgtggacgatatggtcggcggcgtcccggacctgcgcgcgcgcgccatcctcggtcccgggagggaactcgtccagcgccgtccatggggagaagtcgggatccctggcttggtaactcgccagtacgagctccaccgctcctcgggcgaggtccctcgaagatgacttaatcgtcctctcaagctcctcggggagccgttggagagtcccggctatctccgagaggcgctgggcgaggcccccctggttggcggcgtacttcgcagttcgcccgccccagaggcccacctgccggccggcgcggtctagacgggagacggcgtcccgaagcatgccgggccctacctcgcctgccaagcggagggcctcgacctccccggcggatgagtctagcgcgccctgcagatcggcgatggtgtgttcggcagctgcgaggcgggcggttaagtcgctgtcgcccatggccaccccgccgctgcgtgcccttgcatccagctcccttgcctgcgcctcgagttcagcggcccgctggttcagtgcggccctctcggcgcaggcactttccagattgcgacgcgcttgttcctcttgcgcagcctcgcggagggacaggctgtccgccagccgttgcgccgcggcctcggcctcctcgagagctcgctcccgctcggtgagcgcgtcctcgcggaggcggagcgcggactcttcttcggcgcaggcggcttcgtgcaccgccagtgtgacctcccgaatagcaacggcggcctcgcgatccgccaggtccctctccacggcgcaggcacgctcttctagcgccatggcacgggcctcaagggcttcctcgcgctgccgggatgccacctcggtctccgccacccgcagttctcgggcagcggcagcgtcaaggaccccccgggcggcgtcgagcttttttcctagctccgcctcccagctcccgtattgaaggcggagggtgtcctgcgcctcgttcatcacggtggtggcgatgagggcagccccccgctcctcctccacctccttggcgatctcccccagcaccttccgacgggcttcgagctctgagacgtgccggcggtgtgccttgcggcccacctccaccatggcctccaccgagcgtcgcccctcttcgacacgcgcccatgcggcgttgagctccgcccgctctgcttgcagggcctccacctgggcacttaacccgtccaacaccgtggtgtttgcgacggctaaggcctgcagaaggggttctgcgctcagtggagcaacggaaggcgtggggaagagccgcctcgaagaggatgccgcgcggctcggcccgccgatggacgtgccggactcagggatgtcccccagacctggcttgtcctgagcgttgcccgaggaagtgggcccaagcgatgcgcccgcggcctcgtcgcgagttgcctcggaagtcatcgccgcctcggcctggcgaagtctggcctcctcccgagcggcttcttcagcttggcgagctcggacggccacctgggcagcttcctcggcttctcgaaggcgatccgcggcctcttgccggtcagtttcacgggtcgcctcggaggatgtcgtcgcctcggcctggcggagtccggcctcctcccgaacggcttcctcggtctgacgagcccgggcggcctcccgagcggcctcctcggcttcccgaaggcgatccgcggcttctcgccggtcggattcccgcctccgggcctctgtggtcgccgggtcctcggcctcagactggccggacttggaatggcgggagggacgcgacgggatctcgctgaaacagaagaaataccagaagacaaacaagatggatgagtgaaaactcgtgttgagggaatgaatacggccgcaatgggcgtgggacgaacctgcgagggggtcggttaaacaaccaccttggaggggaaatgaggtttccccgggatggttctgtcccccccgtcttgcggagtcattttttcttccgctccccctcgggatgcgacgtcggcgtggccccctccgggcgcctgctgctggcacgggccgccccgccccctcggggaggagatgggggaggggttccttcctgcttcctcttcccccgggcgtcggcagggcggccgctccccgggcccccgacgcggggcccagaagcacgaccccctcccggggtagattgttcccccctgcggctcccacccgcgccatcgtggcctcgaggagcccgctcctccgacgccccgaccgcctgcatgatggtcaggatggaggcgcggtctggatcgctacagagggggaggactccttgaggaatgagggatgcctccacggagctgagattcagcacccgttggaccactatcttgaagtcctcaggagcccagtcccatctgaccccctggtgggtcctcatacagtcctcggacccggtgtactcccaggcgccccgggcgcgccgctggagtggcgcgatccggcgacgaagatagtcgccgaacaccatggcccctgtgagcccctaggatcgcaggcccgccaggcgatcgaggacggcgtcatagccatctcccagatctaccggcgcccgccagttggaggcctgcgctggaggctggctcggaagtcggaggcgcgcttcgtcggcgaggggggtgtagaaccagtcgctcttccagtcatcccacttcttgcaaaggacgcagggaatgtagcggtttagcaccggcccccgcggctggaagtagcaaccaccaaccaccgacggcggcgacaccggctgtacgatgaagaaccaccggaacagccgaagggatgggcgcaccccgatgaacatctcgcacaggtgcgcgaagatggccaaggtcattaccgcgttgggggtgaggtgcgccatctggagatcgtaaaactccagaacatccatgaagaaagaagaaaatagcggaaccagccctgccatagcaaaagggaggaagaagacagaccgccccgggtagcgtggcgccgggcatccctcgcccagcgagactatctcccggccggtggcagattccggcatgaagcggcgcggcagcccggcctgtctctcgctcacgatgcgggaaggcggcagcacgctaccgtcaagcggagcggagccccgtgccatgacgccggaagaagagatgtttgagagcgagcgcgtgtggcgaaggtagggcacaggaaacaaggagtcagggcgtaagcggcgaagacaaggggaataatggcgaaaggaaggaagcaaatctcttcctcggcgactttatacccttgccaacgctatgcccggctcctcgtttctcgcgcccactatctgccccctcgtttctcgcgcccacgcttccactaatcccattcgcccgtttgcggtgcatgaggtggatatgcggctgtggcagtcgagatggaacatctcgtgcgcgcgttaatcacgctcgccgaccgaagcgccatcatcatatctccaggaaaaacgaaccggcttgtcccgattcccgtgttactcgagtaatgtggcagtcttgaagagaccgctcattattgacagccgagtaaccattgccgatgtgcgtgatttgcgaccgttgggtttctgcccaactgtggagaccggtcccacctgtcaccaggccttaggaagtggcgtcacacccgaccgcttccctcgaggagggcgatcgccctggcataacgccgggggctactgtcggtgacatgggaccgggagtatcatgacttagagacttgaggcagacacgatcacccacgtggcctaaccccctcggggggggggggggtcgggcccgagggtgatacggccgcccttctctttgtcttcccgaggggtcggaccgctcctgtctcggccccgagggccaaggcgccccgaccccttgtgggttttgcgccgcgtatatggggtaggtgagcatagcggggctcacctaaccacatttattgcggtttggacgagcgcatcacgccgcatgtaacgcagtgcagcgcactcgtttatccggtctgtgaccagaccggtcagatcgtgggttaggtggcgacaggcggtctgacgcacgcctcgccccatcccgtcaggacgagagcctccaagcactcgtccctagccggagccggcgtgttagctcctggagatggcacgttggttccggtcagatatatgccaggcttcatcctaaccattacaggcaagatattgtatgaagaagggcgaaatgcagattgataaactgacacgtggtcgacaagaatgaccgatttgtgaccggtctgacactggtcatgtcgtcagcagacagccatgttcccacgtcgcgcctgttccggcggaagtggaggtaggtgtgggccgtcccatcagaaggtcattcggacggcaaccatacaagtctccgtctgtttatgaaaagataggataagtccccacaaaaaagagagagatggggcatgtggtatccccttgagatataaaaggaggaccttgcccacttagaaaagaaaaaaaaaaacgatcccagaacgatcgggggctggctggcactttgtagcttctccatacacagatccaccaaaacacaggagtagggtattacgcttctcagcggcccgaacctgtatacatcgcccgtgtcttgtgctttttccattctcgcgaaccttccacacacagaccaggagcttagaacctcacccagggcccccggccgaaccggcaaagggggacctgcgcggtctcccggtgaggagccccaagctccatcaatttgagtataggaatgttgtactattaagagggatgtaacgtcgatgtgtttgtgtatgtctcattgctcaaagtgacccatcctttgagtggttttagacattccttttggttgatttgagtagttctctttgtgagctttccatagagtccaagatcatcaaacggacttacgagcaaaaagttatggccgttttgccatgtgtttttcggaaaatccgaaaaaattccggaaagtccgaaaatatttcggaaattccaaaaatggctgcgatattgagattgtcttctgttgatttttggatttgcccgaaatgcatttcggaaattccgaaaaatggaatcttggcctccaacggctagttttgagaggctcgggtattgataacaacggaattttgcatcagactcggagaggtagaagaaagttcgaagcggatttggtgcagaatcgagttgaattcagagtcagactgtgcatcggttggacatcatatcggctaaaaacagagcaaatgcttagcctagccgatatggcaagcaaccgatatggtatgacttggggcttggtttgggcctagactaagataaccgcaattggagcttgattaaggcaattgtatctattaattaggatatttatgtcggtttttgttagagatatggtaagagaccaccgtgtggtcttgtttgtattttatctttaggaaagtttgagtcgtgtctataatggactaagtttgtactcggggtataaatatgaacccgagatcattgtaaaaaagggacgacaaatgcaatacaactttggcgcatcgccaccctttttgttcttcttttcggcgagttctctcgataagaggtaacttgtctcgatgacttgtgctattggagctattatgtcgatttagatattttagtccttctatcatgaccatttgctatcatatgtcttaagtaatctagtcttagtatcccgatttagccctatcgactggttctcgctttagggttctcactgatatcgactaaatcatcttgctagattagattagcaaaggaatctaccaccctaaaaagtggttgccctatcggctggttctcgctttagggttctcactgatatcgactatagcaaaggcatctaccatcctaaaaagtggttaattacttgattgtttagactttaagtttctttacatactttgtaatagtactccctccagaaccacgtagccagcccaaccgacgggcgggcccacttacacataccaccccacttacactttcgtcctcgcttcgtgtaaaagggttaacccgggagtaacatggttggagggaagaggccttataagttggttccactcgtgctaaactagcaagatggtaataaacatgcgcacacagctcacatgggccacacaggcctcatcctaattgggccaggatgtcacatacactccccatcaaaggacccgacgtccccgtcggcccaacttacccagccacataggcaaatgtctaggaacacaccccctaagatcttagcgcacgtcacccccctccccctctaggcaacatcaatgccctttcagttttcaagcctaccccaaaaaccaaagtgcacggggtggatttggtggctgggcatgccaaagtccaagttgacatgatcaagtcaactgacctctagagatcccacaaaacgactaaattttgaaactgggagctacacgtgggacctttatccaatggcctaaggatcaaattgtcataaggatggttcctaagtcaaatgcaccacgagctccatcgcctatctccactccagctcgttcagcccctcctaccatcgaaggcgcaccacaagatgatattgattttgggtttgattttgtggaagctgacgatatggctaacattctcccctcctcagaaaaagagcaaggcacattcttctccaccagcggtatctagcaaaaaagccagtagagggaaaggaaaggaaaggtgacaacctcactcttggctgttaggaaatgatcggcagataaacgatgaagaacgacagatcaatcacagaagacacgagatttatcgtggacaaccctcctaaggcacgagagaaaaaaccacgggcgccagccagcaaatcttcactatataaactcaacatttgctcccaagaagctagatataggcaaggaggtatcagtttgtcctaagagcctagctcagagcagctacagttaggcatgccattggttggagaccacgagcttaccaagatgggtccaacgtaccgagagttacacgggtactacatagagaggtcgaactcaaggagaaagaatagagagatatagatattgggttttcatggcccagagccatttcttgggccatttggctatattttaataggcttcgacaatctctatgacctcttgaagctgcgagcggtggacacaaaacttcttaagtattacttgttgtagccttcggcgacgggcctccgcttgctccgaccgaagttggcctttatatgtgtgtaaatgaatttggatcacaactcaacattggctcccaagaagctagatataggcaaggaggtatcagattgtcctaagagcctagctcagagcagctccagttaggcatgccattggttggagaccacgagcttaccaagatggatcaaacttactgagagttgcacgggtactacatagagaagtcgaactcaaggagaaagaatagagagacatagatattgggtttttatggcccagagccatttcttgggccatctggctatattttaataggcttcgacaatctctatgacctcttgaagctgcgagcggtagacacaaatcttcttaagggttattgacatgattgtaagttaagttggaaggaggccaatgggcaaccaatttgggcatttgacaggttgacccaggaacgatgcaagttcactgcaaatgtgatacatatacaaattaaactccagtaaaagcatcaaaacctgggcacaaaaagatgcctgaatcgggctacattgcaagttggcaacgtattaaaagtagcaggagcagcagctagctagagaagtagcacagtttcaaagatcgagttgatacaggcctcgtatagattccaacccaacgtaaccactaccattctcgccaaacagactgcccgcgctattctgtaggctcagatggatagcgcactgttttctcttctcttattcacctctgtcatggtcatcgctgagccaattatcatcactgcatgagaagctagtaaagaacacacgggatgaaggtagggcttctggtagtcatagtggccaatctcccctggccttaaggagaagaagttttccgacatgcggaaatgtgccactggaaattttccattcttgacagtattgaagacggtttttatctcttggtccttcttgatgggaagttgaggttgggatttgattctgaaattacttgcaacctgcaaaagagtcaaaacttagagtcaaggtaaaataatgaacaatattgtcaggcctaagaattgatcatgaggaaaattaataaaggaatgttaattttgaaagacagggaacgaaaagtggactactggattttgatggaaataccctattgattccatatctatatggaattatggacaagaagtgtagcaagaaatgcagtttgtgcctttgtgggaagaaacaagtaaacaattgagaactggatcaaagaggtactacaacctcaattccttgaccaaagcgcaaacactagatatgaaaatgaaaataatgtttaaatagtttctaaggctactttgttatggcagattcactaatatatgactaggaggacagtttaaaaatagatgcacatcatattatgcttccaaacctttctggaacactagtccagtcttgaaggtttaaactttaattccactgaaatttccaggacaaccatgaggaatggccactgaagcgtccgatacttatgatattgataagaaagtcgacaaagaagggcatcttggtgtgacagaatgcaattgctcatacaaggtgttgcatcttcctgatatgatattaattaattgtttcaagaacaccggaaatgtgtatttttactaacaaaatatggaattgtggttacaataggattatgtgcaggatattcttgtgagttatttttgtccaggagataaacaaatggatgattgcataccaactaattaaaatcatgaattgcagcttggtaacctcactaaaccttacatatgatcctccttttaggccttattccttttgtttctgaaaatcatggtgtggcttgtaactcagaaagcagggcataggaatatgcaaaatacaatcactttgcaggaatatagccatcaactagtgcatattttctatttgcaaaatttatgaacataaacagatgaagtagtgctactgtgcttgatccaagagcgcctgtaatttttgaagtaacaactaaaataaaatgactataaaggcacactttagcctatcaaacaacacatgacatgatacatctaaaacagatattacctcaggttgttgctttcttctgcctaggacaccacattcttctagaatttgcagtacagtagcaagtcgatgattctaatttcttttccaacaacttccttgtattcttccatcaaattatcagtggataaaatccaactgaagtcctgtggtggttccaaacaagcatactggtgtttgtaaatggactccattgctcccaaacaggaatgcattgtgcatgtatctgttagagaagtaagatgatccaactgtaaaatctttgcatgtggatgtgaaatcaaataacaagtaaacaacagcaaggaagaatttcaagatacttcatgtgtaccagaatttccttggtcacgcagaagtgctagatatattttgtcgtcttaggtctcccagaccatgtgaattctttgcatacctaaaatatagggcaaaaataaatatgtgactgttacacttcttttgatggaaattgttacatattgtcattgtagaataaattgtgatgagagtaatgtgtgtaaaagcttattttaaataacactcgcaaataaattagcataatctggtttcacattacacatcagaaagatacaatttgcacatcattgcacacagggctgggatacaaacagagggtaaaattaagtttcccctggctctttgaaaagaaaaggttttctaacatcataataaggaaaaatcggtaacacaaaattttaacacttatttcatgctgcattgcaaatgccatgaaaacgaaccaaaatttcttctaacgggtatccttttttaggaaataaaaagaatatgtttccttttcttttacagtatataaactttacctggtgtatggtttcatttgaacttgcagagctagaaccatggaagtcatcagattcaagtgcatattttgattgacttgtagcgatagtgttccatttcaatatacactttcgctctatcatatcatcaactaattctctgaagactccccctctagcagatacactagcagcttcaccaaacatccacaaacagtgtctatatgaaaggaaaaatgcagccaatatatatagctgttattagaagctaaagtaacatatacagccgaatcaaattttgaattcaatatttttaacgaaccttgctttggtaattgcagcattgatcttttcaatctgaagaatcgtgttctcgtctttgaaaagcattgatagaataaccacttgataagtttctccttcaaaactatcagcagactcaatgtgcacattgattttattgtgagaagcatatttttgtctgagagaacttttgatttcactaatattgctgccacacagacacaggacaccaacatcaatcacttcagtatcttccagacctgaacaatttttttacaaagaacgtaaattaaggtctttatagtattgctgcaaaaacagcctcaaacaactacaagtgacagctatctagaagacataccttggaaatgatctcaagcatgtattggattgtggcaagctcaatggtgtttttctctttgcagctaggcccgtctgttccagtgacatcaataaagcaataattgggaaatttaagacctttgaattttttgttgtattcaggagaaatacagtcgcaccatttgtgattctcccttcataaaatttctcattgcggaactgccagattgatggatgaattgcatattgctcagtgagcatatgcttccgaaaacccaaattgagcaatcttttgaaaggactcatagtaaacctggcattttcccgtacctaaccatttcatcaataagatatatcatttgcatcagccagcattaatattgtctagtttactgtctagtcatgtaaacgaatacactagaaaatcagaaagaaaagattaccttgcttggctgcaaattgaagtcgtcgcctagcatcaaaatgtgtgtcaccagcaggcgcaatggaataatgaggtcgcattcgttgattttggctgcatcatctactattaataaattgattggttccatagctgcttcatggagccgaaaagttgactaagttgtagaaatgatgactttagcatgtttgatgcagaagtcctcaagaaacttcctttccacaaactttggtaatttgagtgagcttctgaaacttcgaatgaaatccacgcattgcagccttaaataattcagtttagaaggaactgaacttaatccaaatgtccactggacacgtttgtcgcgtaacctcccatgacataaatcctcaaaatccttcgacaagctcaacaagtttttgttatgtcattggcaatatcaacagacaaataaatttctgaaaatttttcttttagatttgtcaaccattcttttctcatgagaagcttggtaaacttgtccttgaatgaactcaatgtgaacacgagaagactattggtgctacatatgattcttgtggtctcatgatcacatttttcagcgcagtatggatctagattaagtagcactaacaattcatgcaaccatattttaaagagagaatctattctataccactaagtttagcccgtgtttagttgcaaaatttttcttcaaacttccaacttttccatcacatcaaaactttcctacatacataaacttccaacttttccgtcacattgttccaatttcaaccaaactttcaattttggtgtgaactaaacacagccttattcaagttcaacgatttgttatcgatattgtctctttctataatataccggcgactttatcaattgttctacaatatgccattgggctagaccttcttttcaaaaataaccaaaatacccttagaaacatacaagattaacaattgatttatcttatcagaagtttcaaaaaaatataatttttttatgtggcctccttacacaacatggaagtttgaatacaagtttcaaattttttctggtatatttagtttttagaaataatatttttttatgtggtatgagagagaatctgcttatacaagacataatagcattaaaatatcttatgtagtgtatgaaagatgattcataataaaaacaacaagaaaaacgtatttatatagcatataataaataagttatatttttttaaaaaaatagaaatataaaaagcttgaaacttctttcatacgctacataagatattttaatgctattatgtcttgtataaccagattctctcccacataccacataaaaatatttttttctaaaaactaaatataccaaaaaaattgaaacttgtattcaaactttcatgttgtgtaagcagtcctcataaaagttttcattttttaaaactttaaattagataaatcaattgttaactttgtatgtccataagggtatttcgggtatttttgaaaaaaatacctaacctaatggcgtattgtaggaaaattaataaagtcgtcactatattatacaaaatgacaatgtcgatggcaaattgttgaactcaaacaaactcggtggtatagattagattctctctattttaaacaagggttaattggatccatataccactacaaatatatcaaattaggaaaacgccactactattcatgatatcggctaggtgccactggaatttcgaaaaattagatccatgccactccgtcacgtttttcattcactccccattaatttcctaactccgtgccgttttccaacttcggccgagcggtggcgaaggagctcggcgaggtacgtgtccaccagccactacgccagatcagcccatctttgacgacctatctgtgacggaccaaaatatctcgtcacagatactatcacctttgacgggttaaaataaatctcgtcatagatgaggctaaagaaaatgatccgtcacaggtaaatactcacctctgacgggtatatataaggacccaacacataatgattgtgacgtgtccacatataaacccgtcactgatgagtacttacctgtgacgggttttaagtttacacccgtcaaaggtgagtaacctcacctcatatattcaatcaattttcacttataaaaacggaaaccccaacccttccacaccggccaccaccccaacccacccccaccgcccacaacccatctcttttctctcttctttctctcttatctcttctctcttcctccaccatcgcctctcccctcaaccgtgcgccggctgcgtcaccacctccttcgcccctcggcgtcctctaggagctcggggtcgccacctccttcgcccaccgtcgacctccaggaggtcgggccccgcggccttcaacatcgatgccgccgccacctcctgaccgccggaccgccggtcaccgcggggccttcaacatcgatgccgccgccacctcctgaccgccggtcaccagatccagccgccgatgccttctcccgcctcccggctgctaacgcgcgccgcctgccttgccaggccaggccaggcgagcgagcgcgcgcgtgtgtttcccctcttctctccaccacacatgcttcaagtggctaggagggcatcctcccttttaaggaggtccccttctcctagaataagcaaggtggtactaaactccacatgcatgccatcccatgaggtgggcttttgtgattttccaaagaattaatacttgaatgggccttagcccatctattaattccaacaatcccccaccaaatctcaaaatcccactgagatttgccttttccaatgtactgtttatataccagcggttcgatggagaccgattaaggttgaacatccatctagaacttcaagctacacttactcacaacttgaacaatggactacgccttgaattgcaagtcttgtgcaagcaagtttcactcagagtcttatctggtactagaccgtctgtagactacccctcgggtggagtgtataagtcatactcctaggtctttagtaagcttcctagaagattcacccaaaatcttcatagactgcgaccaacaagctcacaaaggtgagttctttcaaaaatgctctgcaggacaacatctttgctaattaaagccaacagaactcattaaagcatagccaacctgccttgcagctcacgagagtatatgcatcttcacttagagagggtatatattggtactctcctctagtttactgatggtttgttcttcccaggttctaattcacaggatctccaatcacatagaatgggttaccaccatagtataactcacatgggtctcaaacccatctccttcgatgcattgtctatcacatttcgtgatagtccctttgtgaagggatctgccaggtttctagctgtttggatgtaatccaacgttataactccagagtttctcaatttcctgacagactttaatcgtcttttcacatgtctagacgatttcatattatccttagaactattcactttgacaattaccgtttgattgtcacagttcaaaagatagccggcaccattttttcaacaataggcaaatccattaatagatcacgcagccattctgcctcaacagtagcagtatgcagtgccgtcaactctgcttccatggttgacctcgtcaaaatggtctgtttgcaagacctccacgaaacagcaccaccacccagtgtgaagacatatccactagtggctttgatctcatccacatcagagatccagttagaatcactataaccctccagtatcgcaggatatccagtatagtgaagccccaatgccatagtacctttcagatagcgcattactcgctcaagcgcacgccagtgatcatctcctagattagaggtaaaccggctcaacttgctcacagcaaaggagatatcaggcctagttgcactagccaggtacatcagcgagccaatgatttgggaatattccagttgattcctagcaattctcttgttcttgcgaagcaacaagctaggatcataaggtgctggagaaggcttactatcaatgtagccaaagcgattcaagatcttctccacataatgggattgcaagagtgtaatcccattctcacctctaattagcttaatgtttaggataacatcagctactcccaaatccttcatatcaaaattttgagacaagaatgatttaacctcatttatcacctaaaggtttgtcccaaatatcagtatgtcattaacatacaagcacataataactccctcacccccaccatggcgatagtacacacatttatctgtctcattgactgcaaagcctacggatgtcaatgttttgtcaaatttctcatgccattgcttaggagcttgtttcagaccatacaaagacttcaataatttgcacactttgccttcttgaccttcaactacaaacccatcaggttgatccatatagatctcctcatccagctctccattaagaaaagttgtcttaacgtccatttgatgaacgagaagaccatgtgaggctgctagggaaagtagcacacgaattgtggtcaatctagcaacaggtgagtaagtgtcaaagaaatcttcgccttctttctgagtatagcccttagcaacaagccgagccttgtacttttcaatagtaccatcaggcctaagcttcttcttgaacacccacttgcaccccagaggtttacacccatagggtcgctctgtcacctcccaagtcccgttagcgataatggaatccatttcactagggacagcctccttccagtagtctgcatcaggagatgcatatgcttctgaaattgacttaggagtgtcatccacgaagtacacagtgaaatcatcaccaaaggacttagccgtcctttgtctcttactccttcgaggagcttcactgccatcctcctcagtgacatgttcatgtgtatattcagtttgttctggtggtgtgattgaactgggaattatttcagaaggttggctagaactactatgtgtatccttcattgggaaaaagctctcaaagaaggtagcatcacgagtctccataattgtaccaacatgcatgtcaggtacctcagatttaactattaaaaatctataggcaatgctatgatgagcatatcccagaaagacacagtccacagtcttaggtccaagtttgcgcttcttcgttattggtacattgactttcgccaagcacccccatgtgcgcaaataacaaagtgatggttttctcccaatccatatctcatatggtgttttgtccttatttctgttaggaactctgtttaacacatgattcgaggtcaacaatgcctccccccaccatgccttaggtagtcccgcggtgtccaacatggcattcaccaagtcagtcagtgtgcggttcttcctttcagcaatcccattagactcgggagaatagggaggcgtcctctcatgtatgatgccatgttcctcacagaataagtcaaactcgtttgagaaaaactctccaccacgatcagacctgagtttttttatctttctgtcaatttgattttcaacttctgccttataaattttaaaatagtctagagcctcgtctttcatttttaacaagtacacatagcaaaatctagtagcatcatcaatcaacgtcatgaaatatcgttttccacccttcgtcaacaccccattcatttcacaaagatctgaatgtaggagttctagtggtgccaagtttctctcctcggcagccttgtgaggcttgcgaggttgcttcgattgcacacaactatggcacttaaaacctttgacaatggaaaacttagaaattaaacacatgctggaaagccgagacatcaagccaaaattaatatgacataaacgtgagtgccaaacattagcctcatcatccacactgccacaaatatggttcacagacttattgtagaaatcagaaagggaaaagcggaacaagcctccgcactcataacctttaccaataaaatatccatgtttagacacgactactttattagactcaaaaaccaacttaaatccgtctctagtcagacgggagccactaacaagattcctgtcgatagaagggacatgctgcacgttcttcagttgcacgatctttcccgaagtaaacttcagatctaccgtgccaacaccatgaacaggagcatgtgacccattccccattaggacggtggaaccccgtgcaacctgataagaagaaaacaatgggatgtcagcacaaacatgtacattggccccagtatcaacccaccaattagtagactgattaactgaaaaaacagtaggtaaattaccatacccgcttccatctccagtattgccaatggtcacattagcagacttagaagtctgccctgcaggtgccttcatccccttgcgctgtggacacttcctagctagatgactaggttggccacacacaaagcaagtcctctcatcctgattaggattgttgttgttcttcttctgcttcttgaagttggtggtctgttgagctttgtatttccccttgctcttgttctgggccttgtgcacaacattggcactggactgcccaccatcgcccttagacgcggcgtccttttcccgagctttctcctcaacatcaagagacgctatcaacccctcaatggagtattcctgtctcttgtgtttgagtgcagtaccgaaacttcttcaagatggaggtagtttcgcaataatgcaccctgccacaaatttgtcgggtaagacacacttaaggagttcgagttccttagccatggtttgtatctcatgagcctgttcgactacagaacggttgtcaaccatcctgtagtcatgaaactcctccatgatgtacagatcattgctagcatcagtagcaccaaatttagtattcagtgcatcccacaactccttagcgtcggtcatgtgcatatacacctcgttccagacgatcgccaagaacgctaagaatgcatcccacaaagagagtagtggcttcctcgaattgcttctgctgttgagcagtaagaattccttcaggtttgccagtactcacccagaagcatttcatagctgtcagccacatagtgaccctgatctgccatctcttaaagtgcacaccggtgctgttgagcagtaagaattccttcaggtttgccagtactcacccagaagcatttcatagctgtcagccacatagtgaccctgatctgccatctcttaaagtgcacaccggtgaatttatccggcctcagtgcatcggcaataccagccatagtaaaatcacagcgcctataataaggtttttggattgttgagattatatgcatataatgatttaatatattccataaataaatcatgacattgcagatgtaaactagcatgaacgcatcattagatctacacatgtaaactaagagggcatcctcccttttaaggaggtccccctctcctagaataagcaaggtggtactaaactccacatgcatgccatcccatgagatgggcttttgtgattttccaaagaattaattcttgaatgggccttagcccatctattaattccaacagcttcatcgacggaatgcgtcggagaaagcggcggctccggcaactccgtcgctccgcctcctcgacccatcggctccgccgtcccccgcccatgacgctggcctccatgcccttggcctcctggaaagagtgacgggaaggacgggaagaatgacgggaaacgcgatggagtggcatggattcaatttttcaaaattttagtggcacctagtcgatatcgcgaatagtattggcatttttctaattttccatatttgcagtggcatggatctattgatccaattaacccaacccttagttaaaaaagaggagaggcgcaaggaaagcccgatggtatgcatagggcatgtgacatgcgagggctaaggattcgcagatttattttttaatagatagatatacatctaatagtctacgataatgagtccaccgttttaagtgaaaattaaggatgtgatgttttgctttttttttctcagaatttataggattttcttaatttaatggtgtgccatgtagcgaatgaggagtgtttgtaggagtccatgtggtggcttagaagtgtttataggacgtttaatggaattttagtatataatagatcacgagtttacctccagtttcagtccagaaatgcttgtccactcgaacaatcgtcctttgtctggatgagttgggttgtaacagcatgcttgcatttatggtgtaccatggtcagcaaggaactgaatagagcagtggctgctagaggaacgatttctgtccagtggtttctgtacatgccctttgaagcatggcatcagaatgcatcctagccatgaatttggtaacagctaaacatgctccagtgctatcgatcagtagtagctgcaatctctttctggatcatcagtgcaagacatactcaaggcaataaccaaattcaaaataacttgcaccaaaagagagtaaggtggatagacttacctaaatgacattaagtggaagtactgtaataattctattaactttcttgttcagaatgcaaaatgcagagattcttcgacatccataaaagctttccatatcatctcagaagtactctaattattctccataaaaattcagagatgatatcaattgttaatactttcggatgtcggcaatatcataccaattgccaagaatttcagtcaattggttgaggagcatgcctgcctgctctttcactaacatgtcatcttgctcaaacagttgctgttttcaccctttacacttgcttatccagtcatagttgccttaccagtatggcaaatagaggaacaaaaattcagcacgcatgcaagcagtcgagcacttctttctatgctttttatataagcattcgtgtatctacctgcatgctctgcaacttaacatcatgttctgaaaggcacctcaaccatgttgcacatgtcttcctcctctccactaatattaaccaatagacagatatactatcacagtatatatactctcactgagattggttgtcccctttatatttcaacacagcagtttgcagttccatcttgaatcaagacaaacacaatcaggagctagaggctctgccctctatctccaatgcctattcggctgcatatctttgtcaattctgcaaggcatgccatcaactcatcggcattcatttgtcggttcatcgcataccatcttagcccgcttttgattcacttatcctattttcttatcattgatatacttggttttgtttccttggtggtgctcaggccaagcaaccacaagtacaatcctcgctatgttgatatgtttttcctatcgacatctgcagttacagtcataggattagccaccatacaaatggaggatctttccagctctcagatagctatcctgactctcttgatgttcttagacagtaagatgttcctttcctttcttggccttgtccttgagtcaagcaagcaaaacaagcatgatcctgaaaaccgtagagtcagttcagttactgtgtgcaagcaatcacagctagaagaggcgactccccaaactccatccatgaactccattgatatcaagaagagatgcctcaaatacttagtgtttgtggtgctggcatacatgatcattattcttgtcactggttctctattggtgttcatgtacatagctcatgtttcaagtgctagagatgtgctaacaaggaaaagcatcaacaaagctctcttctcgatatcggtcacagtctcctcattcacaaatggagggttattgccgacaaatgagagtatggttgtattctcctcaaacaatggcctcctgttgctactcattggccagattcttgcaggcagcacactgttccctgtgtttctgaggttggtgatatgggcattgagaggactaagattagcaaaagctgaagagcctgacttcatgatgaacaacagcagcgcagtaggtttcagtcacctgctgcctaacttgcagacaatatttcttgcagttgtggaggttgcttttgtagccatgacagtcatcctcttctgctgcttgaactgggattctgtagtgtttgcagggctcagctccctccagaagataaccaatgcattgttcatggcagtgaatgcaaggcaggcaggagaaaattccattgattgttcccttgttgcgccagcggctttagtactattcatggtcatgatgtgagttcctctctttcaagttcttcacagtctcaggcaacaatcagaagagataacataacatggttgcttacatttcttaggtacactccatccttgacaaagttgttctcagcatgtcaagatcacaaacgaatcggcccagaaagcgacgatagaacaagcaaggggaaaccattcctgaagatgatggcattttcaccactcggcttcaacaccacagtgataatgctggtctgcatcactgaaaggagatcactctccactgaccctctcaatttatccacatttaacatcatctttgaggtgataaggtaacaaataacacttgcacacacacaattcttctcataatgttcttgctcacctccatgactattttgagttattcatcacccattgcttctgcacacagtgcctacgggaacattgggttgtccactggctacagctgctcgaggcagctgcagcaccaggaggggattgcctgccatgagaaggcgtacaacttctcggggtggtggagtgaaccagggaaactgattcttgttcttgcaatgctctgcgggaggctcaactcaaaggattccacaagcgcacgaactaggtgatgatgatcagaagcgatcagtatgcgatcgatgttctgcaagaatcaagaatgcagtgtaccatcccatcaaaaaaaaagaaaagaaaaatggatgccctcaactatgatctgcccctatgttcaaatttcaatgatcggcgacggcgcacttaccactggcggcggcggcggcggagggtgatgcccttcgcgggagtgccgcaccggagctcgccgccggcgaacagacggcgccgttgcaattcctgcaatttttcacaaatgcagacagtgaaaaaagcccctccttttcttaaaaatttaatggattaaaaaagagcacatttctccccctttaacctttattatatcaattagtaaattacattaatttaactgatcaatcacagccaggatcatgttgcatgcaagtatctagacgatgaacaggggggaacatgttctcaaatgaattgatagatgagaacaagtgaatgaacaacatatctaccaatgcttctgaagttctgaaacttgctacgaatgcattcatggtaaatgctagtcatcttctgcaaaccaagttgagcttcttcttgccaacatcagtcgcttgttggcgttttttatatgtgggcaaggcagctctggctttaaagcatctatttttgtattaagaaaacaattggtgttcatcatgctggaattatgctgatgaacaccaagagataaaatgatctcaaatctcttgcaacatcctgatacaatgggcgtcatgctcttaaatatataaagaaaatttgacacacgtgacttgtagagtagtgaagcttagtgcatacgaaaatgaattgtcctataattgctgctgcacaattacatatgaactttgacagaaatcataatgtcatggtgatggtcacatggtatatattgcttcagccaagatgaatctgtttattcgtccagaaaccagtgtcgcatcaaaatgaaaaaaaaaacaagcaatctgtgattgtatatatctatctgcatatgtttgaaaagatcccagaaatctcataaaccattcccctcaaggaactagtactgaatataaggagtatactataataaagatgaatcataatcagctataatatcactatttacagcaagaaataaaataataaagaaatagaacctaacaaactctgataagatcattgtggtatcctaaaaataacaaccaatccctaaaaaacaacaaccaaagtatccacagactgcaagcaaaagggaagaagctaactttgtgaaagcaaacccccactgtaccaaaacgatatgaacaccacaactcatgcaaaactacaagcatggaaagcatcaaagggcatcggtacacatcctgaaactcattttaagccatcactgcagtatattataaataaccatcaagtccacataaaattataataaaaaaagatatcttcattaaaataagacatcggaatacacatcacctatactatcaatatcactctagcttgcattcacccataaagcagttctggttcatgcctctcaatgtcactctagcttgtattcacctttaaaatgtcactccagcttatattcgcccttgaagcagtccggttcatgcattgggcgaacttagcatctcgggtaggatcgaaatagatataatcgtccccacacatgcctactctattgcctgcgcacttcccacaactaatgattcttgcattggtcagcttatgagtgccatgcgccatttctatgaagtccatgtcgccaccacaataattttcaatcggatgcgcaggatgcataatcctggtcccttcatattcacaataacaacaacgagcttctccaaaaaagacaataccaaaaaaaggttagcatcaaaatacaagaaagaatcattctataaattatatttaagaaaaggacacaatcatatatcaaacataccgtgttttgattttcttgagacggtacagcaaaaggatacatcatcatcatcattactgaattcagcaaagaataacttaagtccacttccaacttttggtcttgccaaaaagtttacatgtgaatatggacatttgaagtccaagaagttcatctggctgcccacacgctcatttgcaacacagattacttgaagatcatatagatatccctacaaccatgaaagaagtgaacttgtagaaaaatggcaattataatgacattatgaaaaggacaattacacactaaacatatactcttgttatcctaatcaatagggaagaagtgaacttgcaaaaaaaataaactacaatggcattatgaaatgggtaattccacaccgaacaaatcctttcatcattatcctaatcaaatcattagggaataagtgaacttgcagaaaagtgcaaccataatgacatcatgaaatggataattccatgctaaatagatactaaaaccaggaaagaagtgaacttgcataaaactgcaattattaatttataatgacattatgaaatgataattcggcgataacagatcctttcattatctcaatcatcaggtaagaattgaatatgcagagaagagcagttataatgacaatatgaaatagataattctgcactaaatatatattttcattatccaaatcaatagtctaactagagagcaatactttgaaagtagcacataatatggaatggaaagtactaacccttttccttagtgcagcttcaatctttctatgaaaaaaaccctgttgagtgacaaatttttccttgaacgctataaacatatccaatgcatctgtagacagatcaacaattgtctccaaagatttagcagagatgcagtttgaagatggcaacaacgtagctagctgaagaacatcattcgaggaaagtggggtagaagcacgcaatagtgatttaacggcagcctgcaccttaggtagagattgagtggaaaactgtacataagcttcgggctcaggatgaaacgatgcatccgctgcagccttgtaggcactgacatcccagctggatttccacccttccgctcctgccatttcaattgctttgcgaactttcagattattctttagcagatatatcatggcatcatgctcagaaatctcaggaatgcatgtaagcaatagcttgataaggccacgaagggaccgggactccacacgaacaaaggtggaggtgcagatcatgtccacctcaagtttctccatagcagggaaagtagagtcataccagagagtgttgacgatgatgttggtcacacaactgaatgggccatagcagtaaccaccgttgacaagggcacggtggtaagtggtaacgagcccgaacatcttgcataggtaatcgagagattgccttgaggtacttggcatgaatcttgtcaagtagaacagcccgaagtgatattgtcaaaccacctggcaccttctcacaattagcatcaccactagcattagcatcggtatggcagttacgaagccgccgttcatcagcaaaaatcattggattgtcagacttgtcaagcatgcgcggcttcttcttcagcattccagacagcaacaagatcttctcaacagacaatacatagctgcgatctgctagcacggtctgggtgacgaattcaagatgagacgccagcgaaaacgaaccagcaatgaagccgtcgacgtcaggctgcctcgccgatgatgctgcgcatgtaagggcagccctggcagcgtaggaggagatgtggaaccgttcatccttggtgttgtagcagcgatcaagctcgatgaggcggacggcgacgaggaggtcggcgttggcgaggcacaggtagcggagcgcatcccaggtggggaggtagcggaagtaagatgtgaggaaggtgatgaggccctccagcgatcgctcggcgatggttcgtgtctccggcggaggggagggggcgtcgccggcggcatccgacctcgctgctgccgatggcgtcttgatgcttgccttgcgcttgtgcttcttggcccggtgatcgggatcaggcttgtcggggaggaaggaggagagggtgttggcgatgatgttggtggtagggtcgccgaagccgaagcagacgccggcgccaacgaggcgcggggcaagctccggcaagtcgtcgagcggcagcacggcgagcgcctccttgtagtagccgtggatggtgcccaaaatcacggatcggttgtgggcgattccatccgaattgccgtaggaaacatccggcctcccgctgcgccgccgtcggccatccatcgccaggcggcgattagggtttggcctcgacgggggatttgatttgatttgatcttttctttttttttccttttcttttttcttttttgtcctttctccctcgccccatccggcctaatctccactcgacacttggacagacaaggtaaagtatgacagagagtgagtgggcctaaactgggacagattcgaggaataggagttctggatgggaataagttcactttgaacctcttaactagtgactgaatctgatccgtattctttaattacaataccggatatcttgaccctctaactattaaaatcggtgtaatttaactccctcgatagctttggagaatgatttcgctgacgtggtgtctatgtgccagtattgacttggctttatgatattgacatgacgcttaggtggcactacaattaaaatgggacatatttgtcattaaaaaagaaaaaatgtggggcccactggcatgtggcccccttgtcatcctctcctcgatccttcttcctcctcgctctctcccttctctgtctgtatctttctctctctttcgatcggtcgcatcgctgcctgccaccgagctgcgccgtgctgccgcctgttgctgccctctccttcaccttccgccgcatggggcagcacgtggatctcagcggcggcctgctacgggagcttgagctcgtaacggctccaaggtgtggcggtgctacgcgctcgtaacggcatgccaggaggactgcgactacctccactacctgctcctcagcgcccggatggccgacgagctccgcgcagcacgagattgacatgtacacctgcctcatctatctcatctctctcgtcgacagcagcaacaataatcgtcgtgtcacagtataaagcccttgtttcaacctcctctagtaataagataatttgggtggttcatctcaaaactgaagattatggcgtatgaagatgggcgagcaattactaatctcttttatgatgattcatctgatcgaagcgatatgctcaagtgatcatgtcaatgtttctgttgtgcacttgtacttgaatttctcctttgacgggagtgggctccatcacacgacggtgtcgagcggctctcccaactccatcatgttagaaaatgatagacacataaaccataaaaaacaataaatcaatcataaagacataagatttaacatggaaaacccttctaaagtaggagagaaaaaaccacggtatcccaaacctccggcgacgggcctccgcttcgctccatttaaagctggcctttattcgtgtgcaaatgaatttggattacaattcaacacttccatcccattaactcaatatttgaaactttttactcggattggaaaactttcaaatcaagattttaaaacttttaactcggatttaaaaacttttgactcaagatttatttaatctttgagttaatgtttttaaaattcgagttgagagtttcgaaatttgagatgtaagttttgcagtttgagttcaaattttaagctgaaagtttcaaatagaagtttttaaatttgagataaaagatctaaattgtaaaatacattaaaaaacagaaaaaggaaaaacatgcgctggagattaaaaaaatcatgaaaaaaggaaaacgcaccggaaagttggggagcgtgcaaaaacagcaataaaaaaggaaaaatgcgcagggtaggagcacctgctggcacgtacacgctagatagcaatcctctctcctcatttagccaaatcgcaagcataaacataacttataaaaatcaacattggcttcatgtacatagaaccaccaccatcacgagataacgttgccaaaaatattgatacagattaatgcagcaaaaaatacttatatttcagatatgaagctagagttttggagttttaaaaaagtaactgcaccctttgtattttgtggagtagattcacccatgttacttttaaaaaaatgtggatatttggttcggttcctacttcatcggataaacatgccctcatgtggtagatgcggcaggagtaaaaaaagaagaagtaaaagaaaaaactagaaaatgcagaaaaacaagagcagattattatgaatcttgacgaaagcaagggaaaatctaaaaaaaaaaatcatgaaatgatgagcatacatatactgaattttgtcacgaccacatgtccttatctgaccagtgggcccacgtggcatagagagagagagagagagatgcacttctttccgcccgttagacagattccccccatcgttccaactccctcaaaccccttcccattccggcggctctccccgaaaatttgaaatcgccgccgaaaacccccccaaaaacgaaaccgactcaaaaaaaaaaaaaatcccccaaatcgacattcctctccgcggatcgatcggccgcgaagatgccagccgccgaccccgccaccgcgctggcgccggcgccgaccccgccgccggcgcgcgggacggcggcggggccgcggctgctgctgctgcagtcgccgccgcccgccttcccgctcggctccaacgacgaccagctcgagcgcgcccgggcccgcgccgccgcccgcgcggcctccgtccgccgccgctccctcgccgcgtccctcgcccccagggcggcggcgcagcagcagcacgacctcctcaaccgcgaccaggtcatggacctcttccacaactgcatcaagctcgcctccgagaacgtacgcgccttctgtaccttaccccccctcgtcgttgttcttccccaccgccgcgccgaaaccctagggccactcgcgcgcgcctcgtattgagttcgccttctttgtgtttttgttttttccccctcttttccgatggggaatttgagcagaaaattaaccagaagaacacgtgggagctggggctcatcgaccacctcagcgagatcatccaggccggggaggaggacgacgacgagaccaatttccagaaggtgcggctgtgctgatttcttccattttcgaccttctttctactactaccgtgggaggagatttgtgacctcttctgacttcgattgagaaatttttttttaaccattttcttgtgaccaggctagctgcacgctcgaggcgggcgtgaagatttactctttgcgtgtagattcagtgcactctgaggcgtacaaggtgcttggaggcatcaaccgtgctggaagaggcgatgaggctggtaaatacccactagagtttcatagcgctttccaatttttactgtagccattcgattgtaattcgattttattcatgtgagtcagcttcgagttgcaaaagtattattagtattctgggcaccactaaactgtttcagttaaattcaaactaagtcaacttacatgatagaaatttggctttgtaccaaaaaaaatgtccatctataaattgatcgaacaataaatagaaagatgttttaagattttttttaagaaatcaagtccctgtgagaaatggccttttctgacttttggttcattggagcactcttcagttttcacgatcatgctactactgtatctcaaaaccttagatgataaatgatgcacgaggattagttgaattgcatttgatcatttgttttatttgttaggccgtgtttagtttcccccctattcccaactttccatcacatcatatcacatcaaaaactttcctacacacataaacttctaactttttttccaaactcccaactttcttcaaacttccaacttttttcaggaactaaagacacccttaaggtaaaagttaggcagtaattctgcaaattatcataaatacacctttgttgtgcctatagctttcccttggtaaatgcatgctgcttcattatgatgtcctgatttggtgttttattttacttaagattcagaagaaggtagcaatccaaagcattcacaagaaggtacaaacaaaaaggatgcagataggagggtatgcctatctgaattggttactgttcgtttttccacttaagttctgcttggttttttttctaatagcctagtgctgtttcatatgtgcagatatcacccacatcaactttggagtcctcatttgattcgcttaatgtaaagaagtttgatggtaagctccaagcagatcttttaaaaacttttttgctttgtgcttctgtcgggattactatcataggaccaaaagtttaaaattgtagagtataatattaatttattgcactttctgctagttgccttcacggttgatcctttgtaccatcaaactaccgcgcaatttgatgagggtggggcaaagggtctcttgtcatataacctcggagtatatgacagttgccgtgtgctctttgattcgtttgaagcacctgacaagtgcatcttaagtgatatgcaaactgagatggctgagttgattggtctttcatttgctaaaggtatgattgtcaatctgtttctattctgctgtctatgctctgcatttttttatttccatttaaggttttgtaatggtctactcttaaacagagcaaatcgagcagatgataattcatatgcccctctgcaatgatatttctcctaccttgagcaatatagtttatcagtttgatgatgaaaaccgaagaccacctcatgaagcaatttctaggcaaattccagtgatggaagatcaggtggttgacggtaatgatgtggcgaatgatgacatcacacaaaatgatatgcaaaatgattgtggaacttgggattttggaggttgtgatgatcaagagagcgtgtatgatgaacactgtgacccaatggatcatagctccatgaacggtcaagaggtacttcctgcaaacagtaaaacctagacacattttgtgtgtggttagagcatgcattttttgggggttgacagcttttgttcttttcttctttttatttcccaatgtttccaattactggagttttctgcgcagtttaaaaatctatgagaattgacattaaatgaatgtgagaaaacattgattaatcatggtatcaattaatatttttttaagataaaagtcaaattgagtaactttgtaggatgcaatttgatgcctattacttatccattcattcaccatccaatgacatttctttgattgaaatgtctgaagtactcagttcaaattatggtttatttgtttgttttctgaagtataaatatctgagggtatatttttttgcaggaaactgatgagtacacttttgagtctgctgaaggtcttgatgtaaatgaaagaattgacaaaattgcagatttcttgtcatttggcatgggattctctgcaaaaacaaatgcctgggcaggacctgagcattggaaatatcgaaaagctaaaggtactatgggtacatagtcctgttttagttttgtttcaggcaggcttgtttaatctaacctttgggcttacattcaactagatttggaccctgtcccaactaaacctgatgattcagacgccccaaaaaagacaaagaagaaaagaggcaaggatgaacctgacattgatttcagcaaagcattggaacatgatatgccaaatatctttgcacctcctaagaattcaaaatcattgctgctgccggcaaatagggctaccagcaataacaaacttccagaggattgccattatagacctgaaagccttgttaaattattccttcttccggatgttttggtaatggcaatttcttataatttttttcttgatatggatctggggtggttatagtaactatggatctttttgtagtgtctggctcggagaaggaaaaaaccacttggtaagttttctatgttcttgcattgtgtatttcacatgaagttttcttgttgccttgttattatatcttgaagtcctgttgtaaattctgaaggttcttaaattatttatcacatcttccctgttcatattacctgtgttactttcctccagctccttttggtatttgatatatgggttaattggattcatgccattgcaaatttaccgtattagaaaaataccactactattcgtgatatcggctgagtgccattataattttgtaaaattagatctatgccatcaccgttatattttctgtcagactctccttcctttcttctcctctcctttttcttcctcttcttcctctacctgctccttcttctcccttccactgctatttctgccactgctcctgctcctgcccaggacgtggacagcgaccaccaccagcagcagctcatcttccccatctctctccactgctattgctactgctgctgctcctccccaagaggccaaggcatgagcggtgaccaccaccagccgatatgacgaataatagtggcatttttctaatacaacaaatttgtaatggcatggatccaattaacccttgatatattggtaagttcatattgctacttaaatacttaaacgaaacaatctgtgaatcgtatgatgttagagtattattatctgaaactgtggaatgcaaataagtataaagttcaggactgggtttatttatagagaatgctctgcacaactccaagaaaggtggtaatgtgatacttatgttggctattaggtagcaaattgactttcccttttcagagaagaactttactattctcatactagattatgtctgtttgctaatgtgtggcaagttgatgtatgtatggacagcctttgttcttgttaatgcctttctatttatatagaattgttttcctacatttgttaaccacagaacacctttgttctctagtaggtggttcaagggagaatactgatgacttcatcccatctgaaccttgggatggtgatgatttttgtaatgatcatgtcgatgaaggaaatggtgataccgatgtagaggatgcagtagatcttattaccaaaccaagacaggtgcgctccttttttcttttgccttcccttgttagacattttggttttgtgtgcttatattggagtctggttctgtattgatatttcgatgggcgctcgtacaaagttgcaattgacaccatttgaaatactaaagctggttagatctgaatgtagtaactaaaaagcactataacatcagaataactttacacaaaagaaattgtgtaaacagaatgcagagataatagctacctttctagttttctagttcttgaactagacaggtagctatattttgggatggagggagtaattaattcaagctttaacattatgtatattgatgtctgtcccataaactttaatttgtggcctcctagaaagcagaatcacatgcccatcaatatatgttaaatttatgccaagtcagtgcagatttaactcttatactttgggtactgaacagtccctagagttctgttatattttctgtacgacaaatggtgttttgactcccctccaaaaaaaaggagggcgttttgactttttgcaaatgtatagggtttacatgcctgatctggcttgacatgagttggctgttcgtagtggtggacatctatgctgctgatttttatggcacaataaatgtatccaaacaaacgataaaagtgtatcttgcaaatttattatgcatttacaccttacctatactcaggagcttctattcttgtgagcttagaattgctgacctttcgacagagtgctctgccagaggacttacatgaaaaaactagtgatctgaataaattattgtaatgtgtttgagtttttaagatgaccttgttttttttttaatgttactaacttacttggcctggtaaagtctgaattaatacctgtttccttcctaaatcaaaggtcaacaagattgatatacaatatgacaaggtatcaaaacaagtcgatgttcatgccttgaaagaagtgctctggaatcacatcaatacatctgctgacactgatgacctggtaatatcttctgttattgctaaaaattgctatctgaataacactaatacaatattgttttcattttcgtaaatagaatagcttaaaatgtaatcaataaaacacgtatgtttgttatttggttaatcttacccgtgacatatatgattgacaaaacttaaggttttattgtgctacattatatagtacagggtttacacgtggcatactggcatatgctttacaacatctagggacttaaaacggaatattaacaactatgctgttatcatccatactgccacaaccagctttctggaaactatttgtttatattcttttggtaaagtttatttttgatgtcgtgtttgatattttttgtaatatataaaatgggtagaaattaattaccagttgcaactgccaggacatggataatgaggaaatgattattatttatacttgaaacttgaaagtcaagccagttttttgctagtttctggctttcctcaagtataactaataacattgtgcccacccaccagacacaagtttggaacttggttaatattttgataattcaaaactaatacctgtatctgtttgctgaaaataagtttgttgcaaattgaaatgtttcaagagccctttattgctttgttatcctagtttaatttgccttggaaaattttcatgaagagtgtctaggaggatatttgtgaactgtgatactaacaaacatgaaaaatttgctttaaaaaaaggaatatctgtgtaattttctttgaatatatcgaaacatcaatatgatagacttgatactctgaaattcgaactgaacctttctccctaatttctgttgttctatattaatatgttaacaatattgtactcggttaaaatttgttcagcaggaagacaaggacacagaatcacccctgtgcctatcgaaagtattgcaagatcttccaagctgcaaccctgatgctgcagcaacagaaatttcaccgcacctatatttcatttgcctcttgcatttggcaaatgagcacagcttgaccttacgtgatcgtccaacattggatgaaattgacatatacattcctgcttcatctctcgtgaagtaatcctgtagttcaatatgttgtgcatgtttgttttattttttgttggttagggacttctcgttctcggtgtattattagattgccttgtatgttgaagattatgtattatgtaatgagcagcagattattggattgcgctaagctaatatataggtaacctatcatttactctagttgacctaatgaactatatataaaaatataaagtagagaaaatggttgttttgccaaggtgattcctttgtgacagtactccaatcatcactatttgatgtttgtgataaaatttggttaaatctgtacatcaattttattttttttctcgaaaacgtaagagaattgcatttcatttcattagggaagaaaaataaaggaaaatgtaaattaagtacatcaattttatatagaacaaatttacaagatctaattacttcatgatgtactaggacttttcgaggcaaatgtgcctgtaacatctcttttatttctaaactaactatttgagaaattattaatagtttaaattttaaaagttgaaccaaatcttattttatatatcaaatattcttaattggatggagtatatttttttttataaccaaccgctggcctaagtatattaagaggagcaggaatttacagttttgcttagagcactgaacaacagagcacctacaacttatatccagggtttaccaaaccttatagggtataaggtgaggttaccagcatcccacgatttagcggttatcgtgaaaaccatgtggttaccacaaggtaaatcgtgtttttaaaaacttagaaggttaccgcacgtgataattacgataactgtacggttttgtaaaccttgcttatatcaaagatagctttctaggtacacacaaatgaaagctgccccgatgcatttcaaagcgtggcgagcaggcccaccatcttccaagtttcccgttcatcctcgacctcgatagtcgcacacaatcttgctggtgaggttgcttgtccttcgaaaacacgaactatgacatttctaaacgtcaaacaaaatgaaagattgacatgctacatccagaacggctgaacagaagaacacacgttcgagaacagaaggaaactgatgtctagccagtcactaactaattaatatatcctgacatgccgacccttggaaatataccaacgtactgcatttatgttaattgcttactacatatatatgccttgttctaaagaggaacaaacatttatactacagttcagatgtaccggctactatttgtttgttcagaactatttaaaaaaggccctatcaacgaactagccgcccaaaatcgatggttttttcgtccaagcgagttcaccggaggagacgaggccaggaggggccattcatccattcattcattcctctccaatgtccttttgcccggcgaggatccttgagatctggaggccacggctgaaggcctggttgaagagcagtcgtgtctggaactcggacacgaaggggaaccatgacaagaggccgatggggaggaagaggacgagtcccatcaggttctcgtacgacctcccgagctccatgatggaatcccacagcattgccttcttcaccaacggcgaacatgcctgcccaatctgtggatgaatgacaagatcatacaaatcatttgggtccagattacgatgaacgctaaaatttatctttttattgagaaaatggacagggttttatatttgttcttggaattaagttttatgcttacaaaaaaaaacaaataagtggtgcagaagggtttcactcaccagaagaatgcaccaaccagtaggcatgaacccaagaatactagcaaaaacatccgaaattgtgaggttacaaacgacgaataatacagccatcacagagacaaaaccaaggaacaggaggcccttgagaatgcggaacataagctgcagatctgttccaaacttctgtcgcccaatcgaaaccatctgtatggaagaaacaacaaacaacaggtaagattattaatcatctgaggtagtataccacctgacatgctgtagctttacctttagaactactaggactgagagcataaccagccatgacaatccatatacctagatattgaaaagaggccagtaaattaaggtatatatcctgcaatagtaggaactatgaaagtagcaagcagaacagattgtgtttagatgaggtaccagaatgcttttgctgcggcgtgctatgttcagatggtacacaataccgtactgatagatcaagaagcggagcgaaagaatgatttccaagaggagagagcgaatgctagtcttcctaaggtgctcctgctcacttatccaccaagcctcccagctttgatccacagacatgccgatacccccacggttccccatccacttcctccaatctgtccagtcatcaactgtcttctgccattcgaagcatgacggattgaagataaagggtgcgaagagccaagatgcaaccaggaaccatatggagaaggtgacaaataggtacatgcttgagctgcggtaggaacttccatacactaaataaaccaccagaagtatcaacagttcaagtcctttaacaaagtggctgcgggagtacatgcggtaattgtcagcaaactttgcatggtagacaacaaatccacgacctgtaggtctgtatttagccccgccatgcagtattgttcttccgtagtagtgcgttttggtgccaagctggaatgtgaaaaacacagatgccagctgaagctgcatgataacaaactctcctaatgctgtgcggaatcccttttctaagccaacttccattaccatagggagaacaagcagcaaacctagctggaaaaaagactgcgaggccagtgcgttttcaagaggcttaatgttctgctcgatacgtggatccagcaaaatagacctttccagaccactcataactagatataacctcccatatagaaacacataaactgtaagtactgtaacctggataaaggaagaaggatgtcagtatcccaaatgccaaagtgaaacacattgtaaaaccatgcctatactctcaggctgaccaaaatatacttcatatttatatactaaggaactacagcaagaatggccaaacaaaatattttctttacatgaaagactttccaaatcttgatgattttcaatatactggtgactggtccatgaagaaacaaatggctccacgttagaccatctggtagaggaaagatgtcctttttgttcttttgtaagtaactttctacaattttagtgttatacaatttttagtagggttgattctcaaggaagattatgtttagtagtgttatacaagacagaaatacctttttaggagctatcaataatataaacttccaaatgaacatgttcaattaatattcttaccatgctactaaagtaaaacccaactgtagtaaagtagaaggatagcattctataaaaatcgaatctgcgccccagccgatagatatcacgactcaatgtttgttcaccattgccatttgccaccttagcttcaaagcttgaaatttgattcattcccacatcacgccccttaccaacttgcatatactcatgatgtgtgacattcccttctctcattgttgaattaaaacctataagaaaattgcgtttcagtaactgcatgctaggtaatggatttgtaaacatgtatgagatgcacggcttacctgaaaatatatcttcacttagatttatagtctttgaggctttacttatgccacctctagtaatatggaagagtctatcgaaaatatcaggatgaccataatggaaccgaaccctgtattcatcttgcaataatgagttgtagacataaaagcacaacatgataaaaaatatacagtcataaatcaatgttaaatgaaacaatatctaaccatgtggaaactactcaaatcttagtgaaccccgctccatgtcataactgtttagttacatttgtagaatgatttccagaaagctaggtctgactttatttttatagttgtgtaacaaattatcaaagcatatttggtagtttccttttccagttcatactaacacgggcatgagccacttatgatttccaaacatgcaataaggattgtgtgaaccaattgacaaagctatttgcgatcaaagtaagagtaactccagatacttatcagtgttttatggaaacaataaaagattttaaaacaattttcagataaattgcagttagcaattaggccaaaagtctactctgtctaggaagatgtggaacttgaatactggtcatggtctcatgggtataacagtcatgggctcacgactagctctttttatttggtcaacttattactaacaacacttcacaagttttgttttaattagaataatgagcttcccagttcaaaaatcctttggattttttcacagcacaggatatacattctttttgaataaggctgccatgtgcagaaattacaatgatggttagttgtttatttagctttaggaggtaagtggctagaaataagacgactggtcctttcttcttgaagttttgtgccatttgggttttgggagacgatggtgtaatttgctatgccttttgctgtcaacctcttccacaagagttttggtgaatggagagcccggccaggacattgctcactgtagaggcctccggcaaggtgaccccttgtctcctatcctttttatctaggttatggacgcgttgaacttagttgtggcgtgtgcggatcgtggaaatctcctggagcctctcactatcccgcgacagcacaccaggtttctctgtatgcggatgatgtggtcatgtttttgtgtcctacaagtggggacctatctcttatcaagcagattttggagttttttggttagatttctggactaaggaccaatatgatcaagagctcttgcactcctattcactgcttggaagatgatctggaagtgatttctaatgagttgtcttgtgaagtggcgagcttcccttgctcttatctcggacttcctcttacaatccgtaaatcaaccaagacagacttgttgccccttgtggacaaagtggcagataatttaccgagttggaaagcctctttaatgaacagggtgggtcagctaataacagttaggtggtcctcttggctattcctatttatgcaatgatggcgttggatcttcctaagtgggtggtcaaggctatagataaaaggtgtcgtggcttcttatggaagggaagagaaaatactaatggaggaaattgtttgatctcttgggatcgtgtgtgtcggcctttgtcctatggaggccctggtatccctaacctagaaaatatggggtgggcactacgcctgaggtggttattgtttcaaaaaactgattttgctagaccttggggcggtttatctattcatgtgtctcaatgtacgttctcttttcaatgtggctgtcaaaactatagttggaaatggagaaaatactgaatttggagtgataggtggctgcaagggaaaacagtagcagagctggcgcctaatctctttgccttgatctctaagagcacaagcaagcaacgtactgtggcgcaggctttggagaacagaagatgggcggctgacataaatgggggctatctgttcaggttcttaatgagtacttgcatagatggccaaatgggctgcccggcccagcatggcccaggcacgaccgtgcctgggctgaggtaagtcgggctggcacagccagacctacatgtcgagccgtgccgtgccaacccacgggctgcacacggcccaggcacggcccaataagactcgggccgtgccgagccgtccgaaagcacgacaacccatcattcttcttcacagaataagtctatttttgctcctcaactcattgggctgtgtctatatggctggaaaataagtctattttgtattcctattctctttgggccttaccttatatggttgattaagtctattttgggtctctcttactttttttcttcattcgcgccaggccgtgccggcccatcgtgccgaggaagcagcctaggcacggcacggctgtcgggccgggccggcacgggcatgaccctagtcgggccgtgccatgcttgggtcgggccaaattgtcgtgccttgggccgggccattgggcctcgggccatatggccatctataagtacttgaccatttgggttttggtagaagaggtggttctgctacaagatgtacaagatcagcatgtttggaagctaaccgccgatggatgtatacttgtaaatctatctatgaagcttatttcctgggatcgatcaagtttgctccatggaaaaacatttggaagagttgggctcctcttcgctgtaagttcttcatttggttggccgtcaataagaggtgttggacagccgaccggcttgctaagcgcggactgcagcaccccacggcctgtcccttttgtgatcaaagtgaagaatccgtccaacacattttgatttcgtgtcttttctcgccaagtgtggatggcactgttcttgaagctagggttctctgatgcagtgcctcaaccttcagccgatcatttttttaggtggtgagccaagctacaaaagaccggccaaaggacgtgcgaaaatggctcaactccttggtcatcttagtggcttgggagatttggaagcatcgcaatgactgtgttttcaatgggcgccaatcctagtattgcgacggtcttgcaggtggtagagaatgagggtaatctttggtgtttagcgggggcgcctgccctccaaaagtttcttaataggtcggcaaacctaagcagctagagcttgctggtgttggctggggcgtgtgggtgtgttttttcggtaggagggctttggatctcctactttgtatatttttttctttatttcttccccttaatgaaatgatacgcaattctcttgttttttcgagaaaaaaatagattttttagatataagagtttgagatgtttggtttaaggatagagttagagatatgatttattacttcctattggagaaagttgttaggggataaacccctataaaagttagagacgagccacatcaactattcacattaagcaaagaatgaactaatctagttacatgctcaaatcactcatcccaatttatagtattccctcttcacatgctagcaccacctggctatcctgttagtggtgtctatcaatgaatgaagggccataaaaactgacaaaatttaaaacaataatattagaactatcaaaactgttcataaaaagatagtggtttctggtgactgctgtgggcatagtgatgtggtcatgtgactgaggctgaaacaacttttcaaactagctaatgactttttttttatttgatctatggattatttgttacttagataaatttgctacaactgaaataaaatataattgaactgccaaaagagtatttctaaacaaaaagaagccactgtttatgagataattaaattttattgacctctacaacaaatgtacccaggttctatatattccattgtaaatttagatttttagaatattttgatatcatttactaatttttaaaactcaaaacataccccaaggctaacaagatatttgcatatgtaaaactattaaatgattcagatcaattctaggcgaattctcagttgcaccatagattatttagagccaaaacaaattcagccattgcaaaggaaaaaataaagtctatttagctgaggtaaaattatttttttaatcattaaacactatttattgccatagaattatactttaattcacttggatcaaatttatcaatgttataattaccccatagagcaaatgagaatttcttttgaagtcattcattagtcgttgaaattcagaaatcaaaagtagttttagctttacatcatgtcccgcctgaccgagaaaagtttaagaaatgcacggtgttgatagttcagggttgtttctcagactgccgtgacagttcaaggttgtaaattgtattttttttccttaccatttgacattttgtatcaacagagtattccatccatactaggttacaattacttttgacatattaagaattgggcatagtacttatccataattgatctgttttgtaaaatacttatgtaaggatataatggccttttatgcatgattgcctcaagataaagctgaaatgattttaaaatggttctcacagtactagttaggtaaaaggaaaaaatatcatcaaatactttttaacttttaaatggatgacgcacccaattcaaataggttaccattctgatgaaatgcatcagaaaaaaaaatccttaaaaaatccttctaacacaatgttaaaatgaagatttacatacttgagaggattagccaagactcgttgcccaatggtaacaaaactggtctcttggttggacataaaccaagcaagtgatgaaacactaaaatagaaaacaaaatacagaaaagggttactaatagatggcataaacaagatataattgaccagaattttggatagatacacatacctcccagtaaaaatgtgctcacggaggcctaatatagtgggttttctctttccatacttttcactctcaaactcctccagcacatttctcattttaaatgcctcttcgaggtaattatcctacgagtaaaggaacaatattatttttgtattgtacatgtaaaaatgtgtgctagaaatagtttaggtcagtcccagctggtccaacgcagttttgtacagtttgtacatgtatatattgatcatttgatccatgactaagactactagtgtttctcccccatatctaatatagtaagaaaatcaacatattgagttcaaaattaagctagcaaaatttcaagacaccacaatgtctactagcaaatgagcatgatttttttatagtgtttccctttttgggtatatgaacatgattctgtaattttcttgggcagtgacacaattttgcagtgtgtgtcagcaaaaaccaacaaaatgcagtgtgtaccatagccattgtttgcaaaatattatccaaagtgggtcataggggaagaccatgtatgatcccaatatacatactttgtccatatggctgagttgagcctgggcgtgaggggctgtatttatgactatttgtttacatttctcaacaacttcagtgaaatagtcaacataaagggtcttgaaaaataaaatgcggaaatgagtatacctgattcatatcaatggcctggagtgcctctcccctggtgaaaacaatggcatggttttgattttcaggttttccctctccaatatctgtaggtttgccaggaagcttgatgcgataaatttcctaaatcaggtttaaagcaccatgtatgaattatgccatagaactaaacacacagaacagatatagtgagctgttgaaaaatgacgagtaggtattaacaacttaagaagtgcgcatgaaactacaaacttcaatagaagtgaaaaactttatatatggtgctcatctagaaaagggacatcaatatgaagtcttctaccttctgaaaattttaattgaacataatctttgtaaacatagttccacaaacgcgtaaagctctctgttcaatgggggtacctcatcatacttttcacctcctttgacaagaacagaataataagtcttctctgttgtcccattaccagctggagcttctacttcatcaatataagcaacacgtaacgatgggtacctgtccaatttaaatgtcagatgggttgtagtaacattattatttatgatatagctttattaggtcacaagcacttggtttttatacattaacatgagattaaggatgtttaaatagcaagctttgtctttgggatccttggatgtcttttgcattccatagacttgacaagagacaacataggtaaatttgatatcagcaattgcccgtgccatatcgaaactggcccacccctgttgagaagactctactgttctacgatgttccagtttaactgcaaaatgttaaagttgagtcaacaaatatatagatttacaaagataggaataaaaacagagaattaaacgaaccaatatcagttttgtcttgaatacactgaatctcaagtgctctgcggtagtacatcattcctcttactagtaaagcaaaaagtaaataattagacagtatgttaatatgtagttaatgtgccacacaattgcatattggtgatattaccagttctggtgagtgtttgccccctataagatgcccagggccggatttcatccatctttgttttcagtgattcttcatccgttggttgaaattctatcctctcaagaaaattcttccattcatctgtagcatgcaacaggtcatgaatgatttactgagagactttgctccaattgtgagatcaaacacgtacagatacctggatatattttccgtagatagaacagtatggatattccatcctcattctttttataaaggtcttctgctgaaaagagcacctcctctttgaagtagggagttaaaacactgatgcaaaagcagaaaggctgtcaatcaaatatacttttcagtaaataattactccctctattttaagtcgttttagttttgtcctaactccaacttttgtaacttatatggagtttatagagaaacgaaactgatgttgtagatgttggtgcatttttctataaactcgatcaaagctacagaaattttacttagaacataactaaatgacttaccatatggaacagagggagtagtatcatagagcagaccaaagaaaaagggtacagtctattttgagcccttgaacttctctcaaaatccatttctcaccctgaactacaaaactggtgttttttttcaagtcaactttcaaaaccggacaaagaacacttcgggacatatattttagtggttttatttgtaatggaggtggtttttgtagttcatacccttattatgcataggcaaatgtcacttagttaggtccacaaccatgaaacttacctaattgaagttcatgctagcaacttgatcaaaacgactgtgaaatatgatttagggtgctatatgcttggttctgaaaattgggggtggaaagtaactggttttgtgttcagggtaaaaaatggactttgagaaaaatttcaagggccaaaaatggactttaccccctcacaaaaagaaaactacattgaccttggcaaataattatggagattggagagcacttatgtgccaaaaagtaaaaggcaaaagacattcggcaacactggttggtgaaagaagtggagggagagttcggtttcttacctaaaggacatcatactgcggacctgtggagcctttggcattttcatgaaaagtgagtttgcaaagaaagtgatcctgcgacgagcatccaagtttgtaggtacatatattgcagattctttcgttgtcaataatagttgaagcctaacacactgttaacacagaatcccaattcataatgagaggacatcagtacttgtaaacttatggtagaaaagaatattcatattgaaataagttgcttggatggacatataaccttctccttccaagttttatcttttactgaatccagatttatatttgcaaacaattgattgtttctgttttcatccttcaaaatactgcatgattggcaaaatattggtgaaaaaacaaaaaaaaaagaactcttgactatgcacacttaaatatagatcttacccttgtccattcttcataatatcctgtgtgatgatttccattatatcttgtaacaaattggcaatttgtgtctttatcggttcaatgtcttcatcagttctctgcaaacgcaagtgatcattttttggagaagaaagaaaatgtggtacagagaacatatagtcaataggatacaaaggtatgttatcagtaccaacaatagatttagcagcttatcaaacttagcacttagctgaggaagttcatccaatcggaactcttttacaagtgactgacgtcttatgctatcttcaatcctatcatgtattctatcaacaactctgcgccaatgaacaatgcaatattaattaaattagttagactgataaccatgctaaattaattttctcagaataaacatagactcaaacataataagctgaaaaaataaggaaaggaaagactactcacttcttatcactttgttccacaataaggctgtctagaatactaaacaatgtctggtagcattctactacagcataataggtatatggatcctgatttatcctctttctcaattcttcatccctttttttgacactattagccatgtcaagtgcaattggaatctggaatatcgtagtcatgagcaacacagtactgcctctccaagaaaatttagtagttaaataagggaatatttgagtagtgtaccttactagcgagaaggaaaggaggccactgaaaaacagtagtatcacccatagatgatggaacaatcagtaaatttctctccctagaaacaaatcaaacacagtactttaaacatttttgcagtattttttaaaatttttaaagtgtcaaagaaatggaaaaaacattaacaccaaatgcaaacctattgcttattaagtcttcttctctcaaagagtgaataaatgcattccatatgtcagagaacttgttaattttgtcttcctggtgaaaagggttatcataaaaacaacagcagtaagtaagctatcaagtaaactaaaaaaaagatttctagtataacgttttgcagaactgaacctcatgctcgtgtctctttggttgactatcatgtccaggcacaagatgtttgccaaatgctattggaattgcctcgaatcgtgatcttaacattccaagggtccggatctgcaggaaggtaaatactctgcaagcattagtactcttaacagcaccagtactcaaactgtacaaacctttatatgctacaaagtaccaacctcacccaagcggctgaaggcaccattcactccaccacatattgttgaaaaaatggcataccatatttgtgtgtccatgaagtatacctttataagaaatttaattaaacagcttggtaatgacatcgagaaagaaaacccccctaaaatgcatgaactgatacgtaccatgacaattggtgcccatacagtaattacaacacctaaattatgctgcactgggaatattcagcatccaatcagcacttaaaacatcgttcaaaagaattacatatcatctgtgtactattacataatcttacagtatggaaagaactcatgccatgcgtattgccctcgtcccaagaacataattgtcctcgttggtccaacgagaggataaatctgtgaacagtaatcacaacgcacagattatacaaaatctcacaagagaatatttgaagtttcacaagagaacaaactacaggcacataacaagggaattatagaaaaaaaaaagtgttagttaatccactagtcctgatcctgctcctgcctagtgcaacagataaatttagtctaaaataccatttagcttcattaactggagtaatcagttagcaatagatgaaggggattaaatgaggaggcttatttcaccttttattattttttcaagtcttggttaagacttacagaaggataagttgttttctctgcattaaaataactaggcctaattggtcaggcctcacttatgtgtgacacttgttgggaaatgttcttttggtgaggggttccttgaccccttctttggaaatatttctctgttcttagtgaaatgaagcgcagttctcctgtgtttttgaagtttttactctacactattacataaaagagaaactctacactacatgttaattccaaaccaaacacagcgtcatgttttcatcctcaggcctaaagtgctaagagaacagtgtgttctcaaaacacaacaaataaacagtctaaaatttcctaaaaataagtctaataacaacattatctagtcatgtccaaattgagatagtacgttacaagtcccaacctaatgtcgtcactcgtcacctcaaataaaggacacatgtgagtatatggaatcaaccatacatgcctatgcatccattattaactagtatatgtaataccagcccattagacactagtataggcctgtgtggcccatgtcatgtagcttttgtgggattagttccatatgagctaagataggtgggtgccatcatataaatccacacattccaaccatagcacctcaagtttaccctttctttacacaaaacgagaacaaaagtgtaagtgaggtgcatgtatacatatgagcccatcccataagggctggccggtgaattttgaaagctgggctgttacaatatatggacccaaattcatcatgttccatatatctgcatattaatctaccaggcatctgagcagcagagttggcactctaatatatctttaacacacaagatacatccaaatcaccaaaagaggtaactgttatctagtgaaaaacaaactataaataaactggggaattcagttgagcaagccatgctcttgaattcacgtgcattttctcaaagattggactgaaaaaatccactattggaatagaaattcattcggatgagtaacaggcactcgcctatagtttcagtcacctctttatttagaaaacctacccaaaatcaatccttttctcttttttattttattttttattctagtttatttttactataaagcacagcaagaaaagggagttctttgaagcagtagttttggcaaaaagaagttacatgttagtcaataataaatcatataatcacccatggaaacatggtagcaaatctgacctatacttaaattagcagagaactgtaatgttcagattataccaacctcaacatagaaactgaaggcgagcttgcatatgagcaatagtatccagaataatgtatacctgttttcatgaagagaaaaaacagctttagacagagataataagactcaaaatctaggtaacaagaaagtctaggacttactttagaagtgaacatgtatcctcatacatgcctcgggcaacatatagctttggctgattaataaaagatatgggtgagaactgacaacaacaaatagctctgctaagttagggctaatcaaatattacctgtgtccaccacaaaaaaaatctaataatgcgagaatttgaacgctccaatacccttcgaaatggtagaaatatgaaaaacaaagcactgaatatgtttggtaacatgtaaagagcaacggcaaaattatatatcgattcactctgcagatttccaatccagctgctgaagaacttgataaggcccgtggaattttgaatagaactcatatacgttgtaggaagaattatcaaccaagcaacagctacaacaaatttcaggatatatcgtatcatctgcgagcactccagactcctccaagctttccagttaagaattatctcaagcgtggctgaaaagttcaagagaataatttcataaattgtgcacaagagtacacgagaacaattgcccaaataattacagtacttgattgggtagaatcattgtaattttgcttctcttttatgtattctttgtaattcttttgtaaatattttatatttataaaagtaactgcatggaattttttaacccaaaaaagttaagcaagccttacttcaaaaaatttggagtaaatacctaaggaactatttgggattatgagggtggtaatgataattttgtttggttgaatcactttttgatacttgagtgtttggatatctgccctccttttcctgatcaagttgtacatggataattatcatgttctcaatcatatgagacgaaaagatttaagacaactattggggtaaaatggtttatacgattccaatctggtttaaaaacagaacattaatttttttttgttgatagaagctttaagaatgagcatgatagaacaaccacaagttgaaatagctaataagttcacaagatacttaaagttcataagttccaaacttaaaatgtaccttgcaggaagttcagaaatgcagccgttatgaatattgtcaaaacatttctgaaaacagtaggatcaaaaatagcagacggtaatccagaagggctccaagcaacaattaccatcgcctacaaaataaaacgaagcatggtatggtcaatagatagaagacatagaagctttgtatgcaagacaaagggcaatagatatacctggaaggctaatataaagaaagcccacattcgatcaaaacttctgaataggtgcaaaaatgtacgaacttcaacaaaatttgttttgggtattctccgtctggtaatcacacgatcatgatgctgcataattcaaaaattagttacattatcttccaatatactttcattttgatcagggatcatatcggtaacatacacagtaccaaacatacatctgttctttgggtgactttgcatgattgtacatctaattctttgttaaaattaactgtgatggagcatatgttcaaatgacaagtctgggaggatgtggatgcatggcaagatattcagcttgtgtactgctagcagcttgagcaacacgtctgaagaatctacaaagtgcaatgcatcctttgctattagcagtgtggaaggcaatgcagatggcactccgctacgaaagcagtgtggaaggcaatgcagatgcctcaagagagttaatggaaattctctttccatctaaaaaagatattccagcaatggtttcacgtaattagttcacaaaagaaccgagttttttatgttcaacgagagttttatccctgtctttttcgtcgatatgcattgctagtttgttcaactatgcttttcactttcttttccttcactgccaatatattggtattattatcctttacacttactcatatttttattagctgctaagtgtttccagttaccattagtgactgttctatatccaggaacatgtacaaaccaaagaccaaattatgctatattgagtttctataatcccttgcatggtactgaattttcattttgattcactatttgctcattctgttagttgaccgtcagaatttttaatattcaaccaaatttcaagatataataaaggagggtggtgaaaatattcaactaaaaagaagatattttcaccaagtatttgaagacaaaaactaatattttttattttggtaaatttcaaacagattgttccattcatttttttattcatactaatgttttcaattttgggtttcaaatttggttaaatattgagacttcaatgatttaggtaatatcacatcctctgaaaaaaattatatagctgaatttttttgagggtttatttttagtgcagaggcttattgattatggttgcgggcaagggcttcgtgatcattttggaaagtgtaacagccaactcatgctcaagttaactcaagggcatgaagtcgatgagcaaaattcaagggtatgaaagggaatgagtgaaatctcaaggccatacaggaaattctctcatattatgacgttgatgtatcctcaaagcacctcccacattttcttaacaagtcccatcgtactataaagaataaagtatgtaataactatactagacagaaatcgctacatcaaattgatgatatatgctctaacaatattatgtcacatgatgtaaaatcaagcaagaatttcttgttctcatgccagataaaatattgcattgttgtaaaaaaacaaaggatcaactgctaacctcttcagttttaattttcagaggaaccgcaaaaaagtcagctgctgaatccatcggccatttaagctgtttgaagcatctctttgacctgaaattgtatagggttatgacaaaaaggtgacagataaagcattacctttttcctgaaattatagtacattagaacccactgaaaactaaagcaccataagtcaataacgaactattaagaacaacttaccaaaagtattcattcaggtcatcatagtttctccactttgagtggcttgtcctaccacgtttattcattgcagcttcctttcacatcaaatgaaaaataaataaatacagccagagaacatggggctacataggatataacatatcagcacatacctgcttcataacactgtagatgggttgaataacaagctgtagaaaggcatcatcactcccctctcgccgaaagggtggatcaaaatcttgtcttctatcagatatgatgtcatacaaatcccttgccatctaactcgtgaattagggtgaaaatgattaataaaagagttagtgtatgtttagtgcatatgcacggtattagtctagcggtctgtgtaagaaaaaatttataaaagaatagaaaagaaaaacatacatcattttatttgtcaaacaactggtgggaatgtcttattttgataatgttaagcttgtttatggggataatcactagtggcttgaaacggattaggtcattagggtattagaagggagaggtagacattgattgctatgagagaactagttgacacatagcaaatagaggcatgaagtatatttcttgattagctaatggtgattacatgctatccatttttgtaagggtgactcaactttgatcccaaggaaacaaacttgaacttattattccatttaactactgccagccataacattagcttctatgcgcactggcccagcggggccatgtccacaacttttatacacttcagtctttaaataggttctcttggagtttatgcccattcctaagcagcttacacatgttccatgaataaacacatgggtataattgtgttcttgtactgatggctctgaaatatgcaataaatgtaaagagttgatatatctgcaattgcatgtagcatcactttgcacaagatggcaaaagtttatatttcacattactcagaagtaagaagttaatttgtttttctcattactctagagtgacatggcatcataaccttaaggtttggatgaaaacgatacttctcgacacgatataatcagtttatacatagacaaattagactggcatgatacaaagagcagtacagaaaaaaaaatttcatatgcacgcagtattgaagcagagaagccaacatagctctaatgctctataaaccaacaatatttggcattaactgccttgtcagtattactgccaaaagtgcagttacaaaaaaaggaattgatcataacagattttcgataaaacagagtagagccacaagtgaatgaaaggatgtatcataaattgaatttacctcaaatataatagaaaaaaaatcacttacatgatggaagatataacaaatacattcaggcataaagcgaacattagaagcttcaccccagatcagcaaatacaaccctatgtaaagaatctcaggttgttgtgtggaggcatcgtttggaattctgcaatgtcaatattctcagttgacaaggttgcagattttgagcaccagatgtgcaatgatcattagtggtacttactttatgtttgactccaaatgtaaatatcggcaccaagaaatgtagttttcaaagattttcctcatcaaggatctaactgtatcactatgcatctgcgagccatactagaagttcatgaatcagtttaatattcttacatttatgcggactgagaatgatgtgtgaaaaggcaacaagctcactcaagattagtgatattaaatgaagcttcaaagagaatgtttaccacatgattgtgtctgtcactttggtaggcattagccccttttctcatatcaatatttgcaagcagcaaaatcaaatgctccttctgattctcaacattgcctttctgtaacaacaaatcaaagcatgtatcaaatactaaacaaacagggtaggtgttcaaagataaacagtggtgtctagccatccaactcaaagccaccacaattattgtatctacagcatgttagagacaaaaaatatatttcccatgagtgcagcaatgataggtacaaactatttagttaacactgccatgtaattaacagatgtttggtgcattgcataaagaatttacatgaaggaatttactttaaatatgatattaacatcatcaatgaacatggttcaggaataaccaaaattgtaagtcttgcaagaattattatatgatgtgaccgcaccgtgtatgttttcatttccatatcattaaaacttctgagttacataaccaatgaagtactcaatatttatacttcacaaattgatatcaataactggtttagagaaaaaaaagttctataaaatggaaatagttcagaaaaaacgaatggagaatcagaaggttccagagcacgcagtcgtgcaaactaaacttagttccatacccaatgaagtactgaaacttttatactttgcaagttgatatgcataatttgtttaaatagaaaagttctaaaaaaggaaatagttcaatgcaataaacttttggatcatgcaatcatgcaaacttttggattaagttaagtaattgagtacgattgaagaaagtgaaaaaaaggcattagtttattttgcacctgaaatccaaatgtcagccagagccaatcaaacaaatcacggacagtaggtacatctgtctctttttcagcagaaactggatcaagccttggcatcgggaggccgtctatcttgcgaagaaggtccactgctgctttaatctgccaattttagagcagatcacttttactacttatgttatttatgaaataaatgtggtatttttaaaataaattttaaagtacatgacctcaggaatttccattactggttgtcgctgaccagaaatattaaggggtagaatgttgtagtgtgagaaggaagctttctccttttcaacctctttagcatatatatcaaactgcaaccagttgttcaatattatcatatttcatgatttacagaaactgggaaaatcaataatatcttgcaattatttgtaattactggatgcagaatgcagaacctcagcgtgaaatttttcaggtgtcacggtttttagcacatcatataggacggacgcaatctgatagtgtctagccatctcctccctaaggcattcaaagaatagtatgagaacattgataaagtctgagccatttgtagttttgcaccgagagatagttaatgcgatgcaacaatggccagtcttacggtttttttgtcttaagaccgtccacaagattttttttacaataatgctcataaaaccgctgaatctctttcgcatctgttcctgcaagtctgcgctgtgtctcgtgttcatcctgtgaaataacaaacgtcaaaccatgcaatgcatatatgttgaaagtgaataggagcaattaacatgctgaagcacttctaatctgagtaaggaagaatgttaaaagatttggggctttatattaatcttctacatgaaaactttattccagtttattccttgtggagttaattataacttctcacttcacaatggtgttctggaaaataatggagactcatttctttttgcacgaatcactattgcaagcttaatagaaatattgtctccactagtatcaagacaagctatcaccggtaactaactccaacaaaaacaggacaccaagtgatacctggtttgggagaaattctagacactgccatgcgaattctagtgggtaacggaactatgggattgtgaaacctctgaccgtatggtaaaactgtaaggccagttggcaaagtactctctgggggtcacataaaatcaggcttttggtgctttatgctgcaagcaaggactgtgagaaagtaacattttgtaatcttcaaaaaatcatacttgattagaggaattttttttttctgaaacagatggcagggccacagaagctctgcccattcctctgtactaatataaaaggaacaaatttaaactacatggatgctataaagcatcatggccattcatcctctagtttggaaagatgagatataaaggtgggtccttactctataattaatcatacacaattaatatgcaattaaaatagagactctccattactaagatttgcagtgcaagtgagaataacttcaatagggaaaatatctacttaaatccctcaagtgtaatggtttatttccttagcaccctgaacactaggtatcgtaccaccttaactaacaaaaaccagagcaaatgtaggcgtattgccagcatggcagatcaagctggcaacatgatagtgactcagcaaatcaaatatataaaatatctcttgcacagtgggcccctatgtcagtggtatactcttgttctttctcatctttcaccccccccccccctctgtttgttatggagaaaaaaaagagcacattccccgcatctctgccatgctgcttgtgaggtaagagcatagtgaaaaaaaccagaccggcccggtgtttggaccggaaaaaaccggaaccagaggtcagcgcggttcggttggatggaaagactggacatgtaattgacccgctttagaccgcttgaaccggccagttttaagtgaaccggtgataaaccagcctcgatcggaccggcctagacatctgaattgcttaaatgggccggaagaaggcccatttaattcgaaggcccgaaataactagatatttaggcaaaaatgaccaagaaaaagggaatggtggggagtcaaaccctggtggtgggtttgaagttgactccggtagccatccaagcattaggttgttagttctgatacgagaatataaagtaatttttatctagtagcgaaccacggttagaccggccggttcaccagtcagaccgtcggaccagtgaaccaagaggttgaccgggtcactcactggtccagtcttttcaactatgagtaagagcattagtgacatattcctctcaatcatctcagggcttgcaccgagcctgcttcccatgggcatcttggcattcctcaggttcatagttgctattgccgaaagcacaaccgctctgaccgtctattctaagaccagacttagctccgcaattctactgacacatacttcatcaagtagctttaagtcatcttaccattttaacaattaccgatttcctcgtgactagttgagaacatacttttggtacgtggtaggatcgaaattgcaggagatttattgctctcatagcttgggcgcgatattgttggtatgaaattgtatcaatctctcaccaccctgtgtcacctgttgactctgattagacccttcttttgcacatccagatctcatcatgctaatagcatatgaggggagaaagagagagcatatgaggaagcttaggtgcgttgcaccagcatggatcagagactgttgatggaggcatccatggcggtaaccaggaggtggcagaatgagacagagggtagaaaggggaagaagagagacttcatagagaaagggggcccacattcaagacaaattttacacattgttgagtcatatccatgctgctggccgtgttatcctccacagtggcaatactgccacggaactagcccagtgggttctttttcttccttttatattacgtggtactatactttagggtgtaaagtagacgaactgctacatttcaccttctaaggataacattgcaaactgcatatcgaggtgcagaaattttctttcggcgcaacagtctctctcaatagttaaattattcaggcacatcattattgtttatttgtgtcacgattccaggtgcttactgcaatttgtttgcatttccatttcacatcataaaagttcaaacagtttaacaccatcacaagaaatacacatgcacttaacaacaaaagctatgtgattcctgcacgtagctactttcaaacacttacatgccacttgggaaagacgtttgttacgtgtgctcattgatagataggtggaggaatagcaggaaaagcagataccttctccagcctatgcaagaggtatgttttgaattgccgaactcctcgtccacctgagtttggatccatggtgtgagccttctcgaacgcggtaaaccgaccttttagcaagcaccaagccaccaaccaaaaaccacagtcaagtcatcacaataggctaagttcaaagcagaggtatacaagggagataaacatgcacatttcttacataaacagaaaaaaaaataaaaataattctgcaatcgatactatagctgcgaaatgagattcttccaatttccaaggctcactggctcagaacattcatgatggcactagactacctaaatggtgtggtcggctgcgtccgtgcatgtaatacggagcaattcattagagtatgattaattaagcatcaactaaaataaatttgaaaaatgaattaatatgaattttaagcaaattttctatagatttttttaattaaaaaaacaccaatatgtgtcaacgagcgagcatagctgcgcatgcaggcaacagatagcgaaatcataggagagaagtaaaaaaaaaaaagggaaaggggaacgcagagcacgcacagaggtaggcgacgcgctggttctcctcctcgatctcgttggcggcgcggaggatggggacgatgggggcgagcgagttaggcaccagctcgctctcctcgctgtactccccgccgtcctccccggagtacccctccggcctcatggtgaacgccctcgacaagccccgccgcagcgacggctgcggccccgacaacccccctccccccgtcgccatgcctcccccgccccgcggcggcgactacgacaacgacgacgacgaccaacgtaccccctcctccctattcgacaacgatcgagaccaacgccgcggcggcgttggcggcggtggcggcggtggtggtggtgaggatcggcgaggaaggggaggaggagatgggggcaaggcatcttcttaagcgggagggaggggggagtgtgagtgcggagtgcgcgctttttcgcttttgccgctttggccttctttctttctttcttcgaggggaggagaagggaggaggaggagattgtgcttcgctttgctttttttttttttctttctctttctttttgcggcgcagatgcggatcgagcgggggtggccggcgagggaagcaaggaattggaatttggaacggtgctgacgtgtggggccaggtaggcagggacaggggctttgttgaggttttttttcacttccctaattcatctctcgtttttttacgcgcacgctttttaaatttctaaacggtgtgtttctttaaaaattttctatacgaaagctactttaaaaattatattaacctatttaaaaataactaatacttaattaattatatatgctaatgaatactccctccgtactcgtaaaggaagtcgtttagcacaatgtttaagttaaaccttgggaatataaatcataaataactatcaagttgttgagtttaaaaatgtaaaaattatatgaatatatttgttttgaaaaatactttcataaaagtatacatatatcacttttcaataaatatttctatagaaacaagaagtcaaagttatgtttcggagaccgtatcgctgtccaaacgagaccgtgtcactgtccgaaacgaatttctttacgagtacggagggagtacacccattttatatggacagagtattagggcatgttctctttaatgcaaaaaaagacttactaaaatttggcattgccaaaattttgacatagttgccaaaattatatactcactaaaatttgacagcaaactaaatatagctacttttttgataactttatcaaaatttggtaagatcaaaaatgacatcaaagtgaacagagccttagtttccaacaggagccgaacacagggccgggctcttcgctttctttcgtgtgcgcttttctttatgaggtaaaaaacgaataatgtttatacctggtttcctggcttcaaaatgtctgtgtttcatgtcatgtgtaccaccgtatgtcggcgccgtactgcagagggaatgagaggatggataaaggtacagctacccgctttcgaattatttgtcgtcttatctaaattaaccattttaagttcgatcattaatctttagaaatctatttgtgtagtataacgttatactcccttcatttcataatgtaagactttctagcattactcatcatatttatatagatgttaataaatatagacacatatatatatttaaattcattagcatctctataaatatatggacaatactagaaagactcacgttatgaaacggaggaagatttatgcttttattcactacagaaacaactccatagtcgaactaatggtcaagattaaagcaatgagtataaatggaggggatcaatgagcatcggtaagctttgctttcctatatatgagtactaagttctaatgttttataacctcgtagagtggcagggagtcgttaataatttcttctttcgctttctccaaattgaaacttgaacaggacaggatttgaaaccggctctctccggatctgttcattgggcgatcgttcaattatgcacgcaaaagagagtgctttaatcaaataaaagatacagtttgggcacgtctcaactctaaagctagctatcactagcttcactggcgtgtttagttagcatcaagtggcagctatatatatatactcagaacaatctagcatatatattcaactggattgagatcctctgacataacttctcactaacttggtggctgacatgtgggcccgaaagtggtgaggcccacatgtcagtcacggcgaacattagaggatcatctttcatattctactagtgtggattgcatggatacgggactaccacgggtggaactacgtacacctgggatgggaatagctaattatattgcctcgctagggctcagtttctactgttttttttaggaaaaaattgctataggatactcaaaaatcgtgtaattgtctaagagacactgtaaaaatgtgacactgccgatggacagtacaaaagttgtgtagtttaggacaccaaaggcattattttataatttctgggctgaaagaggggagagaaattttgaaatgatgggaatgcccctgtactccttattcctttctctcaatgcagccgacatgtggacccacgctcagtgtcgtcatcctcctctcgccagcgcccaatgccgaccgacgccactgcatcccttccaaaatccgatcgattcggtgagagagtcagcgatgcccaatccggtggctacaacgaggcagtgcctctcgtcggccgccgtccctgcccacgacgccatcgtcacctccaccggccaccgcgcccacgcccagaccacctccctccacctcatctcctccctcctcaccgcgacgccctcgcccgcacccacagcgccgcctactccccacgcatccaactcaaggccctcgacctctgcttcgttgtctccctcgataggctcccctccgtctccgcctcctcctcctttgcctctacgccgatgaaccccccgtctccaactccctcatggccgccatcaagcactcccaggccaaccagcgccgcaacccggacaccttccacttctaccaccaggccaccaccgcccaaactcccgccgctgtcaaggtcgagctctcctagcttgtcctcgccatcctcaatgaccccatcatcagtcgtgtcttccctgaggccggattccgcagcagggacatcaagctcaccatcctccgtccggctccacccatgccactcctcggccgcctccccacgtgcacccacccgccgcctctcttcctctgcagcttcgccaccgtggatgacgttgatgtcccttcgccggccgggaaccttgccggcgttggggaggagaactgctgccacatcaccgagatcctctcccacggccgcaactctcactgccgtcaaggtcgagctgtcccagcttgtcctcgccatcctcgatgaccccatctttgctcgaattttggaagggaccagcgcggccaaggcagcatagacgcacgccttcaagacgatgacagaagcggtgagcacgcagaacaggaagatggacaagcatacaacggtgaagtcatcgacacttggggggcaatccggacaattcaataaaaatctcaccactttcatctcgaaaatgataaaataatgtgttcggtgttatacggccaattacataacttttgcagtgtccatgggcagtgtcacgtttttgtggtgtccctcagccaattacacgtttttttgcgtgtcttgtagtaaatgttttctctttttgagaaaatccatgaaatgccattgacaagcaccctaatccaagaaatgccattacagccaaactgttgttaacttctctccgttaagttgtatgaaaagacaatattacccctgggcaaacatttgctcactcatcattctgtattgtttgcccacacaacattatttttgcattgatgcatatttgaattcagacataattattttgctatcaatcaaattatttcaaaattaaattcacaaattttgccatcaaaattatttcagaaatttcgctatcaattatcagggttgtgatatgagcagaaatcaggctatcaatgattttagaaattttgttatcaatctgagctaaataacaaaacatggtttcagagttgagtacaataggtagactgcctgacaataaaatagagctaccatcaatcatttttcaggcattgaacgtgcagactaataatcatgtcaaaattcgatactactttcatgtaacccacatcagggcaatcaacacacaaagtagcaattatgatgcttaagcgaggatttgggcctgaaaaaaaccctaaagcggatggagagagacggggagttgagcatttgagcatttgctagttgagcatttgctgtctgggtacttaacataaaagaacaaatgtaatacagagcaaagggacatgaaaaacataggccaagtttagttttaaaatttttcttcaaacttccaactttccatcacatcaaaactttcctacacacataaacttccaacttttccgtcacatcgttccaatttcaaccaaacttccaattttgacgtgaactaaacacacccataggctttccctcaattcagcctgcatgcgtgctccatcgctgatggatcccaattcccaaaacccctgccaccgccggcgtctagtgcccggcgccggggctcgggccggagtccatgatcccgccaagcatgtcgaggctgacagacttcagccactgcaggccaccgtcaccggcattctccatgctcccgaccattgcctccaaatcgaccgccagcgactccaccgcgtccccgtctttctccatctgcttaagcatctaatactcctgggagcgccgcatcgccgctgagggccgccgcgccaccgcctggggccaccgcatcgcccctgtcacccatcgtgttaggtttagggctgtcttcttatttttccaatttcttttcttttaacggattgagatagtataatttggagtgagggcgatttagtcatttttgtaaactttttttgttctaacagtgtggactaaacagtgcgttgactgtgatggcatttctgggacaaataggcttgtataatggcactttcaggaagttgtgcttgttgacggcatttctgggattagggtacttgtcaatggcatttcatggattctctttttttttattacacggtacacacaccactacatgcgcaatattacactcacatcccctacgaatgtgcctctaacgcatgcttaaagagacgaaaaccaaatgcacatccttgatcttactaaaatcatgttaaaaactcgcctataaatacgtaatattcgtgggtacaggatttaaaccctgatgaataaaatcatgcaccatgactccgccatcccaacactaattcttccccacctcattagacttgttaaccagctcttgcacattatgtaacaaaacaatatatgctaactagtaaattatactaattacataaaaaatagttggaagtaatttgtaggacaaaatactacttaggtgttaggagcagtaaataaaaaaaagactggactttttctttgctattttaacctttttagaaaaatattttacaaatcgacccttacaatttagaaaccttattgcacatcctcggtcctcggtatcagggacgttggcaccaaggtgtgatgtctcgacgccagatgagctgacaccaagggatgggttttgatgtcaattaggctgtgttcggcagcctatgtttccaactcccctcttcgttttccgtgcacgcttttcaaattactgaacggtgtattttttgcaaaaaaaaagttctataggaaagttgcttaaaaaatcttattaatccatttttcaagttagttttagctaatacttaattaattatgcgataataagctattccgttttccgtgccagagggataggctccaactggcacaaatgaacgcagcctttagtttggcactgacctctcccatctagatttttttagggaaactctcccatctagatttcctctaaatctatacattttaaaactaaactattcaaacaggacgaaacacccttcccctattttagctagttttgacatgagctagcggtgaatataagatgaatctcataagttggagttccacaaaccaaactagcagtgaaactgcaatgacagaataatctaagcaaaacccaaccctaattcaacaacggctactgaataaatagattctagggttgaccaaggacccatggacacgtccctaatggatgccaacatatttcgatgattctcgttgacttagaaggagtgttaacatgagaccagatccattggagagttgatctcgttagctttccatacatatgtagaaagtaaaaaagtaattcgaatgagatcttggcgatgattttggtgcgagcttctcctggattccaagatggattcaaacttaatatgaattgggcctccatctccaagcctctctccaagtgcttcctagccctcgctcatacacatccaaagcagtgatgccatcatcagttgctgccctagatccatgttgcgatggtcaccacactcactgccgtcctagaaccatgctcaggttcagctcatcgggaaagtgtgcaatgaggaggaggtcggcatgtgctcctagcgtgtcaaggagtaggcagcagggaggcgtgatcagggtcatcgtgtgcatggtatgaattgtctaccagagagacgggagagatgacagggagtacatggcatcatggagacttaagcaattaggcacacacttttatcatagcatgcaatttttatctgaaaacaatgcgatatgaaaattttggcataacatgatcaagggaagggggtaatgtaatccgcactagtggtcatctgggttgcacatgggttcctcgttgtataagtagccagctacatggatgggaacttaatttcaattagaacataattaaataaatccataaaaattctaaaaattccaaaattacgaaatcaatcttcttggatagacctttattttagatgaatttaagtttaagttccactcaatttggagttaaactggctgtgatattgcctctaaaagattcaaatttaaattaattgaaattattgcgatatgttacagtgctacccttttcatttctccatgagaacttggaggagtctgaggcttccgctcaaacttcaatcaacatggattcgtggtgaagaaaatgtggggttaagtgttcattgcatagtctagggctctaggcaaactcccgaagtggccttcgcatccttctattgtggtggttagatgacgatgcagctgacgaatggtggagagtatcagggtcagaaaggagggcatgtggaggccattgtgagaaggtgtaaatggtggctaattgcatgggccaaggttgttggagctatgcattaccaagaacatggtggaatgacataaccgggtttggcatcggcatcatgtgtagggttgggtgttcagtttttccggttaaatcggtacggtttctttggttatacctaattccattttcttataaatggcagaattctagtttcttataaatggcaactgaagtaaacgataaaataaatgtaaccacacaaaataaaccgaatcacgtcggttcgattcctcggtttaccaagacaaccgacctgctcaccaagcacgcgttccagatagcattgggatagctagatgcgatctcccttgcggccttcacggagcgaacatctcccacaagctagttagcaacaaagttaaggtaatgggctttggcctattgagttaagtgagcctttgagactttcatgttggaaacaccagggaagtactttggactagtaatgcatgtacctagatcagttgttcggctttgttggttaagccggagattgaacacaagcaaaaataaaacgaagaaaaaaccaaagataaaaaaaactgctacttcggctcggttcggtatggttcgctccggtcttcggttgtcggtattattgtgcctacccctactcatgtgtccatggggctcaccacacacctgcatccaatgacatttaatcattctaagcaccatgcttacatttctaaataatgtcagtaattctcccacccttcggatggataagttaaaactagtgcaatccgttaagatcattggaccgatgtcgtagcatagatcgactaatctaaactgtatagtttatgaaataagtataaactactcataaaccatataactgacaaagcagtatatgaattaaaaacataattaggtagataagatatttctattattgagctcatagtattacaagaagagtacattactaaaaacatacccgaatctccgagaagattgggaaattgaagaaatattctaatcctaaactccactaaactaaagagtatacaaaatgtagaatagagagattgcttcttgagtgtgtggagtgaagtgagaagcacccataaccaccatcaggggccaacggagagctgccatagggaaggcggaggtgagaggggccatgcctggtttggctgacccctggtttagccaaaccagggcaaccgtctctctccaccgaccttctcccagaggctgccaggtgggcccctaggtcagtgcacgatggattagccctgaattaagtcggtttggtatgacttgtgagccctccaatccttgtgctttcacgtgattcgctagaggtgtgtttctttgcaagccgacacatttctccttcactttattgtataatccttacatccatagtatttctccaagacaagtggaactacattatttataactaatatgcgtataagaaatgctagttctccttttattattgagctaattgacacttgaaatcggtatttaatgaccgtcaacacccgtgaggagctagctagcctatagttgtgggtgacgcgggcctagctggcgcaaggaaaggtgaggcttggttgccctagtgggctgactagctagctcagttgaggttgtccagtggggatgggtcgaattgggggcattgtctcgagcctactaagaaagtatttcctatttccaacaaatttattaattagttgaaaatttttttcgaccaaattatttcatatttcatattcttaactcagatgtttttcttagttaaaggaattttatttaagttggtgagatggctaacaagaaaccgccagaaccatcatggatgcaggatttcagaaaagatttttgacaattcaaaattttgggttccatatttttatttcataaaattcaggatgttacatccgggctgctggatctcataatagggaggtgtagagggctaaatctgaccacacacaccaccatggttgtctcgctggtgatgcatgaagtctcgtctatgccgctgggagctcctcttcccttccattttctcccccgaggctacccccacttcctccctagttccatcaatgtcgccacaccatctcccttctaacttagaggtgatggatctattctccactagcatggggccattgaatctgaccactccaaacactagggccaccagatcccaccctccaagcttgggtcacttgaacccaacggtagggtggtgcggtggcacaactaatggcattataatgggtaaggcgatggcacacaatggtgataagtgctatgatgggaaaggtgatggaaacaagcatggggatgtccataatgataatgcagcaatgactacaatggtagcatatcaatgactaagcgaggagagcaagaagcatgagatgatcatgaaggcagtgcggtgacgaccaagagagcggactgagcggtggttgtaagtccctcctacgatgatggtagtattattttattttttttattttttgctgaaaacatgcaaactgacgattgggctcttgaacaaccaatgatactcattattgaaaccaattgtgatactccaaatatctcaattggttcaaaagccaacaatgaagtttgttatgaacaaatgttgatggctgattatgtactactgtatttgcaattgcataagggtatttgtgtcatgaggaccaatctttgcatttggtggaggttctgcaattacagtaggcatttaatactttggtagacattttatagttgcgggtgcttgatagtgttatatagttgtgggaaggcatttactactttgggtaaagtgcaatttaccccataaactattgcggtactctggattacccgtgaactacaatacgagacattcttctctcctcaatcgttaaaattttatcccttgagtaagaataaaagtggttttattattgcgtgccattgctttgcccttgtggcattggaggccacctatcaaccattgcttcatgtttccttttgtttttatccttattttttctcttctattgcttctaccaccggtaacctcctcctacttccttggtgacaatgctagcgaccaagtagcctccttcactccttcagcataggcgctggctagtcctcatttcatccccccttttctatttacccaccattgcaccatggaggcgttggcatccattcccctccccatccttgattttgttgttgtcaccgttgaggagcaaggaggtgaacaccaaacgaatgagtgttggagaccaacgatggttggtagtggtcagggtctaggcagtaagcaaggggatgcggcagaatgaggagccagcaagggtgaggtcaaggtcgaggcctaggcaatgatcaatggggctcttcagctcaatttgt

SEQ ID NO: 7190 - DNA, 19556 bp, Oryza sativa
  unsure (1)..(19556): unsure at all n locations
atcgcagaaattatgactacagaatcaccaatgcaatggaagcttatttgagagataccttgcatatatgccctttgtactcttgtaacagttccccagtggacctaatcaatgcaacaaaagataaatggatcaatcaccaaaagaaacaatttaatgatgaaggtgcacttgcagtgggttagggccctccacatagcattttgtaaaaacaacacccacgaattctacaaaataacatggtcagagtcacaacatcccctgttcagtcagttttcataatggaaacatggtagagttttttttttcttttggtctgagtcagagttgaattttgtggcagcatgtaccacaagtccacggcattaaagttagtgatgcactctaaggacttgctaggaaataattaaaggatagaaaaaaccaccctttacaaccatagcctctcccttcaaaaaacaaaacaaccataacctcttacattccatattgtactataacagaagcaggtctaacctatgaatgacagacagacaatcataatgcagacactgtaagtagttaagcacaagtgcacaacaaaatcatccaaagtagccaggtcacgtggaccacaagcaaactatggctcctaaaccatgctgttggtatggatttgttcactaatacatggtgtggcacaacaatggcacattaacttcacttggcttgacatttgttgcaaagaccaaggacagtggtccatttgacattaaaaaggtaaacagttccataacacaagttaacttgaagctttcttttccacaaaacaaaagtagtgtctaaccagattttgcaatacaaactcccaaattgtttctttaaaggaaactgcagatgcaaaaatgaagtagctccacaggcaacaacaccaacaatgttcagcacagatgcaaaatatagttgttggactcattctacttgctcttggaaagcaaattttgctagcatgtttaagaggaagatggcagatgagatcactgttgtatcagagccgagcaagaaagcccccacggattgactaatttaataagggaaacagcatgttatccagtaaaggaatggagtgagctccctaactggtgagaaaagtaactaatatgtgaaattagtgttagcagaaaatgctgttatgtcgtcttccaaattaaaaattgacagagggtgttgttttgtcactcttgaaatagaggagggactgccgatgttgaagtataaagtcagcttgcagagaatacttacttgtctagaagcctcacagtagaatccaaacaattagctaataggcaattgcggtcatttgacaaagatatacagttgacaggatgccccaagttgtcgacagtctccctgttatcagcaagagggtaacagaagcatcagacacagtggataatctgttgaagcatggataagcatctgaatacttctattcaaaaagagaagcacccaaagttccatttaggaaagctaagataacaaatgagaattggttgaatattgattgtgaaataagaaaagtacttacctacccatgcgaatgtcaaatgtgcggatagtaccatcaacactgccagcaattatttctgtgttggttaaattaactgacattacactatcttgaaaagtatcaattgtctgcaccaagtgaaaaaaatcaccagaaacccagttacccaagtatatgagaaacaaaggggaaataatactactaaaatcaatgggtccatgttcttcaacaataataagaatacctgaatagggtcactgctctgtgatctgcaatcaaatgcacgcactgtgcgatcatagccagctgagactacaactgtgttaaactcattaaacttcactgaattgatctatggaagacagaattgaggtatgtaagcaatattatcaaggatcaaaaacctgtcaccgaggttgttcttgatctgttttcagtatcccaataatcatattgacgatgtgcagtgctagatttaaaaggaagtacaacaacaccattacagaggtatcattacagcacactcattttcacacaattcaccctgcaattgactagttgtgactagatcgataatgctagagtgctgatttcgtggtgttctccacatagcacaatggaacagacgttgtttgattataaacagtgccaactgctctattccactacaatctcaggctactgctaatcctatcataaacaaccgtgctctctctgtatagataaaatcaatactagtattgaaatagcagcggcgcttaacacactgatagtatggtgctgaaactgcttaatagtacaatttttcatgagcacttctcacttgctcaatccaaccgcgatcaccaaacaattacaacagcgcggtcatcatcacagtgagaattggggtccatacctcgctgttgtggccgcggaacttgcggatgacacgggcagatgcgacatcccagtagaagacctgcctgtccccgccgcacgacaccagcttggcattgtccctgcaagcaaaggatcctcaaattccccactggtgctcagctcctccaaatcagacaggggaagttggtgttggggggacggaatcgcagcgaggaagaggaagcgaagtggcttacgaggaggagttcacgtcgcggacctcgcggccgtgggacttgtagggcttgacgagggcgccggtgtgggggttccagaggcggatgatccggtccttgccgcagctcaggcagtagttcccgtcccgattgaatcgcaccgccagcaccggcccctcgtgccccgacagcaccctggcctccgtccgcggcagccgcgccgccgccgccgccgccatctccccgcttcctcctccttcccggcgtcggtgacggtgacgaactaggtttcttttttttcttttttcttttttcttttttttcttttgagatataaacggcgacgggttcccaacttgggctggcccatgggccgtgtaccgtgtacgagtcggattcccccgaggcccagactactactatccatccgtatatccgtacgccggagagccccgccgacgtagacgaaaccggccaaaactaatccaatggcggcggcggcggcggcggcggaggggagagggccacggcgcgtgcgcaacacctgcatcttggcgcacgtcgaccacggcaagaccagcctggccgaccacctcatcgcggcgtacggcagcgagcgccgggtgagcgagaggatggccgggagcgcccgcgtgatggaccacctggaggaggagcagcggcgggccatcaccatgaagtcggcctcgatcgcgctccgccgcggcggggaggacggcggcggccaccgcgtccacctgatcgactccccgggccacatcgacttctgctccgaggtctccgccgccgcgcggctcgccgactcggcgctcgtcctcgtcgacgccgccgagggggtccgggtccagacccacgccgcgctgcgccaggcgttcgtcgagcgcctccgcccctgcctcgtcctcaacaaggtggaccgcctcgtcgccgagctccgcctcacccccgccgaggcgcacgcgcgcctccgccgcatcgtgtccgaggtcaactccatctactccgcgctgcgctcgcgctcctacttctccaccctcgacgccgcctgcgccctctcgcaagaactccccgacaacggcgacgccgccgacgaggaggaggacgcgttccagccgcagaacggcaacgtcgtcttcgcctgcgcgcgcgagggctggggcttccgcctcgtcacgctggccaagctactagcccccaagctcagagccgaccccgcggagcttctcaaaggcctatgggggcagaagtacttcgacgagaggagcaggacggtggtggggaaggaggccatggcggcggcgacggccaacccgaacccgaagccgatgttcgtcaagtacgtcctcgagccgctctggggtcagtaccacaagatgaagcggaagctgcggctcgcggaggcggtgttcgacatggtcgtggagtgcactcccaaccccatcgccgcgcaggccaccagggtggcaaggctcatgccggccgccaagacggagcagctaacggcggccgcgccgtgccccgccgctgtcgccgcggaggtggagaaggtgaggaggtgcgtggcgacgtgcaacgcgagcaccagcgcgccggtggtggtgttcgtgtccaagatgttcgccgtgccatacaggttcctgccatccaggggcgtcaatggcgagcccctgaaccacaggggatcatcatccagcgccgaatcaggggagtgtttcttggcgttcgcgagggtgttcagcggcgtcctccgtgctggccacaaggtgttcgtcctgtcccccatgtatgatccactgagaggaggggacgacgcaatgcagcagaagcatctgcaggaggtggagctgcagcacctgtaccagatgatggggcctgacctggagatcgtctccgccgtgcgcgccggcgacgtgctcgcgatcgaagggctcgggcatcacgtgctgaagaacgccacgctgtcgtcgaccaagaactgccagccgttctcgggcatgatgttccaggtgtccccgatgctcaaggtcgcaattgagccctccaatccgtcagatttgggcgcccttgtcaaggggctcaagcttctcaaccaggctgacccgttcatcgagtacaccgtctcggaacgcggcgagcatgtcctcgctgcagctggcgagatacatttggagcattgcatcaagaatctgcaggagaggtttgcaagagtccagctggaggtgtccaagccattggtgtcgttcaaggacaccatccaaggagaaggtgccggtataatggagagcctgaaagcttcacatgaatttgttgagaggactactccaaatgggagattcactgtcagagttaaggtcttcaggcttcccaatgctgtcactaaggtcattgaggatagcaaagaattgcttgctcaagtaatcgagggggattcaggaaatagtaatggtgtgttggattcacggttttcgcaggatggcggtgattctgcatcaacacttaggcagctcctcatcaatgccatagacagtgatctcgaagcgctctctgctcagttggatgatgaaaagacagagagttacagaaagatgttgattgggtaccttcagagaatctgggcacttggtcctctgcaagttggaccaaatctcctcctctcacctgatgcaacatcaagcgatggtgtggtgaccagccaagatggaagagaaggtattctcgtgcgcggtacatgccatgtttctgagaggttagggcttgtgaattcttctgatgcaaaaactacaattggcatcgacggcagtcaatcagcagtagatggtcttgatcctgaaacagtgaagaacagcattgcaacaggatttcagcttgcaaccaatgcaggaccattatgtggtgaacctacttggggcttgatattccttgttaaaccttacatacttccggatagtgcagatgctagcaataatcaatctgaccattacagcaccttcagtggtcagatcattacagcggtccgagaagcatgccaggcagccatccttgagagcaaaccaaggcttgtggagccaatgtacttctgcgaactgaccacacctactgagcagttaggttccatgtatgctgttcttggcaattgtcgggcgagggtgctgaaggaagagatgcaggagggaacctcattgttcacggtgcatgcgtatttgtcagttgccgagagctctgaattctctaagaagctcaggaatgcaactgcaggtgcagccagcgcgcttctggccttcagtcactgggagactgttcctcaggatcccttctttgttccgaaaactcgcgaggagattgaagaattcggagatggctcaaacattggcccaaacctggcaacgaagctcatgaattctgtgaggcgaagaaagggactgcacgttgaagagaaaattgtcgagtatggcacgaaacaacgaactttagctaagaaagtatagttatgtttactggtatgtaggagctaacctgttgttttgtcctggtaaattgagatatgttagtatacaaccaaaaccaagtatgcattttacatgactgtgcagttttgatgtaccaaaaatgcatcattttacatgattatacagttttgatgtaccaatgattttatagtgacatatgtatagtataggtgacaatcagatgacaaaagagtagcaacaagatggtaatttgccggaaactcctgtatatatacgttgaaattgttggattattctgtgtaatactgtcagctgtacggatggataatcttgtgggttgggtgtatttatgaagagaagaaaccctgctatattttttttaacttcctgcaatggtgttttctctgctctttctgcttaggccgtcttgccggttcctgtacagtatcgtttcttgcgattactgcaacaattatgcggttgatccattgtctctttgcaacaaacaaaacaaaatttcaacgtgctgtagtacataacatggtttatgcaaaagtcctcaatgtgcatatcttaaaggttttcagcgtgaattgattgaacagataaaattatcgttccgctctgattttttttttttcatttgcacagaagacagatccccaataaagcaataactagaatacggtatcatctaggttaaacttctaccggtaaacttgcaaactagattggaacacatcagagcattaataagaaatcttcactaatgtattaatactagttcagtacttcaagttgatgaagtatttggatgcttatggggagaaaaggcacttttttttttttgaaaggaacgggagaaaaggcacttgaaagaagctaccagtataaagcgtcaaaagaaaattccagtatgtattatgatgatcaacttggacttagcaaacttgtattgcgcgtaaattctaagaactacagaatttccacttatgtttggactacaaagtgtataaatgcatccatttgcgtaagctctttacatgatcaacttaaaggaccatataaccatttcacataaacggcagcaataacctgacctcacatactgacgaactatcggtttcagtcatgcaaaatcttttgaaacctaatcaagagagtaagatccagagatacacccatggatgatggaacatagtgttaaaacccttaccagaaccaccaaaaggattaccagtactaacaacctgaaatcagaaattatgggaatccaaatttgaaatattacctattcattacaaatgcacgacaaatatagatatgtggagctggagatactccctaaatgttttaaaacatggaaatcatgtagtaggttcacaaatactgtaacatctagtagtaaacaattagctggcaaagattaggtaacacttttttattctttccacattgttttcagtatcaacagattgtttgcagagttaactacagcagtcagactgcctaacaacgaaatgaaactgccatgccaatctttttcaaattttcggttctcatatttcaagcattgatgtagagtatcaattgtctgcaccaggtgaaaacaatcaccgcaaacccaagaacatgagaaataaagggcgaaaaagtactaccagaattatatcactgctctgtgacctgaagtcaaatgcacgcaccatccatttggataagctatttgcatgatcaactttgagaatcatattatcatgcatttctcatacaatgggagtaaatcaaacagaacccacataatcataatgattaaccagaaattagaaactgtggaagtccaaatttgaaattgccaattcattacaaatgcactactaatatagctatgtggagctggagatatgccttacacgtgttcaaacatagaaaccatgcagttggttcaaacactgtagcatctaggaacaaaaatcagtaaacaaatactaactgaggaagattaatatgcctattcattcctaaatgtgcactgtcaatatcgcaacatggtttcagaattgagtacaacaggactgcctgacaataaaatagagctatcatgccaatcatttttcaattctttggtttacatatttcaggcattgaacgtgcagactaataatcaaatcaaaatttgatactactttcctggaacacacaactaaagcttgggcttgacaattttcaaagcacacgtatcatgtgctatgcaactgataaatcactgcaaatttcatgaagcatacatttcatactaattggtaaactcagtcagcatggcagaagcctgaaataactagtagcttctgcctatgtacttgtgctgttgtgcagattatgataaacaaacaagacaaacaacaaaggatgcaacactatatattgtggtgaacagtggttagctttttcattcagtatttcagtccaactgaaaattcagaaattaacagagagcatctgtatcaacatgaatcccaaccagcatgcttgctactaaatacaaaatgtccaaatgacttagcaacagcaacaaaccaattctgtcgaattgattgccacaggcaatttcaagcttcttctacatctacggaaacttgaacacacatctaaagcatagattcagcagattgcaaaacctggttgctatctagcagattacggaccttggaagaacggcgggtcgccgtcgattgcatcttcctgccgcatcggaaggaacgcatgcgcaagaaggctttcctggagcatatatctggacaggacggtgaggtggccggcgagggagtaaaacatgagcacgttcccctcggtgtcgcactggagcatcatcgccgggcactgtgccagcacattcctctcctgggacacggcgaacactgctgcggatacgaagccttcgtcgtcgtagccaccgaaaacgttgagcagatccaccggcagcgagatctggtaatggtgttcccaagcctccccttcctgaagaacccagacatccacggtggtctgcgagacgagcgtcatggcgagcctcccgttgatctcaagcagctggtctccctccaccgggatcatctgattaccttcctgttgattcgggggaggtatccacccgaaggactcggcgaccgtgtcgaacaccagcacgttgaggctggccgcctgcgcgcgccagtgcagcctgtgcgcgatggcgacgggcggcatctcgtaggaaggggagatcccctcggcgagcacggcgcggacggtctccaggtcggcggggcgcccgatgtccctcggcggctggtccgggaagaagctcagggagaagacccagtagcggcagccggggcgcgccgtgtggtacagcaccctgtactccctctcgtcgatggcgccgtggccgtagaagccgacgatgacgtggtcgtcgtggagcggcgggaggcggcgccaccggcgcgtggaggggtttgaggcgtatagcctggtgtggtaagagaagaggaggatgccgtcncangagccctcgatcgtgaacacgcgcgggtcggcgctgcggaggtcggcgtcggcgtgggagaagcagatgaccgggtgggtctcgttggcggcgacgtcgacggcgcggaggtggacgcggacgcggtcggggaaggcccagtggtcgaggcggtagaagaagagcggcatggggtggcgggagcggtggcgctggtggccgcggcggaaggagtccgtggcgatgaggtcgcgcagccgcctgcagacgccgctgcagcgggccacctcggcggccggcatgcggaggaggacctggtggagcgcgtccacctcgacgcgccgcagttcgcgcggggcacgaatccctgctacattcggcaagtccctgttcgcctcctcgtgttcccctccgtttgccgccgcagcttggtcgttctccgccgcagcctggtcgttctccgccgcagcttggtcgttctccgccgcagcctggtcgttcgccgccgcagcctggtcgcctccgttcgccgccgcctccgcctggtcgtctccgttcgccgccggctcctggtcgtctccgttcgcgacgatggccggtgggtggtggtctccgttcggcggagcatcctcgtggccaccgttgtccgccatggccgacgaggcgagatgggggtgcgggtggaaacgaccgttggtggtgggaaaaggagagaagaggaggaagaaaggggagggcgagatttgcgggggggatttggtggaggcggcgagatgagctggaggcgacgccgcgtgggctttttgtactactacattcggtgagaggaataattggaccggatctcagtttgcgagtttacttgggccacaagtataaggcggttaggccttaggctgaaatggcactgagctgagatatccgaaattcactactccatttatgcagtgattgtgaaaacgcatgtagtatagtgattggagtgacatgagtagcatctcaaggtcctgagtttaaatctctgtaggagcaaatttcaaattggattgtttaaggtattaagttcctaatttaaaagactacatatatccgattagatatagagaccgggtgaaaaatacccttccctacaaaaaaaaaaagttatgcatagactatcagattgtcaatgtgatttactttttactttttagaagtcctgccacccgtcgtgaccatgttgcttaacggcttgtctatcgtcccttctcttaatcatcattgagattctatttgtgcttttgtttatagtttttagatgtcgcatcaagtgccaccaacttactcctttacgggcctaatgtttctctcttctttatggttacctgtcatgtttgagttctagatggactttttttttgaaaattccatatttttcgttccgatattttcttatttgtaaagtgtattcctacttgaactcttagaattatttttctatttttgaaatttattttattttttattttgaattttaaggattcattttttaatttctagaagtcccgccaaccgccgccggctccacaccattatactcctatatggtatacccgttatctcccctatctattatcattgagattctaaaaaaaacatgattgttattgtgttttatttttttttactttatataagtcccgccaaccgttgtgactatactgcttaacgtcatgtctgtcgttccacctcttaatcgttcttgggggttctatttgcagttttgtttataatttgtaaatgtctcatcaactgttcaccatcttactattttacgggcctattacttgtctcttctttctttattgttatttgtcaccgttgacttctaggttgattaattttttgaaaatttcaatttttttattctgatattttttttatttataaagtgtattcctacaagaactcttataattatttttctatttttagaatttattttattttttaatttgaattttaattattctcgtattcagttatataagcactcttcttcatatattaattatttttaattccgaatttcagttatatctaaattgtattcctgctttaactctctttttctcttttctaattcagaatttattttatttttaattcagaattttaatttatctcgtattcgattccgaatttccgttatttctaaattgtattcctacttggactcttcttttcttttctaattcggattttattttatttttattccaaattttgaataatcacatattgggtttttatatggactcttcttttaatattgcttatttttaattccgaattttatttatttttagattgtatttctacttggactctccttttctttttctccgattaatgtgggaatttctagtccccacagcgaacgtggtaccttctttcaaggctgttttaataatataatttttaaaatctcaatgataataaaaatatatgagtatagtaaagccgacagtggttgggcagatttctagaaagtaaaagatgaaccccaacgatagttatgttcaattttcaaaatcccaataacaataaatgtgggagacaacagacggatcgtggagaattacagtattgatgtttgacaacactcctaaaaattataataagggaacttgacgagacaatggactctaaaaactagaaggtctattttttaaaggtttaaaggaagataaataaatccgtgatagattgggtaaacagataaaggggtgataaaagagtaagaggtaacgactggtgtgacttttaaataaaaactataaaaatttaaggatgataaggttcgatcttttaaaattataagacaacataatggctatttaacaaattttaagtaatatcaaatatagaaaaatagataattttatatggatgctagccgcgcaattgcgcaggtcacccagctagttaatagcaaagaacagtttgtgcatctctcccgatcgggcccaacgtgtcccggcccatgaatcccatgatcgaggagcctagccccccaacccggaattcccggccatgccgaagcccaaggcaaagaggcccacgccgccacgggctcaccgcagatccacccccacgggcgcgggcgcggcaggnctgggcctgacgcccacggcgtacgtgggcgtggactacgcgcgccgccacctgccgcaggcgtggtggcggtggcacgaccggctgcagccggcgctctggggggcgctggcgttggccgccgccgcgcgcgcgcccttctaccgccggtgggacgccgagctccgcgccgcgccgcggttcttcgccgccatggcgctcatgctcgccgcgttcctctgggaggccgtctccgtccgtttcgtctccaccgtcctcggcctccattggcaccggtcagtcccttcttcttctagccggccgcagcgaaatcagcgagggtttctttttttggggggtttcgggtaaaaatgtcgggggcttggtgacatcgtttgttcgcgttcttgcgctaatcatcgtggagcctgtggatcgcggttgttgtgattaggatttttcgaagaagaatgctcttgcagcggttactcgtagcaatgtgtaaaactgagcattgattaactgtggttcaaatgcttgatttggttaccccccaatcaaaaccatttcggtgaattgcttgctggtaggattgggttttgctttcgtttatattttatttatcagatgatttgcaagacaggtactttttacctctggtaacggattggtgtgagaactgagaactgtagataagacatcaattgtttctgaaatctaacaattgtgggttagtgcatttctattagttcgtgaagattaagaatctgttcttagttcttgctcacactttatttggatgattaactcaagtccacaatgcttggaaactttttaaggatcctagtggtgctttggataggaaatagaatggttcctttagggggaaaacacagaaatctattaactgtttatgtgcatttatgcaacattttgttccatatataacctttttcgccttgttagttaaatatgtagtgaggttagcaccttcacttttttttttccattaatggtatgttttttactccacccatgaaattgaactaccactagaagatattactagtagtgaggcagtgacaactttttgtcctgaccaacttcctccctttgtgcttatgcttatttgactgcactgtttattctgcacttttgtgccataaaaatcttaacaagagataaactaagactggtccatttttttctccacagatctacagctcctcttcccgacactgggcagtggctgcttctagcattgaatgagaaacttccgcaaattgtggttgatctcctcagagcacccatcatcagtcttcatcactatctgatgttgtttatcatgctggggttttcagctctgtttgactgcatcaaaggccctggacttggcatagctgcaagatatatgttcacaatggcagttggacgttcgctgcggactgtaacatttcttgctacgattctaccatccgcgaggccttggtgtgctgaagctcgatatcaaatacctgatcatcctcatccttgggcacagaaatactatgctccatatgcctctgatccagatgcgatccgtagggtcatacaagaggatatgccatatggtcagcacatccaacttataacccttactgatatggcttcttttattggcctgcagtagctaatgttcttccttcctaattatagctttcgttaaagagtaccctcgtgagtatagacctaagtggggacatatgagcttcttagtagacattttgaggccaactgttgaagaggggtcctcatggtatcattttctgaagaaggcaagtggtggctgcagtgatcttatgtatagtggccacatgcttgttgctgtcctcaccgctatggcatggacggtaagctatggctattttgtcttccagattgtcacaagtcacgaccaagatgcattcatttattctccttatgccctgctaaaaccaaaacggaattaactggctgcacgttaaatcgaaagaatgttatacactcatcaagccatccttgctatatgttcttttaaaaaatgcacatggttatgcctgcttttatagtttcatggcctgtgtcaatgcatcattaattggatttatttctttgcaagtgacatcatgaaccagttttaagcattccctaacatgctctgtgataattattgttaaatcaatcaagcactacatttatgtgacagctaggactcttgcggtgaagagttcagtttacccttgtctattttcttttcgtaggcatggcccttcctcctgatgataactccatcttgattaatttctgtgttgggctgttacttactgttcaattatcataatagatcctttttccatcgtcacaggaagcatatgggggatggatctctgttgttatatggtttcttgtcctccacagcgctcagagggagatacgggagcgccatcattacagtgttgattgcatcgtggcaatctacgtcggaatcctcttgtggaggatgactggtttcatttggtctgcgatagacaacagtcatgccagaaggcttgcaaagctcgacaaggttcagaacagactatttcaggctgcaaaagattcagacatggatgaaataaggggtctgctgaacgaagttgagctggctggccaagagaggaagggcttctcgcagcgtgtcatcttgtctttctcctctgctatgatagttttcaccctctcatgtgttctcctagcattcacactaaccagcgatggatgatttcttcgcaggcttcatactttcagtttcatattggcagattgagttttacttttacatgatcccagctctagattttttttgtagtgtaggttgagagattacgttgatgctacttacctagtagttgaattagcagtgaaacttgtttcaggggtgctctctcttggcactaaatttttgttgatatctgtagcaaacaaaatctagatacttgtgaggaaaataaggattatctcctgtgttacagttgttgagaagccctttgctaatgagatgagatggttatgacgataatggtggtggatgtgttagagaattagtgatgggaaaccatgtgaaccattgatgcaataatgcattttaatttgttttttcagtccaaagaaatggttcttcccatggcagcctgagctggaacatggaaatggaccaatgactccacgagaatgtggcccgcttgtcaccaaaatcatctaaaaatatgatttggaaatatatgctatattctagacttagtcaagctaagctggaaattttatttctagactcttattaagctggagatgtctctgtcaattgatcgtaatttggtttgaaagtcagctcatttctacatcgtcagacaagtattaattgtagtgcttctggtgatgaattttgtgaaccattttgaaggaaaaggaaagggataagttgcagttaacttgtaaattgccagactgatacacatattatctatgcgcgcgggagatgatttcatacatatatacgagagtattttacaactgaaaaatgtcaagtttcagatatatttactgtgagttgttgttatctattgatcgtaatacaggcagaaactagtggagttttcttttggacaattaatccccggacgtgcgcaaggcgtgcattcagacccttgacagcgcctcaaagtgaaaacgaaaaccagggaagggatggacaaatgatatctactactccctctgaatccaaatgtaagttactttagccttctcaattctttcctagatgtaaaatgtaaatcttgtttaaactctttctttaatcttttcttgtatatttgcttttgccaaataaatgttatcctcctcacaaatacaccgttcttcttttctaatatagtcaattcgatcaaataaagggcaagaaaattcttgtgtacaaatcagattgcgtataccgtgttttacatagacggttctgtggttttgcatcgttcccgcggttacttccagcactgagcgcttccaaatcagcgctctgaatttctgaagccgcgagttcttccaattcttcgctatgaagtactacctccatattcatattttaatgtatgacgccgttgactttttatccaacgtttgaccattcgtcttattcaaaaaaattatgtaattatcatttattttattatgacttgattcttcattaaatgttctttaagcatgacataaatattttcatatttgcacaaaaaaatttgaataaaacgaatggtcaaacgttggtcgaaaagtcaacggcgtcatacattaaaatacggagggagtactagtttgtactacctctatcccaggacatagcaatttaggattgatctacgtatcttatactacaccaacgaatctaaacatatggtatgtagtactccctccgtcccaaaatataacaacctttagcacttaggatttgtcccaaaatatatcaacttatccatcatcccaaccaatcacagccctccaccatccacttttctcacctaccttcactactcatccaaacacaaccctccaccattcatttctgcctacttttttaataatcatgttcaactctaaaacttattatattctgggacggagggagtatacctgacacgctttcgatctgcctggtctgcatgatgatctctggtttcagaattggtacaaagggctcattcagaaaagtcttgaaattcacgttgtcatcaacggaaaataggacggttggccgcttggcccaaatcacaccgtggggccatgagttgttgatctaatgaacttttttgaaaccttgatccaatgaactaggcactcgaatttgctaggggttaaggtataaaagtggttcggtgaaaatattttactcacgataaaggtagaacaacaagtaatttcaaacgaaagaaaaatctgtaggtttgaacccacaggtacaagttaaaaggatgtgcttgaacaactcatgcagttttaccgttcattttctgaatcttaatttttgtatccttagctctgaagaaatcaagaaaccgagttcaacctactttgtcctgtcgggctgtctctatccgggctgataagaaccgagggagtgtgacaaaacccaactggccaatccgcgtgttgattacatttccaaatccttggtcgacgctaacaaccattgtccatgtcgatgcttagctgatgaatcttgactttgtttgcatgtccttccaccaattaaggtgaagatctagcagatgagctgtaatagccatcacactgcttcatttctgaaagacaattcaagcagtaacaaattaatggcaaacttataactcctatgtacaccattgtactgtgtacaaacaactaaacgtattcggtaatttcagtaactaggtttctgaataatcatgccagttaattagtagtagtattgatgatgcatcttaggtcaccagctggcacgtcccattcggataattgcagtggctgactggctctgattaattaattgatgatcgatcgagcgcgccattacgcggtgagtgaccatgaacgagtctttatcaaattaaataggccattagctaattaacctaattagatggatatatccattatcccaaacagtatatctctctcttgattccttgagacttttgagggttcatagttcatacctgcaacaacaactgcgcgtaacacataccacacgcccaagtacgccctccccctctaaactgagatttgaggcccaaactaatgttattagcaagtagctgatgctagccgctccttgctataaatacatgtgctttgctagttagcttttgcacagatcaacaccggcaaccgactaactctgtctgaaggaagctaagattattaatcagtgagtagctagccatggctgaggagaagaagcaccaccacctgttccaccacaagaaggacggggaggaggagagctccggcgtggtggactacgacaaggagaagaagcaccacaagcacctcgagcagctcggcggcctcggcgccatcgccgccggcgcctacgctctcgtaagtcattaattagtacatttgaccaccactattacaagaaaatcgattttcgcagacgtatatgtcatcccccactttaactaacctatatgttttagccgcttggaaaaatcgattatgtagtggtgaactatgatctaatgataactacctagccatagctgattaattaagagataattaacggagaatttatttgtggtacgtcgttgcagcacgagaagcaccaggcgaagaaggacacggagaacgcgcacgggcacaaggtgaaggaggaggtggcggcggtggccgcgctgggcgccgcggggttcgccttccacgagcaccacgagaagaaggacgccaagaagcacgccgccgaccaatactagatcgatcccgatcgaatgaacgcaagaacgaacggtttatatgcttaattactttctccccataattacatgtatgcatgtggttgatggcttaatttgcttcttcttgttcgtcgtcatacgtcgtcgcttttacttcgtgttcatgtacattaattctgtatccgcactgagtattaaataagtgcgtttgtgctgcacacagaaattttggtttcgttttatttttcttctttgaaatgaagggcgtaagacacggct

SEQ ID NO: 7191 - DNA, 1437 bp, Oryza sativa
aagaaaacactgtgtcgggcgacaaacactttgccctcttcccgatgataaaaataatatcctttcgtttccttaggataccccacaaagaagcatttatctgatttaggtgtgagtttgtctgattgcaaacgttttacatagacctcacagccccaaatctttaggaaagacaaaatgggacgcttccctgtccatatctcatatgttgtcttatccactgattttgatggaaccctatttagtgtgaacgcagctgtctctagagcgtaaccccaaaagcttagcggcagatcagtttggctcatcattaatcgcaccatgtccaacaatgtacgattcctccgttcagacaccccattccactgaggcgttcctggcggagtgagttgtggaacaattccacactcctttagatgattgccaaattcaaggctcaagtactctccaccacgatcagatcgtagatacttgattgtcttgcccaaatgattttgtatctcattttgaaattccttgaacttttcaaaggactcagacttatgcctcatcaagtagacataaccatatctactaaagtcatcggtaaaggtaataaagtacccaaaaccacctctggcagttgagctcattggtccacatacatcagtatgtactggtcccaatagttcacttgccctttcactttgacccgtgaaaggtgcctttgtaattttgccaagttaacaagattcacatgtctcaaatgattcaaaatcaaacgagtgtagaagtccatctctatgaagcttctccatgcgtttctcatttatatgacccaagcgacaatgccaaataaaagtgggattcaaatcattaggacgttgccattttgcattaatgttatagactgaacatccatcaagattcacaatgtataagccattcatcatgggtgcatggaaatagaaaatgtcattataatagactgaacaaccattgtccatagatctaaaaccataaccctctgcttgcaaacaagaagcagagataacgttcttacacaaagctggaatgcaataacaattatttaactccaaaactaatcctaacggtaaagataatggcatagtgtcgaccgcaacagcagcaactcttgctccattgcccacgcgaatgtccacttcgcctcttgctaagctcctacttcttttcagcccctacaacgatttgcatatatgagcaactgacccggtatcaaatacccaagaatcagtagaggaagtagcaagattaatttctataacattaatacctgaggtggaactctttccatcctgctgcttctgcttgagctgctctaggtatttcttacagtttctcttccaatgacctgtctccttgcaaaagaaacactctgcatccttagcgggcactgtcttttgaaccttgggctta

SEQ ID NO: 7192 - DNA, 2643 bp, Oryza sativa
tcaccaccttggagtcggtgcccatagtctgtgaatatcccgacgtattcccagaagaattaacgagtatgccaccagactgagagattgagttcgccataaaactggcgccaggcaccgcaccaattgcaaaaagaccctaccgaatggcagctaatgagttagcagaagttaagagacaaatcgaagaattggagagtaaaggttatgtgcgacctagctcatccccttggggagccccagtgcttctggttaagaaaaaggatggctctgagagaatggtaatcgactatagagccctgaatgaagtaactataaagaacaagtacccgttgccacggattgacgatttgttcgatcaacttaaaggagcaagagttttctcaaaaattgacttgaggtcaggttaccaccaactgaaaatcagatctgaagatatcccgaagaccgctttctcaacgcgttatggtctatacgagttcacagtaatgtccttcggactcaccaatgctccagcgttcttcatgaacttaatgaacaaaatctttatggaatacctggaccagtttgtcgtggtgttcatcgatgacatcctgatatactccaagaatgaggaagaacatgctgaacacctgaggctgataatggaaaagctcagagatcatcaactattcgcaaaattctcgaaatgcaaattctggttagaccgagtagcatttcttggacacgtgatctcctccaacggtgtcgaagtagatcccagcaaggttgaagctgtacttgcttggaacccgcccacgaatgtgtcagagatccgcagcttccttggcttagctggatattatcgaagattcattgaaggattctctaagctagccagacctatgaccgagctgttaaagaaggaaaagaaatttcaatggtctgcagcctgtgaagacagctttcaagaaatgagaaaaggttgaccactgccccagttctcaccttgccagatatccgaaaagatttcgagatcttttgtgatgcatcaagacaaggcttaggatgtgtcctaatgcaagaacgaaaggttgtggcctatgcatccaggcagctcaggcctcatgaagtcaattatcccacccatgatctcgagttggcagccgtggttcatgctcttaagatctggaggcactatttaatcgggaacagatgtgaagtatacaccgatcacaaaagtctaaagtatatcttcacacagaccgagttaaatatgaggcagagaagatggctggaactaatcaaggattacgatcttggaatccattaccatcccggtaaagctaacgtggtcgctgatgcgctaagtcgcaaggtctattgcaacgtagctcaaatatggcctgaccaagatcgcctgtgcagagaattggagaagttgaggctgaccgtggtacagtcaggtgtccctgccagcttgacagtacagcctaccctagagtcgcaaatccgggaagcccagaaagacgacgaagggataaaagagttaataaaaagaatacaggagaagaaagacaccaatttctccatagacgatcaaggcacggtttggtgcggtccacgcatctgtgtaccggccaagaaggagttaagagatctcatcctaaaggaagctcatgagtccgcctactccattcacccaggaagtacgaagatgtaccaagatatcaaggcatacttctggtgggctggaatgaagcgagatgtcgcagaatacgtagccctgtgtgacgtttgccaaagagtcaaggcagaacatcagaggccagctggtctgctgcaacccctatcgattcccgagtggaaatgggaagagatcggaatggatttcatcatcggtttgccaagaacccccagcgggtacgactccatttgggtaatcgtggaccgactcacgaaatcagctcatttcgtgccagtgaaaaccacctttgatggaaagaaactagcagaactctacatgacccatgtcgtatgtagatttggctgtcccaagaaaatcgtgtcagaccgaggcactcagttcacctcaaggttctggaagcagttgcatgaagccctcggaaccgatttaaatttcagtacggcctaccatccgcagaccgatggtcagacagaaagggtaaaccaagtcctagaagacatgctacgagcgtgtgccttggatttcaaaggcacttgggatcgttgtttgccgtatgccgagttctcatacaacaacagctatcaggccagcattcaaatgtcgccgaatgaggcaatgttcggaagaaagtgccgcactcccttgtgcttcccggagctgctcccttaggtgctgaatctcgaggtcgagattcttgttaggggggttggtctgtagcgcctgttccgtcgtggcgcctagcgggaaaattatctcttaaaaaccctaattgcgaaatttgtttctttgcttgttgtctagtgtccgtgccatcccaagatctcaatccccgatctatcatcgagtccaattccgaatccaatccttccaaattaaattcctccgcaaaagtctattttgcctcccccgggggtcgatgggccgatttcctcccggcccatctccccctgggggcg

SEQ ID NO: 7193 - DNA, 6696 bp, Oryza sativa
tctcccccggccctctccctcccggcgcgctccctctccccctctcccgggcgctctctctctctctcttctctcccccggccctctcccctccccggcgcgctccgctctctcccccccccactcagctccgctccgcttcgcccgcgcgccgcgcgcgcgtgcgcgaagagccgcgccgagtgctcctcctcctccgctccgcccgcgcgcttgcgcgtgagccgccgcgccgagcgcccccttcccctctcctcgctctgccgcgcctgcgtaagccgcccgcgccgagccaagtcctccctctccgctccctcgctgctacttcccgcgcgccgtgttcgcgtgcgcacgcccgcgcggacgccacccgttgcaagccgcgcgcgcatgccgagtggccgaccgcccggtcgccgccgccgtcagcctctgcacgcgtctgtcgcccgtgtcgtcgcgccgctccaaaccgcccgccgtcatcgccgtcatcaccgcccggcccccgccactccgcgcgcaagccgccaagggacggaggcagcgcccctcctccctttgccgcgtcgcccccgctcccctcctcctttttcccggatcggcaaaagggcaagcccctttctccccctcctttttccccttttcccccgccagcgtcatcctccctgtcgccgctttggccgcgaccgctgagcgccagctcgcgccttgaccgccctaagttggttcccaaaccgacattgccgccccctttaaaccccagctccttcccctccaatctccctcgttttcgcctcctcgccatagctgccgcccccgtgctctgttcgccgtcgccgttcgttgttgcgcgtgtcgaaggagtcggcacgagcaaggacgcggaaggggacttcggccgcgccctctccttcctcttccccggcccgaggccagagagattactcccgcgccgtcggcctctcgtcacagcgcccctcctcatctcggtgatgcctccctccgttcttccgcctcgctccatctcttccccctagctttcggtagtagctcaagtagactccccgtagttagccggcgtcgccccgaccgttgccgtcgctcgccgcgtgctcgccgccgtcgccgctcgagctccgtagcacccacacgtcgccagcctcgctcggcgtagctccgtccaatccgacgctagcatcgagttcccgaaaccgcgtagatgctctcaccgccgggaatcgacccctcgtggcctcgccgccgtttccctcttccctccccgccggttgtcgccgccgcgattcgccgccgtcaagcttcctccggcaaatccgagccgttggctcgtctcccctcatcacgagcaaccgcccggtgtgctcgcttttgtccgtatcgccgtggttcgctccgccactcggcgccgccacccgccgtccattcgcggccgggtcgtcgtctacctcccgccggcccgcgtggcagccacgtaggcgccacgtcggcgccagctcagcctagaccgggtcgagccgaccccggtctgtccctccccgtgcgcgcgttccaccgcgagccgtgaggctgcgcgtgggcccgccgcatccgcgtccaccgcgaaccgcgcgcgtgcaccgcgtccctcccccgcccgcgcgcatgagccgcgtactccctccgcacggtgagccgagccactgacaagcgggtcccacccgggaccgcgcatggtgagcccggtccaccggctctctctctcctccctcccgcgcgcgcgcgtcttgggccgctttgggccgccttcttgggccggccggcccgttaagctcggccgagccgccctttctctcgggccgcgccctagccgcccgaggaaagtctatattccctccctctccccttttcttttctttttcttttccaaaaaaaaagagatttaattaaatccttttcctttagaccaaaaatccaataatcttagaaattcaatatcttcccaaccgtaaatccgtttgactccgttcgaattccaaaatttctcaaatctcgagatctatctaatggcacgcttagaggtcattaatagggctttattttcgccgtttgttgagttatcccgttttgcgtatagtttcggagcccgaagacccgcagtgcgaggatttcgaggatcaagctccagatctcgagcaaggcaagccacctttgaacatcttgagcctatatttgaaatctaattatattgcttgcaaaatattatgcattgataggattgcacttaatctgttgttccgtctgcaaggcagattggcagacctacctaacttgttgcatttgatccttccattgttaattgctataccatttccccttgtaaccatccagttgcgcctcgatattcgtgcaccctgtgccagtatcgacggtcgccttcaaacttaaaatctgagtaacaacttgggtaaaactggagttttacaaaagacttggaaaacccgacacctgggtcggtgcttgcgaactaaatgaatttccaaaaccgcagaccgggaaacgtaccgggtgtacggtttcccgctctcgcacttaaggaccgattccttggaatttcatccaaacataagacaagtacgaccacatgggtggaatgggacacccctggctgagtaactagcttatcaggggagccttgatgccgagagacatgtggattcgccggggtggtgtcggggaggacccctgggcttcctggcacagtatggtctgggacctaacctgttgttggtctgggacccctctcgtcggcatatggtaaacctgtgtcggctttggaaatgccttgtcatgaaagcttggaggtctcccgacgtggctgatccccacgggctgggtgatcggggttagtaatgtcgtgtgggtaaagtgtaccccctctgcagaggttaacaaactgttcgaacagtcgtgcccacggtcatgggcggatgtgaggtgattcctagcgtagtttggtttgactactgcttgtgaaattgctgtgtgaaaaggggttcggtgtttgaaaaatctgcagctgatgggatcagctaggcccgggtggccgtttgaaaagttgttggcccgggtggccgttgaaaaagctgttggccgggtgccaatcttgtttaaattctaaagactgatacattgcacatactccgaccggacgagacgcactgtctcatccgtgtcgtttgagaagcactcacttagttgtttcagaaaagagttcaaataaaattaattgcaaaaacaccagcctttccttgaagcctgcattaaacacttatttcccatggcttgctgagtactcccgtactcacccttgctctatataaataattccccccccagttgctgaaaaagatgaagcggatcctgctgatgaggagttcttccaggagctagccggctacgatgagttttagggtttcggcctagttcccaagtcgcgcctgtgttgattagtccaagtcctggcttccgctttccttttgtaatgcagttgtgagctcgggatctgtccgcagcccaacatgactgtacatctactctataataaagagacctctgttgctgtgatattctgtctccctgtgataccagcactgtttcctgggactggtatcgattaacaggttaatttggagcgtcacgggctagttccggtcgggactagttcggggcgtgacaagagatggtatcagagcacaggcttggccctagggcgaaacccgacgcttaggacgaccctaaggatactaagttcaaaactacttgcgaaaagctaaggattcttttgttttctttattttcaatagtttgtttctaaaatggttactgatccttctccctctttcaaaattgtagatggcagtgaacgccagcttcagttcccacggttttggtgagggtcaccacgtcgctcagcttcgtgacctcgcccgtttccttggcttctcgtgtcccgagtacacggggtactctatggaccgtgttccccctcactgtgagctctctgtgtacctttacccccatggaggtatacacggagctggccttcgcccacaccacttcactgtggctaggcccaccctccagatcgcataccaggacctctcctggactgcgctttgtcgcctggcccacgactacagccaccgtctcggaggctccgccttccggcagcttccacgccttccttctggccactcagacgccaggtacccttgtccgtacagcgagtctcagccagtactgactcacatggttgagctttcggaggctcaggccactcagcacgacctactccttgaggcttaccgctcccttgcccgccgctacgccgctctggaggcccgtctggccgaggagggtgtcacctcagttgacactgtctcttgggactcaggtcgcctctgccacgccagccacctgtcctcccacagctcccgcggctctgcccgcactcccagtggcccgcgctcccccagctcgcgtgcgccgtactcaccagtgtactccccctacccgcacccagttagcccttcctacacccccggacacaccccagttgcttcctcccgccgtggcccacgctttatccgcactgcgcggaagcgtgttgttggttcttccaccgtgttccgtttccactacccagctcccctaccgccagcggcccgtgctgctgtcggccctcgacaggttccgccggtcccttcgcgtcagccgatcgacgtttcttcgactgaggagccgactactggaggcagcctggccgacgaggagtagaggaggcagtcttcagcagccgtccgtgtgttaggcccttttgttccgccgccaactcttttggagtcgtggcgaggtagtgcgtgcgtgagtttgttgtgggtgttgtttggtagtctggttctcctaggtggtgtgcgcacagtcaagctcggcgtagctctgtgacttgtccacacccgttgtatcaggtgtttttatgatttgaaaaatccagtttatgcctagtgtgtgctatctgagttgctatttactttgctccttgctctcctaagtgcttatctgactcttcccccgcccttttctgggagtttagatggctagccgcccccgccgtgcagctcgtgcaccagcccgctttggttttgaatatggtagaaccgagccggcagcaaatcatgagtcagctaatgagcagtctcaccacagcaaccgttcacaccgtactgcttcccgcaatgcagaagttgagcaaccccgccgcagcaaccgctcgcatcgcacagcttcccgtgatgcagagatggaacagtctcaccgctctcaccgcactgccagtcacaattctggagaagaacgccttccttccccacctcatgtggaaaacaacatgcagcacttaatggcagttcagacacaaatcttgcagggattaaccacagccatagccagttttcagcataatgcgcatggaaatggccaccctcacgtgggcaacaatagatccaagctgacagactttctgaggtctcgtccgccagagttctctcagaccgtcgagcccgtcgaggctgacgattggctaaaagatgttgatagaaaactcaacttagtgcagtgtactccggttgagaagacgctctacgcctctcaccagctaagaggacctgctgcagattggtgggagaattactgcaatgcacaccctgaacccactaacattgcttgggatgagtttgctacggctttccgtacagctcatgtgcctgaaagcgctattgatatgaagaaagaagaattcaacagacttaagcaaggcaacagcagtgtcaatgagtacctaagtatgttcaacaagttggctcggtacgcccctgaggaagtggacacagacaagaagaagatcaggaaattcttgaaaggaatcgcagttggaatgagactccaattgattgctcatgatttccccacttttcaacatatgatcaacaaggcacttctactcgaggatgctagaaaagaggctaccgaagaatacaagaaacgcaagtctaaccatcagggaaattcttcccgaggcgcacctcgccctcgctacggacaacccatgcaataccaccagtcggtcactcaggctaaccgccaaccaggctacgcccctcgtcctcagatgaaccgtccggcccctcagccacagcagcgtgcccctggttgcaatactgcgccaaacagtgttacctctttcaagtcaccgcagggaccgtcagcagttcagtgtttccggtgcaaccagatgggtcactatgctagacagtgccctcagaaccctaccaacaccaactcagggcatgcgaatggcagcactgccagaactcctaccccagcggcagctcagtctcgtcctagctctcaggcaagtggacaaggttcacgtgtttccaacaactttggtcgaggccgggtgaaccacattcaagctgaaaccgctcaggatgctccagacgttgtgatgggtatgttctctgtcaactccgtacccacaatagttctgtttgattcaggagcttcccattccttcatatcacaagcttttgtgaaaagaaatggttggaaaacccaaaatttacgtgtaccaatgat

SEQ ID NO: 7194 - DNA, 18326 bp, Oryza sativa
aacttcatctgttgatggcaccattcgtgtttggacctaaaagtgggaattgctgttgtgctggactcatatcctgacaacattgcttatgtggcattattctccaattcatctatttttgaagcagagaggattgaaaaggatagatgttcgcaagttcaaccctaactggaaccaaggagctgggtgttaagataagattgtgctacttggcagtagttctggacacggtcaaggcagcaatttgctagtgaggatgaactatatccaccaagctaagtcttctgcgcagcaagctccgacatgtgaaatacagtctgccgatgtaccatggccattacagctagttcaatcgtgagaactggaccagtcgaactgagtatccgtttggaactttacgatctggaacgagtgtacccatttgttactacggtcacctacgggtaatttttaacctgagattgatgatgatataatacggctcttttggtcataaataacttagttcttttcctctaaaaaaaatttaacttagttcttttcgtattgtcgatgacgtcttcaaaattgcttcccataatcttcaaccgacaagtcgtcttgcttgaaatactgaagagagccaagatttacctcaattggcaaaacggcaatttcaacaatgttttattactcgactcggcttatccattagcctgagcgtagtaaagagaagaattcaacaacttaatatcataagatttggcaaaacttctcacttctttggacataaaagaagctcctttagcgtttgaggaataccgaatctatgaacaatatactccaaaataaagtcaattacctccgcacaagtaatattctcgagcggcacggcttcggcccacttagtgaagtaatccattgctactagcacgaaccaatacccttttgataacgaaggataaatttgaccaatgaaatccaaagcccaatctcggaacggccatagtttaatgataggattcaacacagcggtacccgctaattgaacattgccgatccgttatcaagcttcattccctctatagcatttgaaacaatcatcaattattttcggccaatgaaaccccactctcctaagcaaccaatttatcttacgggccgattgatgaattccacaaatctcttcatgtactactctcctagcaactttagattgatcattatctaagtacttcaacaatacttcatctatttttcggcgatataatatttgaacgcttgccgtcgaatctcccgatcaaccttaagtgtaggatctttcaaatatctaatcaaaggaattctccaagctatttctacctcatgggcacaaacgtccgaattcacaattaattcggccttttaatcaatcgtaacgtgcccccagcctcctgtctgggatcggtcagaccagccacgcaatgccggtcagaccgccctgtctgcacggtcagaccggccatgcaaagccggtcagaccgccggtaccaccggtcagaccagccatgcaatgccagtcagaccgcccctggtctatggttttaccaatttcgtccaaagttttgaaatcaagcatcggccttcagtatataatttttcttcacataatagccagatgcttggtgtatcaaattattggaccaaaatttcttctctctagacatataaaaaactataacatccaactaacatatctagatgaatactaattcaaatggcttttgaaacaataatcatcatggcatcaaaacacttagccaattgaagtatgatcaataatgaatcaccaaagtcatatgcctcacacacatgaattccaataaactacaaatgtaaataatcggcttgagcatgtatgcaaaatattaacaatgccaatgtttctaaagaaaacaactgtagaataaatcatcacattgaccattgacattagccgaattactaataagcaaaactttcatggtgcaataaatatgaaatctatatcttatatagtgatccataaaaacacatacgatttggctttaaataaatatcaaagagtcacgagccaaatcatacttgaaacaaattatatgccaacctactaattctactacttagaactggcatttgcaacatgtatgtataatatcaatttgataagcaaaaacacacatgtgctagatagcaagcaatgttctaacatgacataggcatataatataacgatgaacaccataaacccataccttgccttagcatccaacgaacggcggctcgaagatgtgatgttgtatccattgccattcttcttctcttggttccctcatgagcatattaatgtcttgccccccaagcaaaatcggctttcttgattgcacgatttcgaaggcaagatgaataccgcactaacacccatagcatcatgtgaaggagacttatctttaatgaccgatgattcttctctcaccaaattgaatccatcactactctgtgaaagcaccgatcttttaacttttacttctttaggcctacacactcgcttaggtgtcattcgaggctctaaattattacatgttttgttctccacatcttcggcctctttttcttttttacctatggcccgaagacgttgtagcctcttcttttgagagcgagataagccagaaggtatccacttcggctgtggttgttttccaggagctaaataatgattcttaatatttttggtcgaaatagaagctcctgtgttgctctcgattttcccgctcacctttaatgccccttggtctgatcggcctctgggcccggtcaaaccggttgcaagccgtcggtcagaccggccaggagggtcggtcagactggctgtagacaggcggttagatcggccagctgtctcggttagaccgccaatgttgacagttatggcgtcagcttcgatgtcctttgcttgcatggtttccacggcatctccagtaggtacatgaacatcttgagactcctccttgacaacaacgacctccggagctttggcttcttttctcacccacaccttcttcacctttttcaccttttgtcgcgaccgagaaaattaccttttcccgaacgctactgtattaatccccgtcccaggaaaagccggggtacaccaaacaaacatgatacaaaaggcacatctttattatatcgattatatttacattattacaaaggcactttaggcctgacaatcaaaaataaacagcagcggactagcgggcctacggctccatcttcacaggcgctcaactgggatataagccaggactccacctaagacttcttctccaaagcttctcttactgaaggggggaaagattgagtaagaatgagtacaaccaccgtactcagcaagtcacaccgggagatgcatgattaatgcaagggagtacaaggggtaataatataggggttaagttttgcagtaaacagcatttaaaagtcacttagttgcccaaagctattttgtaaacacgatcctagagctatacaatattattaatcaaggccgtggacccacacgaacctgccttaacccaaggcctacgatgattcagaccgaactggcaacccgaccctgggtcccagctcgtcccaagccaacccaggccaaccattccacattttagttattaagcaggttttaagaatttaaaacactaagttgggtatattgctaggcttgcccataaccgagggcgcggctattcgaatagattatactctgatcagatgtgtacatctttacccacaagacacatcttcctcacgtgtaaccacgtgccacataccaccacggcatacggacgaaagacgtgacatagttcccaacccatcctagccatagacaagagtaccgacccaaccccacctacggccggaacctccgggacaggtaggcaggactgagcccctggcagcaggacaccagccctgtgccatgacatctcgactaccgggccgcagctcgtgtagccttcatttgtcctagagatgtccttcggcccccgacttcgtccatctccatccgtgtacttttgtttataaccagactgagccacaaactaagccttacctaatgtctagagttataaaaccacataatgttgcctaattaatcaacgaagcatctacctaaattcatattagtggaaccatgaatagagtacccattagttggggttttatttattctagggtgaacaaggtaataataacaatagcaataataatgtcataacaaaggtaaataggcatggctaaataaaacagtgataacgcgggaatttaaataaagcgataatgcattaatttaaatcaaaataattttataaactgggattcaatatgctcaaggatgatgtgacttgccttgctcagagagaacggccttccgaaccttcggcgacgaccgcgaaccacgcttcgggaacctccggaacgacagaagctacgcgaagcacacaagcaaagctacaagcctataaagaagcaataacaatacataaaaagaaagcacagggttctttaggttataacaaacattaggagacttgaacgggtcgattcgaggttcgtatgatcaagatatgatcatccgaagtttaatgctgttatatggagatttgcggattattataattaggttttgcaactataaaacatgtgtaagcgctagcctggaaaagacaggaaggctgcgccgttgacatgcggaccccacatgtcaacctaaaggaccgcggtagaccgagtacacagagacggtccacgggtcgacggaagcggaccccgtgtgtcaaccgaggcgagtggccgacaaacggactccactagacaccacacgggctgcacacgtggaaaccacgcggctaccgagcgggcacactaacacggacactacacggtcaccacccgcacacgtgaacgactaccgacaccggtacgcgggtaccggggtcgacaaccgcacaacgggcacgggcgacaccgaaaggacgaggacggggcagcgaaaggagagatccttaccaccacgcgacgaggcgtgggaacgacaacgacgaacgagcgcggcggagacggctcggggacgacggaggcgaacggcgagggaacgacttcggcggcgatccttggacgaagtcgagacgcggccggcacgaggcttgacgacgcggagccgaggacgaagacgacgacggggctgccgcggctcgcttgacggacacggacgacggacgagaacggctcgacggagggacgaacgccacgacaaccgggaacgacgagaggacgacgacgacgacgaccggggcgggcgaggaggcgacgagggcagccggtagcggctgcacggagacgaggacggcgtggagacgaggcttgggccgggcggccggcccaggaggagaggagggagaggtggcccggggagagagggaggaggagggagtgggccggggaaggagggagggcggcccaagggagagagggggaaggaaaaagagagggaggagggaaggactttgggctgggctcggcccaaaggaggaaggaggatttatttttagtttttctttttagtaaactttgataattgtttttgttgcttaataaatatttccggtgctctgaaaattcaagtaaaatttgagggctcattttagaccaaggagaatttaacaaaaattctccgggccacattcgaatttttcttgtatgtattttagtgtttgccaatttcttttcgaattttaattaattctattatttcttttagaaaataaattttatttcgggatgaatttatcaggacgtgacacctttgatccaccggaccgattcttttcgtgggaaacggtcttgtcttgagttaaaatgagttggtaccgtcctaggtgattgcttccatccttgatgacacggcataggtggttgaggcatccatggcatataatacataaaaggataaccatatagtgacattggatatggataccatggcatcacaaccggaggtttatatggagttggtatagttgatggctccgattgctttgatgtttgaccaaatctcttcctacgagatgatcttggtcttttcgaatcactagtttggttatcaaaacgttgaccggctaatcctttcttgtacttagccataagcatctcaaaagtgagtttcggctttttagtcttttgggaactagatgagtcatcttttgtaactttatgatcttcggccttcgcattttttgtcctattcttgggccgaggatccccaataataacacatttccctttctttttgccaacatcaatagaactaacagggagatgatcactaacgattccggtcttaggcatagatgtaaccgaaatagtttcacaagtgaccgatgaagtatcaatcggtctttgctccatcaagcttgcatctttgaaataaccatgaaactcatgctccatttgtgaccatgtagaaattgaattaggagcaagtaaactataccatgtagatgcaaagtttgacaacgaaagaggaaacaattttaacttaagcaaatcatcattactggccttaccacattgatcaataaattggccgatatgctccattgttgttctagcatcctcacatatgaatttcgtgaagttgggcacctcaaatccttgcggatatgagatcgaatctacgtgctcaggatacggcatttgatatgtatgcatagctacattggattttatttcactactatcccgcaagacattatcatcatcttttccaacatccacatgactgatttgtgattcggtcttaggtgataatgctatttcactttcacttgtgatgcaatccgaaccgtcatttagttcggctatatcttcaatgatgctattgtccaagctagcaacacaatccgaaccaccacttggttcggctattccatcattgtctaaactagtaacacaatccgaaccaacacttggttcggctataatggttattgcataatcatccaagctagtaagacaatccgaaccaacacttggttcggctataatcgttatggcatcattgcacaaattattaacacaatccgaatcatcgcttggttcggctatacatgatattgcactatcatctaaactagcatttaagctattgtcatccactcggctttcctgagccagagcttcatgcaacacatgatcaacatcaagaaatatttggccattcaatttctctttattagaatcaagcaatccatcatatgcaatgttggccaaatctttatcagttattttcaaactaaaacatcggattttaatatctctaaaccttttaatataatcagcaacagattcattgtatttatgcctaaccgatgttaaatcagacaacttaaactcagcttcattagtgtaaaaataatcatgaaatttttgttctaattgagcccaagtactaatagaatttgccagtaaagaagtaaaccatataaaagcagtaccggacaaagataaagaaaacaagcgcaatttaaaagtatcactattagcctcaccacattgcgctaaaaattgacctacaagctcccatgtggtcctactatcctcaccactaaatttggtaaattcgggaattctgtaaccacgaggatatagtacattatcataataatcaggatacggcctttggtaaaccttagcacgattcctagttttaatcccgaatttatccctaataatcccactaattatttcctccatattatcaggcctatgttgatttggtggtggatttggtggcctaataggttgtgtttgcggcgcaatatggttatattggccttgcctagtatcgggaggatacccctagcaacatcattataagcattagaaacatgtgggggaacttggggattagttgcagcagtagatacaggaggatcaaatgttctaagatgatacaaataactagcattggtcattggatctatcccctgaatcggtatgattgcgccggtctgaccggtccagagcctggtctgaccgacatccagaggcgcggtcggaccggcctgagtcccgatctgactgccggggtaatacccggtcagaccggccgtttggccggttggaccgacggcgaagtcgcggtctgaccggccatcaggcctggtcggaccgtctatatgcgccgctccatcggttccactgcttgtttgatctataggagcttggctagcagtggtagaggctttatctttacaaataaaatcggccaagagagggccaactttaaatcttaaaatctcatcaaatttacctccaaaagttgcatctaatctatctttaaaaacaatcatggatgaatctattgtagatgctacttgttgttggatagattgtgttacctctccattgcgtaccaaatcgggagcgagcttaggaagtggcccgggcttaatgatcacaccttgacgagtcctagtgcacgcccttatcaacgcctcctgtgtgatctccttgatatactcctacatggacttgcggtcttctccttcgaaatcatccaatgagatcggcatgatctcgttcccgctcatcatggttgatgaagaaattccttgattaattccagccatatagctcatagccgaaatatttgaccgaataaattaatatccggtcttgatttttcctttgaatataacaagcgtgtgtgcaagtaaaacagaattgcttctgtctcctcgtgtgtaagcaaaaattcagaaaatcgatctcacaataacagccgaaacaatatgaatcggctttgatttttttttaattctcctcagtagatgtgctaatgtatgtactaacagattgatgttgcttctgctgcttgtgacccggtagatcggctctaggagcctgatctttttctctgttgccgtgtgaaacaaaaaggaaacgttgccaagccgtctgctgcttcctgataatgattttcgatacacacgacatggcaagtgcttatatgaatttgatgaacgaccaaatagcttcgccgccgaatagattaatccagcgataagaacagtgcagcgactaattaaggtatagattaatttcggccgtttggccgaaacaaactattcgacgagacgactagattaaacgaaattcggccgtgatatggccgattagatcgttccccagcggagtcgctaaaaatcgtgttgccaacttttttgacaagtcgacaagcatgatcgcaacacctaaacgccttgcggtggtatggagtcgctaaccacctcaatctagctaaacggccaaatcaagatgggttttgaggaaaaacagctaaaccggctagtggagccgatttagagatcaaaatcagcctctaggccgatttagatcgatatgaggataactacccgtctcgtgggcaaaatggaaggttttcaggacaaacctacaaagaggtgtcgcactctcgcagcggcggcagacggtttacggcgcaaaccgataaagatggactaaactagggtaaaatagaaaaacatagtaaaagaacgattcaagtaaattgtattaggggttttacaataaaccggccttttcccttaaatgagggttggtcttgccctttacaagcccttctccacatccaactcgggatagaaaccaatagaaacacgaaacatgccttcccaagcaaggaaacccgagacccgacgaaaacagactcggactcggaccctgacagtctgaccgcccacatacctgcggtcagaccggccctactagccggtcagaccgcccatatacctgcggtctgaccggccctgcgaaggaaacccggtactttccaaactttgacaattttcccctatttcgtccataggtgtcaaatttgggtgtaaacaatgcctattaaaactagatggagggagtactatattagaagtcaagcaactctaattgagctactactccattattgtgagcttaattaagcgtggttatctataccacatgagtgacaggaaagctctgatagtcgtggtgcctgtgcacacgcacgccggcgtgcgtgatcattgcccagatgtgggtgatgaactcgccgccgttggccagcgccagcgcgtgcccctccggacccgccgacggcctctgcgcgacgacgacgagcaacgccgcccagaactcgagaagcatcgtccacacctcctcgaagccctcggtcgactcggaggcgcggtcctcgagcagcttcccgagcttgacccccctggccatggcggacggcgcctccgcctcccagtcgtcgccgaaccgcaccagcttctcccgccggcccgcggtggcgcagctgcagctacggaagaagctgccgaggcccgacttcacgtcgttgtacgccttctccgtccactccgggtcgtcgggaagcagcccgggctcgtaggataccaggtaggcgcagtacctcgacagcgtcaccgccgcctcgcccttgcgcggcagcggctcgccgtcgcagcgggcctcgagcagcgccgtggcgaggtgccacgccaggatcaccgtggcggcgcccttgctgctgtcgcacgcccactcgggcccgtggtggaagaacccgtgcctgcgcaggacggccacgcagctggtgaactggaggtcgccgccgtcgccgccgtcgctctcgaggaaggccttgagggccgcgacgatggccaccttggcctcggcggtgacgacggcggggcggaggccggcgaggcggcgcgagaggatgcgcgacgcgagcatccacacgcggcgcgggtgcagctggtggagcttgagcatggtgacctggtgcgccttgatgacggggcgcgaccggtgcctcacccagaggccgctccggatggcgcgctgggcgtggcgctgctgcgccgcctgcctgcgctggtggtcgcggttgatccgcatccgggcgtagttgcagagcatggaggcggcgaaccagtcggagagcaggtacagcgcgagctcgtaggtctcgacggagaagagggtgagcgtgaggaggaaggtgacgatgaggtcggaggaggagcacaccatgccgacgagcgccgacacctggtggcggaagcacctgaactgcaccaccgtgtcgatggagatgccgatgaatccccggaacagggagcccagcaccctgaacatgttgccgttgccggtgacgagcagcacggcgatgcagtagaggaggatgaagacgacggagaaggcgaagttggcgatgaagatccccggcttcggcagcgccagcgggatgatcgcctggtagtactccaccaagaacctcagctccatctccaccacgtcgaacgccctctcggcgtcggcggcctcgccgccccggtcgccgccgccgagggcgaggaggcccctgaggacgaacgcccgcgcctccggtgtgcctctctccgccatgtggcaccgctctatcctccgccggagcagcttgtagagcgctatgcccaggcagatgtcctccagcttctgcctcctccgcacgttgtacttgaacagcgggtcgctctcggcgagcttccagatggtgctcactcggaccagctgctcctccgtcttgccattgccatcgccatcgccgctcgtcccgccggcggcgaggatgtcctcgaggccgtcgatctcgaagccgtgcggcgtccggttgatcttgagctcgctctcacccatcaccgtgtagttgcatgctctcatggtgcggttgccgcggacgtcgcctccgtcgtcgacaacctgcaggtccagctggcggtgctccccgacgagctgcgccatgtagccggagacgagcgtggcgttcttggcgaggtcgaaggagcccttggcgaggtggatgcaggcggcgcgcttgcagagcttggcgacgctgaagatccagaggatgacgaacagggacttgacggcgaagccgtgtacgtaggagtagacgaggtagccgatccagatcatgcgggcggcgtcctcgacggcgtcgaagaggctgtacctgccgacgccgcgggagaaggcgtcgccggcgggggcgaccatggcgaagaccttcttgcggaggagctcgacgaggagcatccagaggaggatgaggtaggcgcggaaggggaggtccctgcccttggcctgggagaacatgaaggacatgaaggggaggaagagcgcgaaggaggccctgaagaagatgcgcgtcgccgacgagtggcccctgtgcctgccggagaagcggccgaggacgccgacggcgaacagcgccgcgccgaggaaggtcatgagcaccgtcgtcgtcaccatgaacttctccgtcgtgcgcaggtcgggcgacaccgcgaacgtcgccaccagcatcggccccggcgtcgtgcacaccgtcttgttgttgatgacgatgtcccgcatcactacccacctcccctcgccgccgccgccgcctctcgagtagtgctccatctctcttgcagtagtgtcttgccaatgcatgcagagcgcagtatttgtaggcggctcgatcgtatcgtatgcatgcgtaccggagagcttgtcaggacagggtggtgaagaaattaggcggtgtttaagatcaggggttgaaagtttttcatgtcacatcggatatacggacacacattttaaatgtattaaatatagactaataataaaataaattatatattttgcatgtaaattctgagatgaatttattaagcttaattaatccagtcattattagcaaatgtttagtaccacattatcaaatcatgtagcaactggacttaaaagatttgtttcgtaatttacacgcaatatgtataattaattttttttatatttaatactataatcatatccaaacattcgatgtgacggggtgaaaagtttttgcatggaaagaccttaaaatactttgctcgcaagagaaacaatgctgtgcgcgctgaggggtgggagcatatatgcgatcgatcgacaggggtgaaatctagtgaaaagctgtgtcgggtcgagaggctgctgaacattaacgtacctagctagccggcacacgcaacgtgccaagaatcgaatcggtccttcttcttcctgcgatcactgcgtgcagccagccatgcattcaggagtgtgtgcgtcaatggcacgtgttctaagcgagcgggcagggtatatgaataatctttcaactagctagctgtttcacactttcactaatcactcggtggagagaaaaactcttgtccttaatgacagcaaaatatggattacatagtatagaatgggttgtgaactagcagaaggtgagagcacactagtacacacaagatttttccaaacggtcaaaatgcatttttccgtgcagaggtccggtccatctgcacccatgtgtcaacgaaaatccatattttcgcgtgcgggtggccaaccgcacgggataattcatcttcccatgcggtccgattaaggggaccgcacaccgcatgggataatcaattatcctgtgcggtcaaattataccgtcctcacacaaaaaaaatgaaaaaaaatcgaaaaccctaaccctaaccctagaatcgcccgacgccgctgctcgtggtcgccaatgtcctcgtgttgtcgccttggtcgcgccgccaccgccgcttctgagcccgccgctcccggccaccaccgccgctcccgagcccgcctatctcgacagccgctgctcctgagcccgcctccgtcgcaactggccgccatcaccactcccgggctcctcctcctcctcgttgtcggcgcgacgtggatccggccagtcgcccgccgcgccgcctccgccagtatccgctcgctcccggccatcgcctcgtcggtggcagcggtggcgagccgggcgcctgccgcgtcctgtgcgctcggtgggaaggggaggagctagaggagaggagaggaaagggagagagagggaggagtgattgagggagaataaaagggaaaagaaagagagaagatgaaaattttgaagtgagtgagagggaaaagaggaagaggtatttttgtgtgcggtccacttaagaggcccgcacgtgaggcttatttttgtgcgcggaccgttaagagtcccgcatgcgaaaatcaatttttgcgtacgggcctcttaaaggtccgcacgcgaaaataggaggccaatttttgcagacgcacacgaaaacggttcgtctgggaaaatgggagctccttgtttaggaaaatcttttgtgtaccaatagcaccgagtagcacactatgcaccaacccctgacaaatatgagtaaattgaaggcaaatgggtacaaatacaatttatgtcatgtgaggagtgaaatggcacatatcaacaattataaggcctataaatctgcgatgataaatagcagtatactacagcgtgggagagcttgagataaccaatcagaccccatgaaaggagctgtatatagctgacattgttatacaacctcgagttgtctcagtctcagatagcagaacatacgatttctctaggtgatgtagggaaacatatatatacgatgtcttcggtttgcctattccccgatcagatgagtataaatagtcggtgggtttgggaaacaccaggagttcatgccccacaattggtcttgagttgacagtagtcaactcacacctcaacgcatctacagcacaacattcttaagtttgagttgcatttaacccctaactagaatttgcacatcccatacataccgacgttcgtggttcgatcgctgcaattttagaaaaggtccacgggcaaaaaaaaaacacatttttcatttgttgtcgttctgctaatcatatagaatctctagctaagaccgaagttggaacttattttattttctggaaaatcattggctgggttctttttaattgatggggatttggactgtgggattgagagtactcgggaaatagttagtgtcggggttgcttgttcattgattcagagtatatctttctacatacaagacaagctaaatcagtacattttgtctttgccttgcaaaccaacgagagcctaagcacttgacaagtgatctctacagcatgctggatatccagggttggaaattcaggaacgaaatttttgaaatttcggtcattttggacccctccggtacgatattatttcggtcggaattttttaatttttttcgtgaattttagtaatatttgttaaaattcaactaaattttgttcaaaattttggaaatttttggaccgatccaggatatccaaggcttcttagcagtccgtgctgccatcctcatcagctgaaagctccgcagggtatcaaaacaggtcattttaattgtacgaaggcgacttattttgagtatcactgtaatcaacagtttgcagcacagcagcagcctttgtcaaattatttgagtgtatacgaaggtttcttttcatcgagaatgtatcaagtttttctggtgtaattgttggtgcctctccatagtccgtaccttcttaatgtcagggtaccaggaataattccaaagttactaaaataagcacggaaaagcattgtagttttttatcccttcaaaaaccctcaagctgatttacgtgtttggatgaaaatatttgttaatgtccaaagcatagtgaaagttaaaacagtttgactttgaccagttaaaatagtttgactttgaccaaaatcaaaacgtcttataatctgaaacgggggagtatgatatatgcgtcgtcagtaactgaaaattgatctaattatgttggttccaaaccgaaattagtggcctttaatcaaaccatcaatgtgatgaaatgccactgataattagagcaagctattactagtgaatgctgacacaaccaggctaacatggctttaagaaggacacagcagaagaaaaacatggaacgaaagaaatcagagcacgaaccaaagagagtctgtgagataagagcaggtacaatagcaggctataagtcagctgcaaacatattttaaggagataaataaaaagagagaagggcagcgggctacagatttgtagccagctgcagcacggactccaagacactatgtgtgtatgacaggtgggaccaggtattaataatgtagtatgtaactattgtatgaatgagctattagattggctatagatgaattggagctagtagttggctatacttttaaacttgctctaagcagaaggaagatcagagagtagtcacattcacaggcgaaagagagcaaggcagagcaccaaattaaacacgcaagcacagcctaactttctagatcatgggcatggaagacaccgggaatgagaacccctctactcggaatctacacagggcatacttgctgttctctaccatccatcagccctagcatggtcgacgcacagtatacagatggagggagcaaccgaacacaagaggtacatcgatgcactgccggtgttatattaggtcttgggatgctgccgtgcacgtccgggaattagacagctagcgcacgggattccgttggatatagatgtcacgggatagattaaatgagccagagattaatgtctctcttcacaaggtgctgatttcccactccgtccaagatcttcctcctcggtatcgcgatacctcgtcggcgccggcaagatcgagctctgtatcgcgcgcggagcgcgcgacctcaccggcgacgagtccttgcggcagcatctggcccgaagcagcttgctctccccacccctagctccccccgcaggaaggtacttgatacctcgccggcggtgactcgctgcaactaaccgaagcagttgtgctctccgacgccgtccacaaagtttctcttcacgctctgcagaccgcagctctgctctccgcaccagcatgaggttacctagcaaggtatcatagcatggtttggccatctgttggatttgggctgtgcaaaagcacagttacgtgtcaccggtacgtatgtgatagctataaatggttctggatttgttggaaatagctatagctactactacaacttgttagctgaataatacaacattatcgatacttaagagttatttcatggtactccatgatgatacgtatgtatatgtacaagttgagctactgttaattgggttggattataaaatcttaatacttgactggtacccatcagattcatatgcatgggttacttgactccctcgtcggtcgggtgtgcgccggggagtcgtcgccccagggagggcagaagcgggagctcccctcatcctcgccctcggcctcggcgtcaccgtcgtccccgctgcggcctgccactttgcgcctccgggatggacgccggcagcctgtgtcaacctgcagcaggtatagccgtcaacctcctcctcggctcctcctcgagacttctcgcgctctctggctcgggcctcgaccctcacctcgccgtgcctcctcgacgccatcctccaccgttgcagccctccctcccccacatctcctcctctttttgacagtaccctccgatactccacaagtatcaggcttgataccttggtaccaaggtttgatacctaggtaccacctggtaccttaggtaccaggcatcaggtatcggtcgatacctaatcggtaccaaaggtaccaggtactaggtaccaatcggtacctaaggtaccaggtactaggggagcacacgtccctcacctcgccgtgcctcctcgacgccatcctccgccgttgcagcgctccctccctcacgtttccctctcttttttacggtaccctctgataccccacaagtatcatgcttgataccttgtaccaaggtctgatatctaggtaccacccagtatcttgggtactaggcatcaggcatcgatcgatacctagtcggtaccaaaggtaccaggtaccaggtaccaaccgtgtagcgcccgttccgtcgtggcgcctagcgggaaaattatctcttaaaaaccctaattgcgaaatttatttctttgcttgttgtctagtgtccgtgccatctcaagatctcaatccccgatctatcgtcgagtccaatttcgaatccaatccttccaaatcaaattcctccgcaaaagtctattttgcctcccccgggggtcgatgggccgatttcctcccggcccatcgacccctggggg

SEQ ID NO: 7195 - DNA, 47495 bp, Oryza sativa
gccgccccgatgccgccacaccgccgttaacgaacgagaacgagaacgatcgaacgaacgagagcgagaacgaacacgtcaacgtacgttgccgcgagaacgtgaacgagaacgagaactatcgaacgaacaagagcgagaacgagaacgatcgaacgaagacaagcgagaacgagggaacgaacgtgaatgagaacaagcgaacgaacgtgaatgagaacgagcgaacgaacgtgaacgagcaaacgaacgaggacgaacgttaacgtgaaatgcaatatatatatatatatatatatatatatatatatatatatatatatgttacttcgcatttatcctaatacatctttttgtatcttgcagaaaagacgtgttgtcggagtcgtccgtcaagcctgagtggaagagctagccctagaaggaattggagcaggcaagtgacgtaataatataaatgattgttatatttgtaatgcaattaattaagattattcgacctgtaattagacttatcatataagattgtgtagtgttcttatattatttgagttttaatataagattattttattgcaaattagacttagtatgacattattgactacggaattggtgcgactcctagcaattgactattgtagtcttaattagacttagcatatacgcacgaaacacttagcatacatgactattttagacttagcatgtaatattatttgagttttaatataagattactttatttgtaattagacttagtatgtaattattgactacggaattggtgcgacaagtagcaattgactattgtagtcttaattagacttagcatatacgcacgaaacacttagcatatacatgactattttagtcttagcatgtaatattatttgagttttaatataagattattttatttgtaattagacttagtatataattatttactagctagggttgtataatatacgtcacctagacttagcttatatcacgatttgtaattagacttagcacgtaaggttgtgtagggttctaatgtacgacatttacacttagcatacatgacttagattgttaaaacataaatgtctcgtgacttagcagatgtttcttgtatcaacagatggctgaccgcgatgaggaacagatattgtacgatacaatcgcggagggaagcagccagtactggaatgaagaagaggggaacaaggatccaaaccagtacttgaacgaggaagggaacgtggagagggatgcggaggggaaccagcaggggcacgtggaaagggatgtggaggggaaccaggaggaggaggctagtggtagtcaaccctccgttggacagaagagggcacgcgggcaacgaggtgcagcgaagaagcttgagggtcggcacatcataacggaagtggaagaagatggacgtcctagtgccccggccgaagccgccaagaactatgtacgtcacagcggttgggttgtgcgggataacgtgcctgtcagtgcggtgtactggcgaagaacaagggcacgcggagatcatgagagctttgtcccagattcggagaaagagatgctgtggaccacaatgctcgagacattcacccttcctgcgggtacagaggacaaagtgaaaaggtggactctgaagaaaatggcagaacagtttcagagcttcaagggagatctgtaccagaagtatatactgaaggggcagacaccgaacttcgacacattcccaaagctaagggatcactgggacgagttcgttgcatataagacaggtgaacaagggcaggcgatgatggaaagaaacaaagaaaatgccgccaagaagaagtaccatcaccacttggggtcaggaggctatagcgtcgcgatgccgaagtgggagcagatggaggctagcttgattgagaggggtatcgaaccggcaacagccaattggccggaacgatcgaagttctggtactatgctcacggtggaacgctcaacccagctgatggctcactggtcttcggcgatcagatacgagaggctgcgcgacgactaacagatgcagtggaagcctcctctcagggcacgttccgaccagacagagatagggacgagctgacactcgccctgcagactccagagcatccaggacgaacacgagggaaaggggtgattccttggaagattggtttcaaggaggacatccacacgtacaggagtcggatgaggagcaagagagataccgaggcgaagattgcagacctagagttccgggtatcgagctacgaactcaacatgcaagaggaggtggcaaggaaggttgatgaacgcatggccgcacatcggtcccatgatccccagccaaccattcctcctgcaatggtgagcccgtcaggaaaccgtagcagctgcgcctcaacggggcaggtaggatcacagagcatggacgccatgcaaacacaggacgaatcgacctgtcccgttgatgacatcactcagcggacaccatgtgagctgcatattcctttcaagaacttatcaataaaggtaagatttagccattccgctagttgctgcttatatatgttgattactaataaataatctctcacaacatgaaggtggcgtcgggcatggccattccaacggacccttcaggtacttaccactgcaggccgattccagcaggatactcgaaggtcgaagttgagttggtcgaaggcgcgtacgaggaacttgagctggattaccctggaggagacggtgagacgcatctacgagacacatgccatgccattattctatggcgcaggcggtacatcatcctccctgggcgacaagcggcgtctcatgcaccatctcctccggctccgccatctcctccttaggatcctgcaccgtctcctcctcatgctccgccagcaccgtctccacctcaggctccagcatcgactcctcctcaggatcctgcaccgactcctcctcgtgctcctacacctactcccccgcaagcttctcttccgacaccttcaaagtcaagggcccccccagctccaccgcctacccacacaagggcaacgaagaaggcgaaagttgacgccgccaagaacaaggacccggggtacgattgcacgcaagaggagcttgacgcttacgttgcatcagaagtcaagagacaattcaagcctcgaagtccagaaaagaagattcctatagaccccagtgtcaggaacttcttcagggatatgtctgcatctgtcaaggaggccatcaagctatcggactatgagcgaacgctgaagaaagcatcttctggaaagtccaaaccagtccctcagcttggagagcaaccaaaccaggagatcgagccgttggtgaccggtaaagaaatgacgatagaacaatttattactgacaccggtctaactacggatcaattgctaggagtcgcaccaatcgaaaaggcggaagtaaaatacatgtacgaactcggtaaaccgcttgtcaagcctgagctgctgcagtccctacccacacaaatgtacaagttccatcagctgtacatggagatgagcgccaccggtagagagatgatcggagcgaggatcagggacacggacttcttgcaaggagatgacattctctggatcaatttcaggggaatctacgaactataccagctggacgccctcgacgtctctattatgagttgctggattttgtaagtatatcgttcagttagatttcttactatacgtctcctttaattaattaggtccttgtatataagtagactatagaaaataatatactcccttttatcgttgtagaatggagattcaaagggcccgacggcggagggttttcgatactggattcatcgaccctcggaaagtaaacgtcgcaatgctcgaccaatatccacaagaaacagaggacaatctcgtccatctcctgaaggcgcagcattacaagacgttcatactgttgccatacaacacagagttagtttaattttactgtcttcctacataccaaatttcattcccgtacgaacttgctaagtgtttcatatgtaatgcatcccacgcacattgcagattccactgggtgcttttactcttcgacctggaggcctgcaccgtcaacgtatatgactcaatggataaaaaagagtctacgtttgacaaggttttcgaacttatagacaggtaccgtcataagttcctttgttaattaagaaaatcttgttatgttaattgctactacgaatcatagctttaaactccatgtagggcttggtatcggttccgtcatttggtccgcggcaaatggagagaaagacttaggcggaagttcaaatttcctgtgagtacacatgctctacatttatatttctccgattcaaatacatacaagtgtatattaattagatctctcgttgtttgtcatttatttgtagtgcgcaaagcaaaagcagggaactaacttgtgcggctattacgtgtgcgagtattgccactgccttgcagaccaaatcatcaccacaagagagctcgatgtacatacaaataaattcaaaatttcattacgtagcgatttcttgtttaattactaatcaatttcatacattcatatagtttattcgcatgagggataacctgaccacacacaaggaatttatcgcggcggttcaagaacaactcatgggattcatcaacgaagaaatccttgatcccaagggtgaattctactacgacggaaacacaattcaccggtccttagcttctgagctagcagcgagtactactacgtcgaaatcgtagctagctaggacatataatggattgtaattaatacatgactacatatgtttctatatgcatgtgtacacattttctataatgtaaatatattttggtcatatatatatctatatacatatgcatttgcataacatatatatgtataaatacatatatattatgcatgtatatacatataatataatataatatatatatatatatacatatatatatgtatgcatatatatgtattgaaacatatatatgcatggtttatatatatatatataaaccatgcagcaacagggccatgcaaaaaaaaaggtcagatctatctttagtcccggttatttcatccgggactaaagatagcgatctttagtcccggattggtactcccagtttggaaaccgggactaaaggggggttacgaaccgggactacaaagggtttctccaccagtgatacctcctcactaccacttggtaagttggtacatgggtttatcaagacgatgtgaatgcacttggaagagagatttatgtatatacaaactgtcttggttcatatttatatgttttatgaaactagaaaaattgtatatacaatataataaagctagcccatctctttcagttgtttcattccgttattgtgctattttgttttttgacttaatattgtgccattttgttatgcgacttcctgccttatcgggttctaagtgaaaaactaaatgaagtcaaatttctctcataccttaatgcaactttatcgctctctattgttcgcatttattttactttggaaaaaatctgtacatcttataaaacataatccaaagagcaattgtacaatctttagtatcttttggtacctaggtactatgagatatcaaattttgagatttactccggtccagcaaaaagtatcttgaggtaccggtacctcaaggtatcaaatagttttcgatcgttggatctagctgggcaggatgagcattgttagatccaatgatagcaaatgatttggtaccgtgagataccggtacctcgagatactttttgttggaccgaagcaaatctcccaaattttacactaatttttttggacaattgcaaatttaccactactttaaatcgttattgtaaaactgccactagaaaattgcaaaaatgccgctagaactgtcattcgaatggcatccttgcaatattgaaaaaacaggtggcaaatttgcaaatgcccctttttttacctcatggtacctcctcaagaatcgtaagattgctcttttattataaatttggtacctcttgctacctagataccaaattttacattaaatttttagtacctcatctaggaccatacaattgctctaaccaaaacatcgaggtacctaaattttacactaaaaattttgataccctcgagataccaaattttatataaaaaatgtaatacctcttctaatactttctcaagaatggtaaagattaccttttaaacataggccatgacgagatatatactggccattattgtagaagtccagacatgcatgcaactccatgctattggactaacatgaaaggtgaatggagggtacgacaacctctgccttcaccaggcaaaagcagagggtatccttctagttctagactagatacagcacacgctgtggagccataccatgaatgtaccaatgcgcgcacaacctggatccaaaataattttctactactccctccattccaaaatataaacacttttagacttcgatacagtcttcgagatgctactttgatgatatctataaaagtaaaatgctttaaataaaagagttgcatattgtgatagtttgtttaatgataaatctagtaacatcaattttacatgtttgatcttttctattttttttgctattattagtcaaagctacaaatatttaacttcattgacactatgctaaaagtgtttatattttaggacgaagggagtaactcgtaggtgatttcaactgtatcaggattcgtagacacattaccacatcagaacacagtccaaattatttgctctctgcaaagctttaggctttacctgccatagatagtcaagctcgatcatttagtgatttttatcatagttgagaaagtatcgagagataccatattttctatcgtatataaaacttggtaactttaggaactactcttaggggcatgtactattattgtggttgggaatttgagatccttggctgagaattggagctacgtagtagcagtgctcaactacatctacattatattgctctgtgtactttcatgagtttcatgttgaagcaatgagcaaatgcatgtgttctctcgtcagcactcagctaagctaggtggggcatcttctagatttgtaacgactcccttcctcatcgcttggccggcaatgtgttgaccagggcaatgtagtgattgcatccgttttgagcaaatgtctggtcctacagcttgcgaagcacatgatctcgtgagaacgctagaacgcttaaaccatcagacttcccgacacctgctactcctgaacgtggtgaggtggtcaaataggtggcctaaaccataaggtctcgtatatcaaaaatgctagtggtcggacgtccgatgcagcaaagaaaaatcggacgtgatatgcacacggcttacatgcatgtctagctgttgtcttatcttttctctcaggttactacatggctgttcattctctctctctcttacttttttccttagtacatcactctaacatataagtatatgcatgtatgtaaaaaaaaaagctatgcatgtattagttacttcaaactatttttctccaaaaataattattaaatttacattccgattacactattatatccgttgcaattaaatctttacaacaaaattttagttaattatattttgataaaaaaaaataagtagaataaaacactgttaaatcctaattgaaacatttttattccatataagaaacattgagttataagtgttgcaacactacacctatttattgaaacactcaaacaacaccagtgcaatatttacattgaactagtgaaacattagaaaatacttattgaaacatataaataatatcatgtgcaatatttataaatatctactgcaacatagtcaaattctaattgaaacatttatttctcacacgtgaaacatccaagttcaacggttaaaacatttgcattttttttcatcagaatataatgatgtgatatattgttataaagatttaattccaatgaatacaatggtgcaatcggattgtaaatcagataaatggttttcgagaaaaaatgttttgaagcttgccactaccattatacctctctcatttgatactatgcatgtgcggtcaactttttgttgctgttgctcttctctatatgtataggtaatagttttttaatcagatggacataaaaaggatgaatgtgtatccaacagtagaagaggcgtccaatgaaaacaattgtattggacgttcgatccgtagtctctcctccatatatatacacacacgtgttggaatcccacgagcagctacctgctagcagagcatgcaccatttggcgtgatgtatatatctccttgcctgattggcctcctcgcatatatggaagcagatcctcctacgtgaagtttcccctgacatggttactgacaggtgggtccacgagtggtggggccacatggcagtcaccatgttcatctgactgcagcacaatgatctcgccgatttgatccggctgcaattagtcatcagagctaacagtcaaaactctgcgttcaattttcttcgggaaaaaataactcagcctttaattttggaagagtacagatgaaagtactgcttaccaaccggggctgactctttttaacaaggcattaccccgttttagttagatgtatgtcaatttaaaattgtgcagattaaggatttgctaaaatggtatatataactggcttgcaattgttacccgttgaaaatgattgctaaatgagacatgagtatattgaaaaaaaggtatcaagtatttgagtatactgtagaacttacatttagacggggaaaaaaagagaagtatgaaacaactgctatcccacaaatcgcctctggacttcggactgattacaagtaggaggatgaccaaataaatatttctgccaattatactgtgcatgagaaactttgacacaacaaatttgcaaggtttactattttcgaatacataattataccagggttcactgaaattatgagattttcaacaaaaaaaaaaggaacctttgaacaatatttttcaaaatttggacaaattttgctaaatctaaaccaacttccgttaaataaaaagaaaagttttaggtggtagaacatcctaccgggaccccctgaagtttcttatatttcgtcccgaaattgttagccctgtaaatttggacagtcgtcagatcgtgaccgcgaggtgcggcaacagcagatggatgaatggcagtgacgttggtggagcacacaaacaaaatcttcaaggtcggcaacatcatcatgcgcaaattaagatccttgtttaaactagtaatttgggaaatttgaaatgaaagaaacagcctggtcgtcagagatgtggaggaggcggcacaacgcatctcatcggcaaacatactcgacgatcagctgataatctagagcatggcaggcgattgttgtgccggggagataggcggttctttgcttggtctaagcaggggcatgtccatctcccatgtgttgaggagttgaggctaaggcattctttgttctgttttattttttctctttctatttaaacaatctacagttacatgtaatctgacagagtaactagctacaaactaccattttttatgtcaagaaaagctatgcacgttgcatttttttcgtgttttataatttctttaatcagaaaagttattatcgttcatccgatgaacacacttcctctctacaagggaaaaaaaaagataaacacaaatgtaatactactgcctacacttagactgcgttcgttcgggtaacattgagggagataacagctcgttttccacgcgcacgctttccaaactactaaacggtgtgttttttgtaaaaatttcctatagaaaagttgctttaaaaaatcatattaatccatttttaaaatttaaaataattaatactcaattaatcatgagctaatggctcacctcgttttacgtatcttcccaatctcctcgatcaccttctccttaaattcacccttattgtggcaaatagtttggccaaatgtagccacgactcatgtgtcaatatacgtacatggaaatttaagagacaacttttatttcaacatctccccctaaaaaaaagaatatgtgcgatccaaatacttggcatgacatgacattatgcaggcaatctatataggctataccagtaatattaagactgtgtgtttatttcacagaagagggaaactcggggagacaactttagaggataacacaacatggtggacgaaacagcgggcaattgatgcacgcccatctctgttggctttccagccaaaaagatctcgtatggcgcctgctttctgctctgtgtactgcatagcacccatgatagcgtactggatgaacacatccaggagtaatctgggagataggccacagctggatttccggtgccttccactcctatgtagtcaaattgtatatggaacaggtacatcctccattcaaaatgaatccatttctaagaatatatttggataatcgtttgtccgaatttcctatcagatgttggggtttttctatgattggaaggaggatatatatgagtatgttggttagtccttgttgctgcagactgtttactctttagctagctagctgctttggaacatttttctttttctgacgtttttatatagggttgcagcgtaaacatgttacacacaactgtctcgttagatttgcttgtcaactgaacacaaatgagattagcatatattcagcagttatctcccttgactaatttatattgacaaacatcaaaggggaaaaaataaatccttctacgtacattattatcttcacattatttcagtaagctgactttctccataagatacagctaattaacggtaggctaatacgcgcgcagcgcttgaaatagtagttcgagcgccacacctgatctcctattttcctcttttttttttcttcctcacccctttcgatttttccatgccacccacttctctatttttccgttcctactaacttcacgtctcatccctttcacttttcccttctttttccgttaccatccatctcattatctcaaggaataaattccattaccacccaccttttcatctcatatttcatatttagtaaatgagttactatgtattatgagcttcaaatccgtacactcagctatcttacaaataaacaaaaatggattaaacaaaatactggcttcaatagatagatcagtcttattaagcggagtaaataaaaattgctagcctaattttacgcatggcaagagatcagtcttataaacatatatagtaaataaattactaacactaaccgagagagacggatcttataaaagattggagagtaaataaattactaaaagaattatccatcgactccatcggtaaaagaattactcacccattggttgccagaccatagtagtaataatgtttgcagttgaaactttactcccatccagtaataataccgtagtaatacttttgctactggagtttcatatccggaatgacgatcaacatatttttaccacgtattgatacactaaatatcgatctatacatgtaaaagaattaccacgaataaaatatttacaacacgctcatttgacaaaaaaaaaagaagaaaaatgccagccgacgggtgaggatgtgaggacaacgaccacgatggctgcgaagtggcgatgattggacctcccgctatcccagcaagattgccacgaggattcagaaccaggaggtggtgacgaggagcgacgaagccggtgcacatctggagggagcacgaggagatcagagcacgtggactcgcagatacgtcgtcgatgacctcgactcgacctcccctttggtcgccctcatggtagaactgtccgcacggtccgccacctgctgcacgccgggatctgctctccctgtcgctggcgagaccgcgtcgtcgcgcgctctcgatgcagagctggagctcgtcgtcacccgcgccgccaccccggaggctggccaggattgcgccctcgacgagagagaggaagacgacatacgcgttgtcgccgccgccgccatcaactagcaggaacaactacataattacctatctaacactcgacctaatttgaaagtacatccaaagaaacggatgaagtacatccaacgaagacaaacgctaccagaaaagtgattttttttacgagacctcataaattttgcaaatggaccataactagtggcgtctgtaaaaatcgagggtcatttttcccatacggctgcttaagtggcccgtatgaaaaaatccaagccacttgagaagccatatgcgaaaataaaatttgaaaattttgaaaaattggaaactagtgtatctcactcatatgaactccaaattggatgattttctttctaaatgtttctaaaatcatgctctatcatattattgtgttcttattggtattattttggctattttttcttgtgactttattttatcaattaaaaatttgaattttaaaacttcaaataatattttgaagcaggaaatgattttatctaaaaaagtcatcaataacaaagttgtataactcatcaagatctataacttctattttggacatttcttcatccgacaaagtgatttgtaagattgttcacaaaatgtgatacagcatgatttgttattgatgactttgtaaatgatagagcatgatttgttattgatgactttgttattgataactttttcagatgaaatcatttagtatttgaaaatgttgtttgaagttgtcataatttgaaaatcatattcaaactgttcaaacaaagtcatatataaaaataactaatacaaaagttgtagatcttgataagttatacaacatttttttagacaatttttttcatttcaaatcatttactacccaaaaaattatttgaatttcttatattttaaaattcaaattttatatagtctaatcaaactcggatggcgaaatgaccaaaagaaaaatggtagatctcaatgagttgtacaactttgcttttgataactttttcgcatgagttcatttagcatcttaaaattcgactcaaagttcatttaataccaaattaatatttttaataattatttttgcatgcggtcctcttaaatagccacatgcaaaaatctattttcgcatgggacggttaggtggtccgcatgtaaaaatgcccgcatttttttagtcctcctctctctctttccctcctcaccatttcaaaatttttcaaccacccatttatttttctctttctttatctcctctctctccctctctctctctcctctcctctcctctctctttcttctcgccggcagcaggcatgggtgcaaggcgatggcgtcggcaggcggcgagggcagcggatctggcggcgccgtactcgggagggccggatccatcgctctagggaggagctcggcgctcgacggcgggcggcgtgcatggcgatggcctgcggcggcggatccggcggcgccgtcctcgggagggccagatccgccgccgtagggaggagctcggagctcagtggcgggcggcgggcacggcgacggacgacgccggcggatctgggagcggcggatccggcggcgccgtccacgggagggccggatccgctgccctacggtggagctcggtgctcggcggcggatctaggggcggcggtggcaacgacggtctcgagcggcgacggtctcggctggtggcggcggtggtctcgggcggctgccgacggcggcgacgggaatggaagcggcggctgcgacgagctctggcgggtggcggcgctaggtttttttttcgtttttttaatttttggaattttatttttttctctcgattttttctctttgcttaagcgtccgcatgcgaaaatccggattttcgcatgcaggtgccctggccgcatgcaaagatttgcattttcgcagacgatttggtccgtttgcaaaaatggtttttgtagtagtgaaagtctcaacattgataattacaaatttgttttctaatcagttcaaccgatttaaatatttcaactttcaaataacagagagatatatatctctttaaggattggagaaaatattgtgctcctaatttacataaaagggggcacaccattccacagagcactatctcgttaaaaaaaaacgaaccaaaacactcggcgcaacgagacacgagagccagtagagccaaggcagcatgcatgcaccaacatatttgtagatccgcaatgtcgcccactacatcgtgaactgctctgaatccgtggtaacacatgttctatgagcaccggaaaattcgagatacgcatccacaccaacacgcagtgaccaaagcagagtgaacgggatttctagtgccacccatgcctacatacgatagaattgggcatggaacatacgtcttggttcttatttgtatgagagaatgaggaggttatggattaactgaacttagagcaagcaaattttccttgtacatgaagggtctagattttgtgtgcgttccgctgctcggccttgtatgtgaaatatatactccctccgattttttttatggagtttcattcaattttaaactaaacgatcgacgtcatatattaaaggttttagtattagttggtttattaattctctccgtccatgcagctgtttggctactctccatcactccccagtgcgcatgcgcatactaattggcaccatttggcacaggtccatcaaatagagatgattaaaaactccagttagacaaggttacatgaaacgttttgatgcatatattcgtgatagttcagatctatacgtacggaaggtcttttttcccgtgttcgatcaccaccacataaaccatcagtgcaggttaattattaaaccgatattaaatatgtattcatatgagtatatttgcgcatattgtgaatgtttatgtttgtattgtgtttcttaataatgtattgctgcgagttattgtgtttactgatggtcaggtttttgtattttcttggggtcatattcttcataaaataattaaaattttaaagctgcatatacggatgtgatactcttctattccttcctgctcacggaaataatctcagcgcgcgggagaaagctattggcggtgtttcttctcttgagaaatcattcaaatttctgaacaattatgccggtcaggtactagtgaaaacgcatacttcatcgaaggaaataatagaccgtgcaatggatcaattccaactatgcatataatctaaattggacaaagatagacctccacagatgttcttgactttttttataatgaaaacggtttacattttcggtcttttgcctaaatatttttgacgtaaaacatgtacacaagcagacaagctgttgtcgtcaccaggaaagtgagcttgcaaaatgcagcgaccaagaccaaatcgaaccatagtgtagtcgtatactgatgcccctcatgtactattctgctgctatatgatcgttgttgcactactgaataaccgatctttgctgggtgatgtaaaaactacattagttccaatttgaatagaaatcgggactaaagattatttttagttccggttaaaaagtgcaacgggactttatgatctcatagtccaagttggtgttacatatggatctttagtaccggttatttcatcggggactaaagagagccatgtttagtccctgattcggggtcccgatttgtaacccggcaatgtagagggatgcaaaccaggactatatagggttttctcagcagtgttggataggtcgcaagagaagaggtcttcattcctgatgccttccatgcccataacctggaaaagaacatactggacgacggacacaaagatattttgttgtttttatgatccacatatgtattttaacgccctcaagttgatcacgagcttttctagtttgacattttttttctccagagtttctttttcaatcgagcataacgcagagcagtttaattctggcaaaagtataaaaacagaaggggctatccatatttataatgtagtgcatattacttgtgatcaaattttaaggatgtatttatactataattacattacaatatttattggcttgttggcttgttggcttgttggctgttgctaattccttggtcggttcatccaacactcgtccaactgaattagcaacagccaacaagcagccgattacaatttacagataggaatcatagttacaaattttcatatggcaatggtgttgctgctgctgtctagatcagtgaagtgaatcagtgatcgtcgcagtgattcagcaaatcagcaacaacaagacatcaatcaggcatcagtagaagtacaaaacaatgagcgacggcaacggcaagaaacctgcgcggctcggcggctgcgcctcggcacctcggcctcgcatgggcgtcgcgtggccgcggcggaagaggaagtgcgtgaaaacggccagcggacggcggcctcggacgagatggctgcggtgttgcgacggcgttggtgccagcggccgcgatctcgcgtgaggacgtgaggcgtgagcggcggttgggcgtgaatgtgatcgcgttgatggcgtcgggattctcgggaacctaccatccgcatacatctgtttctgttgggcgagagaggggtggcgggtggagaggggcccctacgagtcgggggcccagagcggccgcaccgctcacccccctccagggccggccctgattgacagcatacacaaaccatgcccgtcgtccaaacatgccagctcacatgaatccagctcgtacttaattaccacctctcatgctcagatctgctgattcccagcacaaatttacatgggtaagaagccgtgacatcaccatgttgatcaccccatctgcaaatttcgccgcgatcgtgaaattcatggatgcccacagaaacacccaaggccggaacaaattaagcaataggcagctgttgcatactgcccatctggtgttctgcggcctctccatccatctgtacactgggcatcgacacagcaacagctgatgtatgggacggaactatagcgttgtagtgaccatgtcgctgaaggaggggtgtttattcctagtgccttccatgcccatatgatctggaaacgaacacggtgtgctagacatatctgcatagtgtaggtgctctggtttgcactctttcaatattgtgacctcgactaccctctactcgacattctgctagctcttttgacatcaatatagtttacagtgcaaatatctcatcgttactttttaactatatatttctacaaattatttagaaaatacaacaatgtgaaagcatttttcatggccaactaagacggggagaactagcgaaatccctaactggcagccgcttgcgccccccccccccctcccggcggcgcaaccgtgtggagcatacgtagagggaaagggggatcccgtgcgcatctccttcccctttttcctttttttttctttttttgttttttcccttttttttcttgatttctttcctttctaatatgtatatatacaaagtttgtatacatatgtatacaaggtttctatatgtggttttttcccctttttcaatatgcacttatacaatacaaactttatacacgtgtatatattttttatacattaaagtgtacacgtgtgtatgtaatgtttgtatatgtacatgtaaattttgcatacgtacgtatacaaactttgtataggtgtatatattttgttttataaattaaaattgtatacacataaaaaactatacttatattgtatatgtattatgtatatactttatatacatacgtataaacttcatacataaatatataggtacgtagaggagagactagatcaggagggcgactgaccgcgtgggcgcacggctgatcgcccatcagcgcccccgagaaggagacgaggcagcgaggggtgacgggaaaaggaggtggtgccaacagcgcgagaatgagaggcgatgtcggtggcgcaccagagcatctggggtaaaatgaaaattgctaactttttctccaagagacatgaaaggactaaaaacaaatagaagattctcaatgggacaaaacgatatttcgccaactatacgatttaacagcctgaaactcgcggagtagaaatcagacggtatatatttcttcaacgacgtggcacatcctccttccagaaagcttgctttcacctatacagatatctactagcaccattctttcatattaattaaatcctaattgttgaaaatacaacaatatgtgtgtgagaggcagctgcggataacttgctctctttatcaacggcacttcattattgaatgtgaaaataaaccacaaataaactgtcgtcgcggttcggcagtgcgaaatcgtgacgaaatcgcaagacaaacgcgtgatactgatgaaagggtgatgacacgggtggtctcccaaggtgaaaatgcaagatcggcctcgggtgatacatgacgaagggtgatgacatggcggtctcacaaggtgaaaatgcatgttcggcctcggtgtcgctagttcgccgagcgacagggctattgagcctcggtctcgtttgatggccgagcgagatggccacaccggcagctaataacacaactaatcatactaattagtgatactaataacattaattaatacattgctaatgatgttaattaatttattaatagcgcgagtttgtgtggtctcacgggctcgcctcacgagaccgcggtatcgcgcactcgcctcccggtctttcacttcaattctgtgataatggtatatttatgtcatccccttctaaacgtgtatattcttataaaatcatcggaaacaaggtatattttcaattttttttctttcttcaatacgtaatgcggatgtgtggtgtaggagactaggagttcaaaccatgtataaagattaactttgaaccagtctccgcttcattccaagttttattgtgaatgttacaatcgagtgtccattaggaatcgacagcattcgcgttttcttttctcagctcataatctcactatggacagcgctgcccgaacaactcttggatgccatatgcatcgctggaatgccaatttggtcgcaatctaccggtttgtcgttgtgcacccagtttagctctttgttgaaccatgaaggtcgagtgactgcccactctgtggcgcgagcaactgagcacgacgctgtcctcggctctcacattggctgcaccgaccaacacagtgttctctcctctgcccttgctctaaaatcctgatacctccccgtcctatggagcatgcatgcacatgattaatgcacacagatgtggacaacattttctggacggattctgaatttgccgcaactcgcctcggatcgatcgatgctcccaactcccatcatatcctccgaatttttagcttagtggttgcttttaaggcccattgatcctttcgttcctctattttgggttcaatttaccagctattgctgccagcacaaaatggtaaatgctcatatatatatatatatatatatatatatatcaactttagagggcacacatggactaaatatcgagcctgagctgaattttgaattccaatttatacaacattttctcgtgttgacatgaattagaacttgtagtttgcaacacacatctccgtcaagtctgtgatatgtccatcaaatgctagctaggtgctatatgcagcgccatagttataggctaattaataacggcaagcttcgctttgatttaattgccgcccaaaatactcattgtaaacatgaacttgatgatatataaatatattatatgtaaattacaattttattaataaaataaagaaatataaagagttgcatatcaactccaattcactttgacctaaccccacacaacgttgcatgggacaattctctagtttctagtgcgctatctctcatggactcatggttggcagagcaaacacgatcgatgcattagtgtggagtgtggattatacttgctggatgccctataactttgcccccactgttgctgctagctgtgggatcggtacactcccatcttggattatatccttgaaattaatttcctcaatgtactggttgcatattggtaaattgctctactttttttttagttcaatgtgtggagaagctagattgattgggaagcgttaaaccctggttagggggccgcacctttgtttatataggcaggaaaagcccctgtcgtggcttgtacagagatgatggaccgatctcaacaaccctgagatcaatccggattatagagataaggataaaaggttacacgtgataatatcaatcttatctctacaaactaacaacttatctattctaacacaatgtactagctacttaatttgaggaaacaatttacaaatgacttatcagtgctgtctcaaaactgctaaatgctcataactcaattttagagaggagagatcagggtggtggattctaacaaaaatatacaatagatacttcttctgaaaaaatgaaagatgcatgttaggaggtcccatgatgatgtcgtgttttagtcccatgaaaaagatacggacattttatgttttgccatcaatgagaaatagttccaaaaaaatactatcctatcgtacaagcaaattgtttaaaaaatgtgtcattaccattcatagattcaggttatgttagcccaatccaaattaaatgccctcagcttgaattggtcactcctgcaggaagattctcctcatttcacagtagctgggttgccgaatgctatgtgggaaatgacatccgttgagtctctgcatctcacgccaaatatccaacaactcgcacaaaccgtcatcaccaagggattcagtcttataacctaacaagctgttcttgcgcgtagaaaactccattggcatgggcaacaaaatgaaaccatacaactatagaatcaacggagcaagagtattgtccggtctgtccggacgaacgcgtatccaagaggcagccacaagtgcactgcaggtgggcacagcgttgagcggacatagcagtggccgtgagctcagcacaccgtgctcgatctgtcgtgcggcgtccgtggacatgccatacagtgtgcaaaaccacagggaagttctctgcagccattagacatgatgcacttgtacttgatagataccaggtcgatccgcattcccggcattgaacactgaagttgatatttgtattcttgttacctcctattcccacaatcaggaaaagaatgtagtggctcagggtctcatgagcagatttggtgtgtgtgtgtactactctttgttctatggctttatgcactacctcacattctcacaacccggtctttttgtgttttcttgatacatatatatttggtactggcgttttaaataaaagcaaagtaggtagactctctaccaatcgagggatcgaagtatcacatcaatgaagatgtatttgtggcaattgctagttataagtaacttgctccgcttaactcagaagtatatgcatgccccatgtaagttctaatggagagtaccaccaatgtgtatgttccatacaaaatttaaaaatgtaaagtgtacataccaatgtgaaaatcgtttaagtatccatggcccaacttttcctttcattttttttccacgaaaacagtccctgaggcactgttttgttaatccccaagaggagggtattgaagggatttatctgacacctattgtggtgtggaataattctccttaatctccataaatcccctccaaactgaacaaggcccgatgtggagaaacctaatctaaattgaaaatcataaaagtcccacctgttcttgatgtcatacaagtgtacaaaccgaaaccatgttcattgttccacctggtcagcgtgctcgaatgcagccttttcttgccactgctcatcctggagccaaccaattcctagtaaaaatctaacggacatatgcaaccatgctatagcattactgttcttctagtccccaatatttttcatggtggtagaattcacaggcatgcatggcgatgcccaaggctgagccgatcaaagcataaagcagccattcagagatgcctatatggtgttctgcaaacagtgagaacagcagcagaacaccatagaggaatgggaaaaaacatctctattgccgtgaataggtcacacgaggaggagctttcatccccggtgcctttcatgcccatgtttggctgagcatggactaattaaaattaaaaaaggaacttatcatttgccaggcatgtgtgcatatgcatgtgtggtagctgctgataatttgcgcactctacctgagcaatagtgtgacgtttgctatgttggagatttgtcaatgtaggattagagggttgcatagagatttgtcactcatgatatttttttagcgttatatttagattttagggtgacatggagaacagaggaagattttctatgtaaaataatgtacttcatgaatgatactccctccgtttcacaatgtaagtcattctagcatttctcatattcatattaatgttaatgaatctagacatatatatctatctagattcattaacatcaatatgaatgtgggaaatgctagaatgccttacattgtgaaacggaggaagtagttataaaatggccaatcaatttaggaccattgggagtagtatgagaggtacatgaattgagatggtcatggctagatagctgcctcttgataccacagttgcagtaaaaagactctgcctccagataaagttttaatatgctgatcattaactggcgaatttgtaatttggcttatggagagaaagacatatcctatttgttacggccttaaattccaatcagctttcccatatctatgttttctttttcatacgaaagcatcaagtcatcccaaccattatgttctctaatacacagaaagaggaacccgctcaatgtagaaaaactttgctagaaaagggtgaaccaaatttatcggagtaatcagagtggtagaaagtccaaataggccatatcaagaggccttttatagtaccttccactaggaggtggtagtagtgtagtaggaataaatatcgccgctgatttcgatggtcaatttagtcatttgtttaaattaggtgaaagggcaattaagtaatcattggcaggccctaagagcctgtttggttggagggagttagtgatgggaatgggagtttatgatatctgggagtttaagtctataatttggttggaagacttggaaattcgagggggtttgggatagggaattaagaggtccaattcccaccacggcttgtttggtaactcgagggaaggggattgagagtttacacgagggaattgatgatgagattaagatgggaatttgatttttaatcccaatatcttgtttggtagaggtgatggaaattcatagggagtttatttggagattaggtcattaataaaaacggatggctgagatttgcttagaaaaagtaaaggaggaattccctcccaattacctgcccctacctagatattgaaaaggagggagttccttcctcaattccccatccccgtcccaccaaaattcccatgtctcccaaccaaacagaacaattaatagcctcgtccctctaaactcctagtccctcccaaaaactcactccaactaaacgggccactaatctcttacctgggggaggcctgttaattcgtgagacttgtagggaattcgatgtgaaaccaaacaatggaagaggactaaaaatataactcctatgaccaatcccaccatcaactccctcttgaaactcccattcctctccccttctcttgccaaacaggccgtaaggaggacggctcaaacatcagtcaatcgttcccatggccaattcgtcgggcacggcgcacggcgagcacgggcacgcgccgccgcctgttcgccgttcacccctttcacttccaaccccgatgtgcgccgtcctttcactgccaacagccggtgcgcatccttgcgcaagccaacactcgacaccactcgccccgtccgcctcctgacgccgcgctgccacccgtcgacctaatgcgcccgcgcgccggcgccccctctcgctctccttgcgcccggcatgaagtgttgattttaatatatccagaattgcggcatcaagtgctgatcttgaacatacatgttttgctcgcagcttcatgatggataatcctcaaaagctatgaaattcagtcttcataatataccaattgattatcttgactagtcgcaaacaaaacctgaagattctgaaacttatttgtttcctgcgattctgctaactaatcacaagggatctaaaccttaattattttctgcaactgtgctttcagtttaattaactctttcattaacgaaagtattaatgatcccgcaaaataattaaatctgaatctttaatgtgccctcatggttgacggtagtagaatttgtgtaagccaggcgtcaaccatgcctcaaatcagaagtctgaatttctgaactctggcatgacctgaagaaagtttcatagaaaaaacaacctcaagaaaaagcagtacggccggaagggaaaagaatccgacgagcgtgctgcctccggaggtggcacagcagtgatggcctgatgggagcagcggcggtgccagtgatgggtgtagggttcaaaaatcacgatctaaagctattgattaattatttttctttttatttcataagtggactgcatttttatagacccaagaacaaatcacaccctctgccaaacctaaattttcaaaaatgtcacaacaattttttcttccagaattaccattctactacactcctgcaccctgttacactaggtgcagtagcaacgtacatcctccgttggatcccatccttgaacggcccacattgatccatgggtactttaaaaaaaaatcccaaattaagcgctgaacaagaacggtagaatagtagcctcattcttacacaagtataccatgccaacttctgccgtacatcttgtgcagtagatccaccttggtgactgatctagattcatgatatcaacagctcatgtggcatgggtaactagttttacacagatcgagtcaacaggatttctagtgccacccatgcctacaattgaattggaaatggaacattcctttgttttcttcattgcagcacacaagaatatggattatttcaacatagagcgcatgcggaattttgccttatagtagagggggctggactgtgcgtgctctagtgctcgggcaagctatatatatatatacccgataaggttgtagtatatagttgttggtatattattctttgcaaccagccaaccacacacagctactcagctcccctgctcttttctcctttgtgcaactagcatatactccgcacatgtcattaactaaagacgtactcaaaactccatcaaaggtagttatacgtacttcatgtgtttgtggaaagtggggagcttagttcagatcatcagagagttctttaattttcccgttttgtgcagttattgccaattatgagctgtctctggtaataggctatcacagtttcagcaaatcccacgcactgtaccgggagattgttttatgtcttgaggtgatatccacttattttgttatgttacctaaatagttattaaagctttttgaaaaaattgataagataggttaatatgagatatatcactatgcaaacatgtaagcttaaattcgacttctacaagttctaacaaatataactgtgaatttacatcaactaattttaattaattttcttttattataacttgtaggttctaaatttgaccttgtatgtttttttagtgatatatctaatattccactatcttgttattttttcttaatttttataactatttaaacgcatgtaagatatgaggggatgttgaatagtataggatattccttcgagggatgaaaaaaccatctcccccaatgaaaaatagttttggtctatattttttaataagcgcaattgattttactaaatcttaaatttttagatgctttcaaatcccctccaaattgggtaagaccttgttaaatttttcatgactttgataaccacaaattttgttatgcttttgatcccagcaaaatttgctaggagtattaaatttgctttgacttggatgtccaaaattttgtcattgttagagagaaaacagggatgcattagtgtgcacctcattgctcaaaaagaattttccagcacgcaacttaattgtaataggatatatatatatatatatatatatatatatatatatatatatatatatatatatgcactacacaagcagtacaaattccatccgatcgatcgagccatccaattttacatggatgtatgctagattctacagcagatcacaattaattaattgttgtgtgcacgcatccgtttcatgagattgcttcaaacgacgaggcttcccgacgtcctcatgataaagagtgtaattagctcgaggagtatatgtatatatggaggatcgaggcaagtagaaagatgcgatccaatggtattcaaaactcttctggccgtaattctggatatgtatcttcaatagatcgcaagatcagctaccacagggcacatgtgtattggtcctctcaaaccaagcaaaataacactatttttctcacctatttgtaggctgcagcagttagtcatcctcactagtctttaactcatccttcaatttgggacaatagatatttagtactgccaactaaccagcatcaccttatagttgcccgcacttattacatatttgtacatattagaaatggtgtataatatagtggtgtagtatgttgcacttttactgtccaaacaaaagaatggaagtgctctcacacaaatgcttgatcaattctagcataaaatggctagtgaaggaaacctaatggtggtggcgaaaacaaaaccgcttgtacaatgccgttttataaattaacttgtgtatagggtacacatgtaaatgatttgctctacacattttgcaccttgaagattcttggccgcactcctctgcagaaaaaagctggatgaaaaacctttcatttcacaatgctgctgctcttcccaaaccgagtttcacagcacataaagccagattcatgaaagatttgcgtagtaatttctgatagagtaaattgcactagcggttcttaaactgagctttcacttagatccacgaacttacaaaacgcgtatcgagatccctaaaattggtttaatgtatcatcccgatccaaagtctcatttgactgtaatcttgcctacatgacatgacacgtggacaatgacatgtaattttgaaaaaaaaaataatgtctcccttcttccaccctcatcccctccccaccaccttttctccccaacgccagcagagggccaaacgccaccgatgcctctcctcctactccgctcaccgcaggcggcagcgccgcctctcccatccccggtggtgtggcctctctctctctctctctctgcagatcaggtcgcctctcccttcctcgacaaacacccaggtggagggcgacggtactggtagtgtcgagctctcccctctcctcacgacggtcgggggaccacagcggcgacaaggatagcgagctcaccggatccggccgcaatcttgctggatccggtcacaacctcggcgggtaggtcggccagtagaggcgatgagttccgtacagtggaggttgacgtgattggcagtagcgagctctgtaaggcagaggaaaatgagctgaagctctctttcctctcctcacgatggttgggggaccgcaacggtgatgaggataacgagctcgccggatccagccgtaattttgttggattcggtcgcgacctcagtgggcaagtctgccggtgaagtgaagggtgatgagctccgtgcggtggagggcgatgagctccacgctgcataggtcgatgtgatcgatggcggtgagctctgtgtgatgggggatgactagattggcggtgacgagctttgcatgggggagtgtgatctcattggggagccaccacaccgctcgttgtcactgtctccgcgccattttcgttgtcacccaatgccactcattctcaacgcttgagttggaggcaaagaccgagccccgccactgccgttggtgttgtcgttgtccccccagcctctgctccgacgacgagcagacttcggcagtggcgcctctgcctccggtggtaggcacagtctctccctctcttcctttgcctgccatgaatgcatccagaggtggaggaaggagagaaaaaaagggaaagtaaaatttgtgccatgtcatcacccacgtggtatgccacataggtaagaccacagtcaaacgaggctttggaccagaatgatacattaaaccaggtttagggaccttgatgcacgctttgtaagttcgtgtacctaagtgaaacctcgttacaagtttaagaaccgctagtgcaatttactctttctaatacatacattgtacttgtattttatggatatcctgtcccttagcattctctgcatatagcccttactgcgcagttgttctgatgatgcatggcaaagatctatgcccatatcactaatgaagaaccagtcagtgaaaattgtaaatctctcggatctcttacgaaccgggactaacgtggccttccccttcagtgtatcttcacctcatgaataggtcctaggagcggacaccaggattccagttaccttccattctcacgatcaggaaaaagaatgttgttatgactcaggggctagttgacatgttgtatgcatatatgcttatactgaatatatatgtgataaagtgatctgttctttgtcctctctccttatgctagctcgcaacccattttgctatcttgatccatattttgctgctggcatttttaataggctgactcagcatgtatgtgtgaccaaaaagtgtgagacaactaatagaagatgtatatgtgtgagcatgtggcatctgccaattataagtgcatgcctccaccagaaatttaaaatttcgaagcctacatatatactattccaagtgaaagctcttgtgaaatttcttttaattgagagttaattattaagttcaaatttctaaacaatgggaccagggtaccagtaaaaaaaaacaaaaacaaaaacagactgcatgcgttcaaagtgcacgtcagcactgatcaatgtgaatgaatgcatttactcgtggtccagctcgcagtgtaggatctgcccttccacaaccaatgtgggactattcaacaatctctcccttcacaccaatttggtgtccctcagcccttcaccgtatccgggccccaccagcctacggtccatcaggtatacgggccccgcaggtacccacggtccatcgggccagagatgttaaactagccaggctctgataccaattgtaggatcgtaaagggcctttcccatcccaaaagctagctgttgaggtgggaggctcccccacttatatctttggttctttaaccttccacaaccaatgtggaactattcaacacgcatgagtttagctactctagccactgctggctaatccttgttctggtgcgtgccaattctaagtacaattttaatgggataagaaattaattatcgatgctcgtcttcccaagttcccatcaccggagttcgtcgtgatagaagaattcacggataagcacggcggcgtccaagaccaaacaccggcgtagtgcacggatgccaatcttgttctctggctgtccctccatctgtgtacagtgcgtccgccatgccacggctgatggccgcgagagaacagcaaatttgccctgaattgatcatcggaggaggggttttcattcccagtgccttccatgcccatatgatctagaagaaagttagatggtgcttgagatatgtgtgtacgtagctgtgtgctctggtttgcactctttcgctcgtgaattaatgtgcctactctctttgttctgctatctcgtaaacgccctttggttggtgcgctctctagatctctctgttccatgtttttcctgctgtccattgtgtcagcattaactaagagcaggtacaatagcaggctataagtcagctgcaaacatattttaagaagataaatcaggagagagaagagcaacgggttacagatttgtagccagctgtagcaaggactccaagacgcagtgtttctatcacaggtgggactaggtattaatagtgtagtatgtaactattgtatgaatgagctattagattggctatagatgaattggagctagcagttggctatactattgaacttgctctaatactccctccgttctataatataaggcacagctacttttttttagatgtttcataatataaggcatgcatgcatgcatataattaattatgatttttttaaatcctccaccatcaagatctctaattctattggatgcatgcattatatttattaggatgattcaaactaggagatgataataattatttcttagtctttgggttaagggtggttgtgccttatattttggaacggagggagtactccctccgtcctaaaatataagcatttttatcctgacacagcctccgagatatcactttgaccaataatatctataaaaataagatgctttaaataaaaagagttgcatattatgatagtttgtttaatgataaatctagtaacatcaattctacatgattgatttttttaatttttttgctattaatattttaagttaaaaatgtttgacttatcactatgctaaaaatgcttatattttgagatggagggagcagttaactactggaaaaacaattttgtagatgaggtacttctatttttctagggggagaaaattttttcaaccaccagcccacctgtgatgatatacgtactaaatcatcgctcttaaatcatttccaaaagagatgtgatctatgatgttcaaagaaaaaaccgcacagattttaaagaaaatgagaaacccagattaaaagttagttaacagcataaacatcatttataaaggattatttcgtgcatgagggagttttaatctctgatcctatcagtccgaatcccacatcaaagcttcggcaactgtttcctgctcgccgccgtcacaatgatgaacacctggtgcctggccatatggcatttggatctatcgcgctacaaaaacttggccgttgagcatcccaaactccaatcattctctcgcttacaatcatccagctattgttggcactgcaccatgtgatcgagaagcaagcatcaatgagttcattagcttttcatttatatggagcatggcgacggcttatgtcactgatcttggcagcaaaattgcgccatggccgctgatagcctgccactaatattcaagaaacaataaggagccacaactgatatgctaggcgcctaggcctcaatgttttaaaaagcggactaaggtatttagcggttagcttgtcaaacagctatagcgggctaaatggagctataacggctaaattatacatgagagtaaatagctagaacctttctaaaacagctatagcgggagatagcggcagctatagcgggagatttaaaaccatgctagtcctacgtgggcgggctagcatcggaggcggagaagaacgagagagaggatgaagggccgtgactgaatgaatgcatgcgggcttgagacaaaattacccttgataaaaagttttaggctgttaattaccatctaatctgggcctctcatatcatttaaaatccatgcagatttttctttaaagagcatagaagcacaaatcttttcaaaatattttaatccaaatccatccatcgcttatgcaacatttaaaatatattcattatatattctgcagcaaaccacgacgagccatgtagttaacaaatattttcatgcaaacacgtacataaattacacgagggtctttccagagatcaagaactaccacgctttttcgtgctaaattattaccctgacattaaaaagtgtccgaactacggagagacactaacgattacactagaaaagtttggtacattcttgatggaaagaaaccatcgtatacaatcaaatattttgtcgaaggctgctgcgaactgttggtttacaaaacaccatcaaagtacttgcgcattcgcacgatgaagatcacctgtttagacaccctgtggagccttcagctgatgaggatcgcagcacggaccggagagccaagaagccttggatgtcgaagcatcctagagaggtgtcgtcgatcttgttattatacgctctcgtcgttgttgtgcacggccaagaaaagttaagccccattagcttgtcctgtgtgtagaaagggatactctgaatctacgagcttgcgaacccgtcaccaattatttcccgattactctcaatcccacaatccaaaactccaaatccccagcaaagtgaagatgtgtgtgtgtgtgggttttttccctgtggacttctttctttttttgcaattgtagaatatttactttccaagtaaatcaactgcagtagttctcgtgccgaggacagcactaaaatagccatgcggtaaaactcaaagtttcactgaatttgatctcttatatatgaggactgctatatataatggcacagtaactctgccataattattaatgtatgtcttttttttgtacaatgacgtactatctccgttttttatatactatgacgccgttgacattttaaccaacgtctaactgtcttatttaattttttatgctaatataaaaatatttaagtcatgcttaaagaaaacttgataataaattaagtcatagtaaaataaatgataattatataaaatttttgaacaagacaaatggtaaaacatatctcaaaaaattaacggcgttgtgtattaaaaaaaacacagagagagtagtatataggaaaaagtacaaattaccccccaaattatcatggttgaccgaattacccccctaaccacagttgcaaacattttatacctagaacttttcaaaccagatgaataacccctagcacaatccagagcagttttgatcttacgtggcatacacgtggtggtctactcaactaaaaaataattaaaaataagtggactccaccggtcagctcctctatctcttctcccacctcctttcccttccatctccatctctctccacatgtctctcgctctctccctctcacgaaaagccagaatggcagcggcggcggcggcaggtcgttgggggagatagcggcggaggcggcatgaggggaagccgccgggctagggcggcgagcagcaacgctgctgcgtgcgttgcccgggcgccatcaccatctcgagcttggtgagggcgttggaggcagcagccggtgggacacgccaaggaggatgatggaggcagcgttgcggggagggcgtaggaaagggaaggggaagggggtggctgcagcagcgctagcgtgtccaatttcttcaactccgctgtgcccgagctctgcgccgctgcgatggtggggaaggaggatcccgccgccgtctctaccgccgtctctaccgccgcctcgctccacatcccaccgcccttgccactgccaccgctgtggccatcggagccggccgagcactgccccggcgtgtagtatgccgcgtcctcgtcgggcgaccagcctgccgccagcagctgccttcgccctctccggcatgtccgagctccgcgccgccatgatggtggggaaggaggatcccgctgccgtctccgccgccgcctcgctcctcgtcccgccgccctcgtcgctgccgttaccatcagagccggcgtgtatcgccacttctattcacagagagagagggggggcagagaaggaggagagaaaaaagcgctgataggtaggccccacctatttttatttgtttttgctgactgtatcgccacgtaggctgaaaaccgcttcgaatcgagttagggtggtaatttatcaagttttaagagtttggggtgtcaaatgtccggtattgtagtttagggggggtaaatcgtactaccacaatagtttggggagtaattcgtactttttcctagtatataagagctcaatagcttcaacttcattgtgaagacaagctaaagcgaggtgcctatttatgttgactctccaccgagtgaacatcagtcaaagttaatttctttaaacaactataattgacgatgtaggtgttggacagagaataacgccaaggtatacagattaattatccatcatgaaaaaaaataatttaaagctacaatgtgacaatcttgtataattttggatgaccctccatttccttgtcgtgaaaataatctcagcgggagaaagctagctttttggtgatatccggtctcttgagaaattaccttcaaattttgtaacaacgagacacaatctaaaagaatgagacaagtgtaaaccgccaggcgttcttgacgtgtatggcatacacaggccgtgttcgttgtcaatctgcgcagctcgcgaaaattaatgtaccttcttgcaagagttctaacaacatcatcgttccaacgtgcagcagtgaggggtggcaaaagagcggcgaacgtaatcaacatgtatgattgagctgcacgccaatgtctcaacacgacgctgcttgctgaactgctacaagtccgttgcggcaaacttcctgcctgtgcggagaaatattgaaacatagtacttctgacaagggagagcatgatagtgggattcctagggccacccatgcctagctacagtcgaattggatatgaaagacgtattggctagtcttctgtgccgcaaagagtctctctagctagctgctttcgaatttgtttgcaacgctggtcagttataaggaccgagtcaagaaactatccagaaaacaaatagagtacgaccacatttcccgaatggatatagacccagcacactaggtaacttgagtggaacggcagcctagtcatggttggttctgtttgtgatgttgtggagaagtgttgtggtaattaataacatcaaaacctaaaatgcaccctaatataacctagataccccaactggacatctcgcacagtccatagggcgactagctagctaatgaggttcaacgatattggtggattaacttctacgtccaagtcgtcgactgtcacaccctaaagtttccccttcctagcctttaattgaataactaataaattgctacaacaaattgattaatttaacctagagctaatcctcaattaaaagtcctacttaataagtggaaatggcttggtgggatttttcttgagttcccctttctaaaatacattatcaggatttgtagtggaattttcacatcaaagaaaataatttaaataaatcaaaaacgattatcggaattgaattaatttgaaatccttttctttctcttcatcggccgttgggccgcttccggcccaactccctctccccgacctacccacgcccgacaccgtgcccctacttgctaggctggttgaaggttatggcccagcaagccacccgtgccgcctccgtacttgggacgccgacaggtggggcgcacctgtcggggttgtctccaacctctagccgagaggggcagggatgatgtcagccacgccgtcgtctctggcacacctttcgcgccccaaacgccgacgtcctgcacccagccgcacgtgcgcaccccactccgtgcatcccactattgcctccttgtttttgaacccaaaatcaagctcggcgccaccatttttcctcctcccactgcgccgcctccggccactactcaccaccactaaagctgcaaccgagccacaccgtcaccgccaccagcttcgtgaggtcaaggagcccctcggccgccacatgatcgttccattccgccaccggaacccgcctctcccaagatgccggtgagcctcgcctttcctttccctctccagccgacaatgctcgctgccgcgcaaccccatttcccctctaaactcccccttcgtcttccttaggtcacactggaacccatccaccgcctccaccgtcctccccatcactagattaccgtcgtcgatgccatcccagaaccgccgctgtttccaccttgttgtcgtcgttctcgcgctgcatctcgccgtcgtgagccctcggtgagctgcaccttcccttcctcttcttccactgccgctccgcacgctcgcctcgggccgcatgtgctgccgccaccaagtcgggacggcaagccactaattgccacttcactagagtccaatttgcccctcggcacatcggggccgtccacctcgctgtccgtgtggctacctcgtcggtgccacgtggtgcacctgtccccgacccgatggactcggtccacagtgcaccgcccgccttgcatcgctaacgggttgggctcacttgctggcgcccacctccctctcgatttcatcagccatcaggttttaatgcgcattaatccattaatttttttctattattagtaaaagcacaatgaatatttgataattcatccgagctccgtttaagcccattcaaattgtagtaaattcataaaaatgcatcgaatccattaaaaatggttttgttctatgttttttagacttgtagcttatttttctttgtgtggtttgtatgtcacttagattctgttggttcaaaagttcccgtttactttgaagtggttgtaggggttgcagcagcacttgagtaaggcaagtcacgcattctcgttgaacatatcgtacctatttttcaaatgtcccgctttctattaaatttgcattgttttataatgtcacgtggggtggtttattttatctcagccatagcttgatcaccttgtatcattgataacttgttagtatgactagatgttaatttaggaaatgcttagtcatggtcagatcaaacgctcacaattggaatctctcatatatcttatatcttaggttaatgatgactttggacatggatcaccatggtattaatttaaaatattttctttttttagcaccgaaatatgctccttacgaaagattctaacacctgaaattacaaggtagattaagcaacaagaacgagaaaaaaaatcagaacccaaatttcggactatggatggaaacaagaagacctaagggagtcagcatgatgcaagggcaaggcgtgtgtgtcctgctggccgccactgctggttgcatgtcatcgagatgggagacggcgcagatgggacttgggagatgcaaatcacggtcagggaggaagtaggggagaaagtgccgatgcggaacaagatgaactgtgaaggaagagaggaaacaacgcgaacgcagcgtcgccctcgcagccccgcctgtctatccacatagaaaccataccgattggccgaggatgggagttgggtgggattagtgatggcccccctctgcggtcttaggcggtcgcacaactcacctaggcctagagccggccctgataatgaatgagttaaagttcttttctttgtatgaataaagaattattatcactagttttcagttatttgtccattaaaattattttcttcttaagagtgtggtcattgagctgaatatataaccgtagttaatacaaataatgatgacataataatacggttgttaataaaataacgatggtagaaagtctgggcgctttatgaaataacgacagcagaaaaacaccgtctttcataaaataatgaccggaagaaaattgcatgcgtggttgttaatactataaacgacgtaacctttagcgaccactgaagatcacattttatgatcgttattgacctttaacgactacattcgaacttttaacgatcacatttgctgtcattaataatcgtttcaccagttgtgcgatgtggtaggtttttattgccctgcatgttggctgtgccgcctaacacaatgccatggtttttgactcttctgtaaatttccgacgcctctcgatcctaaggagcatattcacacgatggatgccacactagtgtggactatacttgctggatgccctgtaactttgccccaactgttgtgactagctgtgggatcggtggatactcccatctcccattatatccttgtaacttgttgcatctatgtattggttgcctttaaggccattggtccaggcattgctctatttttttagttcaatttactagctagtagtttggaggaaataatttactaccgacttattagcgctgtctcaaaatgctaaatgctcataactcgactttagagagatcacgtagcgtgttctaacaaaatatacaagagatacttcttttgaagaaaaatatatatgtataagaggtcccatgatgatgtcgtatttcagtcccatggaaagatggacattaagttttgccctcagtgagaaacagttcaaaataataccatcgtatagtacaagccaattgtctaaaaaaaagcttttcgtaaatccaacttcgttagccctgtcccaattaaatgccctcagattgctcgctctgcagctggaagatcctcctcctttcacggtagccaccaccggatgctgtgcgagaaatggcatctcaatggaacctctgtatctcgggccaaacatccaacagcacgcacaaaccttcatcattaaacgggtttcagtctatctccaaacaagctcttcattgcacgtaggaaatgccaatgacatgagcgacaaaatcaaaccatacaatcgtaggatcaatcaagcaaagagtactctgtacagtttgcaagggtgaatgtgcatccaatacgcggtggtcgcgaggtgagatcagcatcaaggcgcacaaccaatcggtggatgtgagctcacctcacccagactgaacctgataggtggtggctcagcagccgcaggcgttggaagggcggcgagcgcgcacccaagaatcggtcatgagctcaccggatccagactggatctgacgggcggcggccgtggacatgccctacaacgtgtaaaaccacagggaagctctctgcatccattttgacatgctgcatttgtacttgacagatgcccggtccctcgtcagtctcagcggcgctccaagaagctgatagatgtattcctgtgaccttccattcccaacatcaggaaatgcatgtggctccgggcctcagaagcagattaatttggtgggtgtgtactactctttggtccctggctttgtgcttgctcacaacccttttgtgttttcttgatccatatatatttggtactggcgttttaaatatgaaacttttaagacaagctaggttgactatatatccaccgagtgatcacctaagatgtatatgtggtaacggctgaatattaaataacttactccacctaactttggctgtgttctacccccattttccccaggccgccacctctctcttttccgtgcgcacactttttaaactaccaaacggtgttatttatgcaaaaattttctatacgaaagttgttttaaaaaatcatattaatccatttttcaaaaaaatagttaatacttaattaatcatgcaataatacgagtttcgttttgtaccatatagtagtatatgccccaagtatattctgatggagagtacaccgcagcacctagcctttttgtaaaaataatgaaggatacgcaatgacatgcaccgtgggactttacccctaggggcgtttttttatcactatattcaaggaaagagcacaatttcatactgattcctttaaaaagaaccatcaaaaaataaaattgtaaattaatcttttaattctccatgatctcctccttttccataaaccctttctcccttttttaatcaaaataatccccggtagggagaaactcaatctaattaaatcgaaaattaaaaaaaccaccaccttttcttcatggcatacatatgtacaaccgtgctcatcatccaagctgtccagtgcgcactaatgcggccttttcttgccactccacgtttccaactcaacgaatcaattcccagtacaaatctaacgggcataggaatacatgatatagcattatatatatatggctcttctagtctccaaatttttccgtgttgcagtggtagaattcacaggcatgcatggcgacacccaaggccgaaccaatctaaggcctaaggcagcatccgttcagagatgactctatgttgttctgcttctgctttggacgtgctctctccatcaatagaatttgtgtcggtccgccagcagtagctaatggatggcaaaaatcatcgttgttgcggtgaataggtcacaagaggaggggccttcatccccggtgccttgcatgcccatgatctagaaaacaattaatgttgtgggtgacactttacaagctagcgatgtgtgtaccgtgccagtttgcacctctttgctggtgaccttgactacattctctgtggtccttaaaatgttgctactccctccagttctagatatagggcacaactactttttaaagtggttgcatgcatgtaattaattagcgcattctctcccctaaattattattattttaaattctatactcataagatttttaattctattgattgcatgtattatattaattggggtgattcatgacaaacatgagatattaattaattcttggtctttgggttaaggatggttgtgacttatattttagaatggagggagtagttcccaagagatcaggaagagaaaagcaaatgattggtatttaaacttattcggttggttgtgtcacttatgtctctgtagtatgtactctcttggaatgtaaatggttggtccttaaacttattcggttggttgtgtcatttatgtctgcgtattctggaaatatagaattagcatctcaaattttttttagcccatcactgggtcaaacagttgcagactcactctgcgcgctgacgtggagtatgcagaatttcggcacaccaattgctctaattctatgcctggaccatcggctccttcgattgcatcggtgctatgtatgggtgctcgagttcatcgactctggcacggccttttggtacatattgatagtgacatcatgttgttattgaaatatttaggagttgcatgtttatgtgttctggccaatataaattcaatagagatttctgctctaattgtttagtgacctcaggtatacaatattgtcttttgaaaaaaaagttttatcaagaaatgtcaattgaatagaaaattgaacaattgaaattatcttttacattttcttggcaaagccacactaaattcaggtcgaattgatgatgactactaaaatctttatcggcgcatggaacaaatcggtgatcgcttttagactagtgattcacaccagaaactaatataaggtgctaattctatattttaaaaactacggggacctaagtgacagaactgaagagctaactctgtgtggtctattttcccagtcacatgtaaaaaaaaaaagtagtatcccggtcattcaacgaacacatttccggaaggtgtaattaatatgtgtttctaactaagcaataaaagcttaatgaccgcaactgtaaggatgacagagaagcatcgatgttgtccacctctgcgtttcaactaggtacatctcttggggccgtacctatgatttgtggattgctcagtattcatggtagcacacatgcccactgcacacgctgcaaaatgaagatgaacacgctttaggctttcgcgtaagacaacaggattcttagtgccgcccatttctatagttaaattggacataaaacgcgtatgagcatgttggttagtcccttgtcagttgtcaccttagatttctagctagcacttcaaccttattttgctatgtttttatatagatgcaaacacaactgtttctaactttttattactacttgcccactagttttgtacgtacgtccttcaccctccagagtccagagtaagttaaatactagcagtcttctcacctgaagcctcccagctaccctaggtgggaaaataaaacaatttttcagtgggggacgcaaccctaaaatttacaaaacaaaattaatatatgtaggtcacatatatatatatatatatatttaattagatctaatacttcattctcaatatttttttctcaacaaatatatttttctagactcctggatcacatcacttagtagtcaactacctcaagtctacaaactctatcccactaagaacaactgcaacagcctctatatcccattcttcaaccaaaatttgacaagtttaggcaaatttccagctccaatagatttgtcaaccggatggccaaacactaggggggcaacgcttgtaattgttaagtgaatacttagccttgaaattttgtgtccgcgccactgctttttttacgagtgctcccatgaacttagagcatcttcaggggagacccaaaacctgcccctaaacaaaattttaggaacagtagggtacattttagtagaatttgtctgtgcagatctctaaccacttcagcttttcgtgaatctatctatagttagtttggtgaatgtgaattgtctgcttggctatgaatgcactatcaaattactatgagcaactctgaactctgaacaaagttgctgattaaatttgcattctgaactcagaacatctctgaactagttatgcacactgtgtttatttttagtttctcgtacagagattttaggtcagtgcttgtgatattgacttcttatatattgacttgaggagttactcagtaaatatatttataattcatatcaattcgtactttaattcaacaattttaaaattcaaacctttttcaactgaaccattatatcccggttccagatggtcatatttattgaaccttttctcctctttacaaaaatttattgaaagtttctaattcagtaattatgtataggagcacagattgcacgcagaaatgacttgtgcacgtgatacaccttgaagactcaaggcagcactctcttcacaaacctagatgaaaaaccattcaacaaaaccacggcttgtccttctccgtcgctttctccatcgagccggcgactttctccgacgaggatggcgccactaggcgacaagctcggcggtgtggagcacgaggacaaccacacatccctctcctctcctcccttctctctctcccttccttggtggcacggagcactagtttggaccatacctgcaaacactgactaggaacatgtggtatagtttggctatgcggtcttcgctttgctcctctaatggaggaggtggcaccgaatatttggttccgtctacccaggccaaacgtctcatgggtgcattgtgaatggcgtaagacaacaggattcctagtgccacccatttcaatagtcaaattgggcatgaaacgtgtgagcatgcatgttgcattggttagtcccttgtcaccttagattctctagctagcacttcaaccttgtcatcttacattagacataacccttccttttttttcttgcctctctgatatggattttcatctctcgaggggacataaggggatgtcccctcgtagttggcatgttatccaaatagttatcaaaaaataaaaaaaattgacaacatagattaatacgaaatatatctgtgacatcctggctcaattgggatttggcctgtgtggcccatgtgagctgtgtgtgcatgtttagtactaccttgctagtttattacgagtggtaccaacttataaggcctctaccctccaaccatatcactcccaggttaacccttttaaacgatgcgaggatgaaagtgtaagtggggtgttgtgtgtaagtgggtccgcccgtcggttgggctgggctacgtggttctggagggagggttgttacaatatcactccacaaacatataaggtcaaatttgacttctacaagttgcaaaaaaaacaaatcaactgaaaatagttactgtacattcgtagttatatttgttatttttgttacaacttgtagaagttaattttaacttgcatgtttgtggagtaatacatttcatattaatctatcttgtcaatcaatttgtttctaattttttgataactccatttcatattataagtcgtttcgactattttccttgactattatagaaaaatttaacagtatcctcaattcaaattagtttcatgatacataacattgaatatattttgataatatatttgttttgtattgaaaatattactatattttctatacacttggtcaaatttaagaaagtttgactaagaaaaaagccaaaacgaattataatatgaaacggagggagtatttagatgacatatatgaaacgtggggatatccccttgagggatgaatacactttcccttgtctttctatatatgtgcaaaagtgtcacataaatacactataataaatattgtacttcatatatattggctcgaggagttcctcagtgtaaatatatttatagcccatatcaatgcgtactttaattcaacaattttaaaaattcaaacctttttcaactgaaccattatatcccagttccacttatatacaaggtcatatttattaaaccttttctcctctttacaacaatttatagggagtttctaattcagtaattacgtttaggagtacagattgcacgcagaaatgacttgttgtgcgcgtgctaccccttgatcaactcctgggccagcactctcttcacaaacctagatgaaaaaccattcgcaatgttgctggccctcgaccgcgctttggagtgcagtggagcaaccttatatgcatgacagtgcagtaagccaaacggatgctttccgcagcatttcgggcatcctacagtactatgtatttaccctgcaattcatgaccgcgttgagatcagtatacaccttacttgagccgatgcacgacaagacgcagcggccttatcctgcaatagctgaagcaccggagatatgtgttcccgatcccttccattcccatgatctggaaaacaaatgtggtggctcacggggaaatctctggacttgtaaatgtactgtatggtaaactagtctttggtctcttcttaatgctagctagttctcagtcacaaccgctagtgttatctagttccatattttgctgctgccatattcttaaattgagaccaccgagtgatcactcaaaagtgtcgcgattgctgattataagctagtaacttgcttctctacgtaactctgaagtacaccatgcatacatattctgactgagagtacgtatatctgctggaagaaagctctcgggataaagtcgatctttgtaccctctggtttcgctctctttcttcttaatacaatttgggcgacctccttcggccgtcccggcaaaaaaaaaaaaagaaagctctcgggatagttctttcaagttttctctttacctatggagttacattacttttgacttttcaacaatgagatcaaattcaagtgtgcataatctgagctggacaagtgcaaattatatagccccgtcaatccttgatcgaatataaaaaccatgcttgtcttccaagcctgcacgaaagcaacctgttcttgccgccgctcatgcatcctccagcttctttcagggtgctactcagttcctagtacaactaactgtaacggcataagaaactaccatgtactcagtccccctcaaaataaaataatttcaaagagttaggaaaaagatctctttcaatcacctaattggtggatatatttttagttttgaattgctgacatgcatttccctcaagcatttggttggctgaaaatatatggattctcgagcatgtaaatcaggagctagaaatgcttatatcgtggaacatattttaaatcctataattgcttatattttaggatgaagagagtagtatttttgctcttgtcttcacatcttacggcttctttggaacacatcattctcaaaatacgggtataaaataatgcaggcttgaagtgccgtaacacctcaaatactacaggtagaccatttggatggagcacagaaaatacgcatgaatcgtaagagaaatagatgcaaacgatctatctttttcccaagtggttagacttcatttaaaatttcctctaaaatccttatgttttgagccaatccaaagaatttcgtaggactttttgttagggttacatatgaaaaaatttcgtatgattgaagtcttataagaacactctcttgaaggaggccgtagattcttcttcttctagaggtagaattcatgggcgtgctgttgggatacgcgtaggctatgatagcataaatcaaaattttctatcgcgtaaaccaggaaccatgcaagtattagatcatagatcgttaccactagacgcgttgagcagcggaaaaagacgttgagaagtcgaaggaactctcgcgaagtagcgcgcgtcgatgtagatgaagtagtcgatcgcaccggctcgaccttctcctcctcgtgcgttctcctcgccgtactcccacgctgatcagcaccgcaaaccagcggtgcctctaccggtatccacacgtacagggacggatcgccacgtgcagatgtgctagcacccgcgcgcggctagggttttgctcggggagaacagtgacggctagggtttcttacgtgatgcaaatgcctccgccggtcacacctctcacgaatatataggatccatcactcgggcctccaaggcccgtaggactcctattcggatccctatccgaattaagctcatattggatctctatccaatccccttattccggcccattaaccgtgcgaccctgtaggttcatatatactc

SEQ ID NO: 7196 - DNA, 24350 bp, Oryza sativa
tgaggtattaaacctctcagcccttgcttggtcctcaaacatgttacgtagtcccgtgattatcgtatgagcatccaatgcctcatattgcctttgaagctcaggggacatagtagcaagcatcagacagcttatatcaaggtattcattgcatcgcctttcatgctccctacgttgagcggcaggagcattgttgggaaagtcagctggaaaaggctgtgtaagcacaaactttttgtgctcttacctgagaacaattcttaggttacgataccaatccatgaagtttgttctagtcaacttctctttctcaagaatagaccacaagttaaaattggatggtgcaggagctgccatgatctacaatagaaatatatgtatgcaaaatcagcatcatatttacatttaacctttgattaaacaatttaacaaaagatactcccactatgtattgtgaaacaaaattccctctagtaacatagtgagtcaagatcctcattttattattagtgtctagtgagctttggaatcacagctagacaactatcaaaataggtaagcaacgccttgctaatcacatcatatgtgactcttgtgctgttttggtgacatctccatgtccaacccaatctatgccccaaggtccaaaagtgacgggtagggtttcttacgtgatgcaaatgcctccgccggtcacacccctcacgaatatataggatccatcactcgggcctccaaggcccgtaggactcctattcggatccctatccgaattaagctcatattggatctctatccaatccccttattccggcccattaagcgtgcgaccctgtaggttcatatgtactcttgaaatatagaattagcatctgaaacttgtattggtgcctatcactgatccaaataattgccgctccatgcactgacatggagccgttgtagattcggtacatgtaccgattgctccaattcgacgcaaagatcgatatggagcacatagaaaaaaacgcataaatcacaagagacatagacacaaaagattcttttttcaagaggttagacttcatgttaaaattagtctaaaatccttgtgctttgagctaatgtaaaggaatttttaagattgctggatagaatgaactgcatatggaaaattttcatagacctgaaatcctcctaaattcatcgaagaaccatttgttccgaaagaacacttataattttcttcatgaggagatagaatactgtgcacagcagctagcacccaaggccagcccagagcatagtgcaccaccttgtgttataagtggttatgcaccccctagttataagtgtaaaatcaaaggtgtttttgattattattctatgatgaacaattggcattggagattattggttttgttatttggaatttattcacaaagtggttttggagatgattggatttacaggtgaatcgcaggttctattattttatgtgatcggtcagaccgggctctggtagccagtcagaccggcgtgtatcacgcggttagaccagtgcagcctacggtttgaccggccgacgctgtgtcggtttcggtttcgggttattagtttggatatccgtgattatttcatgattctggcttctagatggatactatacttatgtaatactgttgtttgctactaatgagtcaagttggagatagcttggtctcggaatatggtttctttgtttattccatgtgtaggtgactcgatgccttgggagagtatttgcggtgacggaccgggagtcggcttggggataagacgacgtccgtggtggtcagagatcatgtggaatacttaggctagagttgatgcacgtggttgatggagattccatatggcatacgatggaggtattgtgtgcgtatgggatgcggagtcaaatttagaaggagtccaaatttggtacgattggttatgtaaagtttctttcttgtactagagggtttcctaaggtgtttaggactcttagtatgagtttggttcgtggctttaggctgcctacctcatgtataaatagagggggagcatgaggcttcccggtatcgcttttgagagcaattgagttgagttttgagttagggtttcgagtttagtcgaaatttttgtaaggagtgctgattgtgcactttgtaaacacagagagagaatcaataaagtcgtcatccactttaagagttcttcgatttgtgtttaccgggtttcgacggtccaaccggcgatataccggcggtcagaccggcggcaagcggcggtcagaccggcggcaagcggcggtcagaccggcggcgacgacagcgaatagcagctgatctcggcggtcagatcggagatctaatcttggtcagaccgacggcaaccatgcgatcagatcggcaagacaacttcggtcagaccgcgatccgtcgaattcgagggtaacttttatttccgctaaaagtttttcagtttttgggtataccaaccattcacccccccctctagttgacttagttattgtgattcgatcctataataagtgcttataactggttcggaacccccctagtcctggttatgcaaccgggactacgaatctgggactaagatacatctttagtcacggtaaagatggcagcgccacgtgactggtactgccatctttagtcccgattgggaccaataaccgagactaaaggtccttttttcccttttttttgttaatttgcttgcaagttatcagataattaatcacaaattcattcacaacaccagcaaattatcagatcatcacaaactcattcacagaaacattaacaaatacattcacaacttagaaaaatttgcacatatacattcacagatcaacaacatccacaacatcgccactgctggccggcctcccatcccgctgcatctcctccggccggatctagcggaggagaggataaggtcgccggccactgccggctggcctcccctcccgctggacttggcggggaggccgcggccgccaccgcttccaccgccgggccgccgccgcttcccctgccgggccaccgcctggacactgcggttgcttccgtcgagacaacaagagagagagagagagagagatagagagagccagagagagcagagggagagatagagagagcagaggacagggagatcgaaagagatcgggagagaccgagaaagccagagagagagacaggatcgaggagatcaagaaaaaggcgtgggagattaaagaggtggggggatatttctagtgccgggttggtgatcccatccgggactaaaaatctctgggggggcttgccactgcttacaactattgaaccgggaataaaaatgacctttaggttaccaaccggaactaaggattaaaaaaaattggttgggctttttaaccgggataaaaaagatgtttagtgtcggttcctattcaaaccaggactaatgtggtttttggtcaacccagtaaagatagttcctccagtagtgctggctactctctcatctcacttatgctacctcacctcccttctgtttgcgttgtttgatatacgtttaacttgcagctggccttttaaaaccatgttagcctgagtattttctaattaatcaagaaacttcttagttggcttattcatggatggggtggtaactgctgataatatatacttgctcgacttaattatccattggcatctataatattgtgatgtcacttatggcattttgtgtaggattttgattttagggtgacatggagaagagagaggagggttttctatgtaaagtaaaactgcgctctttgtcattgatagttataaaatggcatatcaatttgggaccataggagttgatatggggtgtggtcctagtcttcacaacaaaggataactagctgcaaagagaccaaaataactagctgcaagcagccaaaatacgtagtgcaacctgccaaataaaactcgaagctaaccaccgtctttaaccagcaacctgaatcaaggattcgcccaaccactacaaagaactaaccaacacaaccaacaatcaatcgataaaaacctcaaaggcagtaggagcaacaattgggagccgataaagtggtcgcttctataatcccacaggaaaaccacaagagtaaaagaggtagagatcagtatctcaatttgttagcatatagctgaactaaaggtgttcattttttttattgtcaaaagtcttcgaaatgataaaacacaggggatatttatactaagaataaccatcctagatggggatgaaacaactaatgtaattcggtgaactgggctagctcaaaggcctcctacaatcattcccgaggaggttcacgtagccttttcagcttctgtgtagctatagtaaaatagtcattactccgtcatggtaagtaaaaacgatgagccgtttgttggaactgaaagtagactcgattatcttttcgagaatatataatatccatggggaaacataactttctggatcgcatatcgcttggagattgtaccatctgcgcataatcgttctgcacatctagcagcagccactagtacagaatatagctatggcaacacatggcagtagcacattctaaactgtgttgcagggaaataaaccagtaacacatgctttgtgttcttagcagatcccgtaacacatttttagtagggtgaataaatgtgctacaaggatacagacagtaacacaaacatgtgctacaaagcacctcgtaacacataatatatgagttgcacaaatatgttacatgtagatggtttatcaatcttacaataacacactatatgattatcaaaaatagtgttggctgtgattcttgttcaatattgatagattaataatttgatcgtgttggtaaagagtaaagcatggggataaagcaaaattatcgaaatatatatccttgaaatttcactaattttgtcctagatattgaaacaaaaaattggtactatttgtggaaaaaaacaaaaagatttgaaaaattataagagtagaaaaaaaatgtggagcaccttttctatttttatgtcacaaatgtcacaaaaattacaagttgacgtagagttctagaatatattctttatacagacaatattcaggttagttcctttctatgagttcaaatcatccaacttatttagtcattatataaatatgcatcatacaagttagaaatctcctgtaaccactcacattttgtaacaagaaaataaatttaccatcagacaatataattgctcatttctcaaagtccatgttcacagtctaggaatgcacagtccaaaagacttaaatagaactagaacaaagctacagcctacaggtaaagggggaataacatgaggcattgcaacagtacaagccttgcaaaatcacagctacaactaggtaaccaatagactgcttgacgtaggccttgccacatgtgaaaacttcatttgttctctactgacttggataactattaagtttttaccattctcttccagcatcttgtattgtttattcctttccatacctgtaggagcatgtgcatgacaacgcggttttaatttcctagagaaaaacattatggtcaattcagttgcatttaaaaaggataacaaagctatagagttcaattttagtgtcagctaaaattagattaaaaaaacagtctttactttccacacatacaactcaatgcattctagttgggttttgcagtatgtaaaaaagatagattggctttatgacatttggtgatgcataaatgtattaagatatttattaaaaccaaacacggcctatacgaaatctaatacttggagttctcactgcatgtatattgtgtcattcaaaatcttaatcaaatgaaaaaggctatggtacattgaaattaatgattctgataatccaggattggttgcttatatttgttcctccatatgaaacaagaagcatggcactgcagagagaaggtaccaatgagcataagtactataatataaaaatttcagaccacaacaggaaaacaaaagaaaaggagcaactgatagattttttttagtacatcttctatatataaatttgaatttagaaccaaaagattatcttgagcagacactacaaaattatcttgaactagtacactgaaaacatataagtaccttgaatggagctaacaaagtaccaaagtacctcagtgccaagtccattattagcatcaaccattgttccttcaacatcagctctaacccagtgttgattgtttgattgatcgaataactccccgaggtgtgaaacatgaaaaggctcagcttccatctcatctatccattcctctttgccagtatcatatatgtccatgggtttcattttccttactacagaccaccctgggttcattgggtcatccacataaaacacttgatcagcttggttaggaagaataaaaggctcatgctcaattttttctcctgtatgtataagatgtgagaagttgacaagtgtataatcatatttgtcctttttaattccttttccagaaataacatccacccattcacatttaaataagaccactgaaaattttccagagtagttcagctcaataatatctattatcctcccataatatgtaacatcacctaaaattggattagcgtcacttgctttagtgtagctagatttttttgcagttagcacaaccccactattttgtgtcactccatccaagcgtttaggcctaaatctgaaaccacgagtgttaaaagcacgatatcgtttggctgcatcaagtggaccacgggctagccatctaacatcttcgttgacaatgtgcaagccattcttccgctccagatccattatctgtacagtgagaactcatttaggtgatgacttgagtattatatataaataatctgaaattctgtacttacatgtgctctaaaccattcatggaatttctcattttgtacacgctcaatagtttttggattgacaccacgtcgaggatacgtacttgcaatctgatcagcatgagctctgcaaaatatttataatcaaccttcctatcataaaaaggataactaaacatgctttaaggtgcaggtcataccgcaagtacttattaacatctgaacaattgaacaacacatatcgatgtgcttgtactttagccataccccttataacatagttgctaggctttccaagtggttttccaacatgagaaaatattgatgatccttgtttcacaataggataactatctagctcatgtgtatcatcattcctcgaaggacggttatgcttagtctcaaaaccatcaagatatcgtgaacaaaaaaccatgcacttatctgccaaatatgcttcagccattgatcccttcggatgagctctattacgcacatatgacttcagcacaccaaggtacctacaggaagtcaggcaacacaaagaaaaaattgtgttaaatatgttgctgtaaaataaagaatacatcctaatatttgaaagagagaaatacctttcaacaaagtacatagtacgaaaacacgcaggaccacctaataatgccccagttgctaataaatgactaaccaaatgcaccataatagtgaaaaacccaggtggaaatatcatctccatatggcacaatgtcaatttaattctctcatctaacttcttaagctcatctatataatgtacttttgcatttagttctctgaaatacccacatagatcaaataagacagctgtaacattatcaggaagtacacctcgcaaagcaagaggaagaagttcttgcataagaatatggcaatcatgacttttaaggccagaaatttttccttgctcaacatttacacatcttgagatgtttcctgcatagccatctggaacctttatgtcatgaagtactttacaaaattgttgtttctcattttttggacatggtgtaagaagcaggaggcaagtaatacttgtcattagcacgtctttgtggatgcaactacgatctaatgttcatatcttgcagatctagtctagcttgtaaattgtcctttgatttgccctccaatcctaaaagtgtcccacatatattatcacatacattcttttcaatatgcatgatatcaaggttgtgacggagcaaattaatgtcccagtaaggcaaagaaaatagaccactaatacccttccatgtttttgacttttcaaaatctggaacttcttgtatcttctttagagttgaagttcgagaatatgcaagatgaaaatcctttccaggataagatggaccaggaattattagagaaagcattagagaagaagctttcatgcataaccatggcggcaaattataaggtattaagacaataggccaacaactataacttgaactcatcgttccaaatggattgaaaccatcactagccattccaaacctaatattatgagaatctgatgcaaactcgggaaactcagaatcaattgccttccaagcctctgaatcagctggatgacgcaatgccccatcctttacacgtccctcatcatgccatcttaatgctgcagctgtttctttgtgcatgaaaagcctcttaagccttggtttgattggaaagtatcgcaacaccttccttggtgctgccttctttctttccttcttagttaatttagttttatcctttttgtttttccatcttgaagctccacacttagaacaaaagtcatcattagccttgtctttccggtatagttggcaattatttggacaaacatgaattttctcataactaagcccaagttttccaattatcttcctagcctcggaaaatgttctaggtatattgctaccatttgggattgcttgttgcaaaattgctagcaaatcattcaatgatttattgctccacttgttaatggattttctatggaacaaaagcacaaggaatgaaagttttgaaagttcacatcccggccaaaaaggttggtcggcctctctaattaagtcaaagaaagcttgggtttcagggttgtcacgaccggaaataacccaacgggcgttccttacgtgcgtgtattatttcttgtcccaggaggcaaggtacaccaaaagttgatacaatatagagtttaataagcgaaagtgtaaataattaatttattacatgggcggcgaaggcccagcacacaggaagacaaacgaaaaacagcggaagactagggcgatgaccacaggcgcttgacggcaggcacgagctagacaccaaagccttcatcttccaggaactcctcttctgggtttgggaaaaattgagcaagactgagtacaaccaccgtactcaacaagacacacccacaagtgcagtataaatgcaagggagtacaagggacttataatatagggggttagggtttgcagtaaacagcattaaaagacacttagttgctcaaagctattttgtaaacacgatcctagagctattcaatattattaatcaaggccgtgaacccacacgaacctgccttaacccaaggcctacgatgattcagaccgaactggcaacccgaccctgggtcccagctcgtcccaagccaacccaggccaaccattccatattttagttgttaagcaggttttaagaattaaaacactaacttgggtacattgctaggcttgcccataaccgagggcgcggctattcgaatagattatactctgatcagaggtgtacatctttacccacaagacacatcttcctcacgtgtaaccacatgccacataccaccacggtatacggacggaggacgtgacatagtttccaacccatcctagccatagacaagagtaccgacccaaccccacctacggccggaacctccgggacaggtaggcaggactgagcccttagcagcaggacaccggccctgtgccatgacatctcgactaccgggccgcagctcgtgtagccttcatttgccctagagatgtccatcgacccccgacttcgtccatctccatccgtgtacttttgtttataaccagactgagccacaaactaagccttacccactagacatgtggaagtacggtagtgctttgcaacagaggcccgaagaccggtccttatatggccgaggtgctactatcaaaaccatgcaccccgagcccagcctaaaaccattttgaggattttgaatagagggggaggtgtgaatccaaatccacaataatccaaccgttccatagtgtccaggtgatgagaatattcccaaagtctagagttgtaaaaccacctaatgttgcctaattaaccagcgaagcatctacctaaatttatactagtggtaccatgaatagagtatccactagttgggggttttgtttattctagggtggacaaggtaataataacaataacaataataagatcataacaaaggtaaataggcatggctaaataaaacagtgataacgcgggaatttaaataaagcgataatgcaataatttaaatcaaaataattttataaactggaattcaatatgttcaaggatgatgtgacttgccttgctcgctttcccaaacgtcggcttcaacctccacgaagagcggatcttccgaagctgcagcgtctacacgactaacggaaaggaaaaaggcttttactctaataaactccatataacaagaaggaacaaagcacaaaaatgggttcttgacttcttaaggaaaaattagagacttgaacggtccaattccgagttcaaatggccaagttatggccatttgaagtttatatgctctttaaatgaatatttgcgaatttctttatttaaattttaatttaaaaattggtttactgcgtcagccgagggggaggggcgcgcggaccgggtccacgggagtggggcccacgcggcagcctcacggtccacggtggaccgggtgcacccgggctcacaccggctggcgccgtgggccccacgcgtcagccgcacccgagggcgcgggcggctgacggccgggccccacgcggcagccgctcgacgcgcccgaaggtggccacatcggcgtagccggcgggaggcggcgcgcccgcgcccctatggtcgccggcggcggccataggcacggcggagcggcggccgagagaggggagggaaagggggaaacgaggcggcggtccacggctcaccctaggtcgacggcgacgacgaaaaaggctgccgaagcggaggaaggcggcagcgcggctcgggtcgacggggtcggcggcgctccggcggtcggcgagctcgacgagggggtggacggggatggcggcggtgcggcgaagccggagaaggcgacgccggggcgggaaacggtcccggcgagcggggagagccggccgaaggtcgtcggcgatggaggagagagagggcgacggcgcgagctcgattccggcgaggagacggtgcggcgaggggcggaaacgggcgcgggaggtgcggggagggtttaaatagggttggaagggggagagggcggccgggagaggaaggaaaccggccgggaggtccggctgccatcaatggcgccggcgagatttgcaggagcaaatccgcccgtttgaatgcgagagagagaggggaaaatggggggaaagggagaggggatcacggggaatatttccccccactttattgcacgcggggacggcgggaggcgacgggattcgcggcggcggcggcgtttggcgcgggcgaggcaatgggagcggcgggagggaggagatgacaggtgggccccacccgtcagcgagggtggcgggcgggcccgcccgtcagcggcgcgcgcgcggggaggggccgaatgggccgcggggaagaggagagagggggagggaaatgggccggattcggcccaagagagggaaggggatttttagggtttttcttttttataaaacctttttaactttgtttatttcttaacaattattatttgtgctctaaaaattccactaaaatttatttacacattttaggcttttaggaaatatacaaaaatcctctaagccttatttggtcttttactttgcacattttaatttttggacgctttcacacggattttaattattctaggcataatttaaaggatatattttagggtcgttttgggacgtaacaagggtatggtcctgtttcaaaggaattttggcaagtagatgaattcattggatgtccattatccatatgcccaaaagcatctatgactaactggtgcatattagtttttgttttttcttgcaactgtgcctctctgttagcagagatgaatgctgcagtttcaccatgacagccccaaattgtatattcttttagcattccatcacaaactaaatgatcatacacttcattccgtttccgtaaccaccttagagcacatttgacacatgggcatcggattttctctccagaacttttcccattgtatgcaaaatcaagaaaaccatctacaccagtcaaatagtcatcacttggtctaggggaaagtagtaacttcttaatagtggctaaatcgacccattccctgtgtttaaaaaaatatagtacttattcaaatagggcaagcgtggtagaaaaaccaacaagtgcatccaaacacagatgaagaaccagtgttcttgttgactatcgaaatgcaagaatacatggggagggaaaccatacctggtggattggtgcttggatcctttagcccttgtctccataacaggaccagacaagctgcagggcagcaggcttgtctagaagctcaatccaacgggcttcagggaaatggtttacccaaagaaactaaggattcagagttggcgcctagcaaatgagatatgaatgaataaaaaatttaaagcataaaaaatcctttgtaaagtaattaagcaatgctattttcttctccattgcaatttgcaaatataccagtaaatcatatacaaatctcctcacaacctcatttgtcactatacaataaagaacagaatagagctcactcactggatgcaagcaagcctcatgccgcaagaagcaatgtggcaggcaatgagtcaagttggggcaacgagcaagctggtagcagctcttccttggctcctgcctactggtttgtccggccggcacacctgcacgcctgcacggccacgcgctgcgcgcccacgcttgcaggctgctgctgcgcagcccacttcccttggccgcctcgctccggtggtcacctgcgcagaggaccgacgaagaagagctaaactgccgttgatcttctgggttgggttgtggtgtccaccgaactaagataagacaagatttggggattttccttatacctagcaagcatatggtgtactggtaggtgggtggtgtgagaacagaggtgcttcagtgcttgtagcttttcagagatgcagtaatcgaggaggtaggagagttaagactgtttctttgttatctgtcctcagtcaaaaggacttggactgttggagggaaattttctctcccgtgagaactttttctttctctttcttgcccatacaagattaaataaaatttggaatacaaaataaaataaaatcgaaaattataaataaaaacaatataagggtttaagtaggaataaaatttaaaaactactgaaattcgaaattaaaaataagcaaatttgaaagaagagtcaatataaaaacccaatacgagattaattaaaatttaaaataaaaaataaatccaaaattagaaaataaaaaagaaagttcaagtagaaatacaattttgaaacaactgaaatttaaaataaaaataatgaatattaaaagagaccatataaaacacaatacaagattaattaaaatagatccgagaagaatgaatagataatttcgtatgggtgctaaccacacaattgagcgggccaccctactagtttagatgaaaatggataattttcagatggtaccggaaatggaaacgaatactaatataatcttttcagaaacaggaacaaatatggtaaggccattatccatcggaaataggaaatggttggaaactatccggagttctttttatggatatccgcaaatagtaactaattttctttatatgcataaccttttcatatcaagtgggatgaagacaagcttgtgttaaccgtgaaatttggtatattccattaagtaattaaggaaaacgtagagcaaagtcgacagcgtgaatttagggtctaagattgtatcagctgaggctgatgggtctatatcggatggaatgcatcggctgcgagatgatagagttagacgacgagggatggatgatggctgaaagctcactctttgtcggacttggttctggaaaagatagtggtgaatgttgaaaggagactgagtttgaagaaagtacggcaatgctatttatcgattaattttaggataagtttattattttccttttatgttttaggaaagtttatctcatgcgcgaggggatagctcccatctcaagtagccgaacacaatgtaagtcaaccatggtcagagaaacaggaaacgggatgagttggacggaaagggttcttacaggaacagagggaagatttggggtgctaataaagtaaattaggaactttcagaattataaaacaaaaaaagagaactttcgatgccatagaaccaattttgtgaatataaaaccccctcaaattgagcttcctaaatatagaacttcgaatagtttccaaccatttttgatttccgctggacaatggtcttaccgtattcgtttccatttccaaaaacaattacaaaattaattttcatatccgctactgttagaaaattatctatccgagactatctatttccgaaaatgtgtccgaatatcggaaaatatatgaatcatttttatctctaataatggctactaaaacaggccaagtctaaagttcgatgcaccaatcatcgccacgcactcgcgcggttgccttgagctacttgttttatataggaccaccgatttattttactaattcaaaaatttaaaatttatagtacgcattcaataaaacaacaatttgtaatataatacatcggtatgaaaactaaagtaaattatccacataagtctaaaaaataagaaaaaagaaaaaataatattaatatgtaccttaaactgaagaaaacaatattaatatgctacatggttggttcttgtttagataagcattatattgtagtgagtacttagagtgctgtagtaatttttagggatcaaatttaaaattttaaaaagtctaaaatgtttgaacatgccatttcaaaaatctccagaacttgaatttttgcacacaaatctccctctcaaaatacttcccgctaacgtgaaaccttagcttccctccaaaaatcccaagcaattagtgtgtcccttcaacttcccatgcaccataaataattgctgcctcttcgtatccttaacccaatcgttctcacatttcctcattccccgtcctcccacctgaacaaactcccccatctccatcaagagcactgcacacagcatggcttctcctgtcctccagaactatgcgtctcctgcacatgccctgtagcttcaccatgaagacatgttgctaggctgcttgtgacttcctgagacaatatgtaagtgtttttttcttctcttgctcggttatttgtaaattattctgaggatttgagggactatagggttctaaggatataaatcacagggtagtccgatcacttatcattttcctctccatattctgtgactatttatgggctttgcatgaaaagcactaattactataacttcattttgtagcatattttccagaaacattgcaccaatttccaggtgaaatggcaagaacgaaaaggttgaatgtagtaaaaatcagtgccaaatacaagagtggagatggcaatatcagtgaacataacccattgcatgagtcacaagcactagaagatgatgagatcgaactagagcagcaagatgatgactccttgaatatgtcaggtacgaatacaatgaagaaagctaaaactagtaggaccaactaaatgtttatattgaaaaactgggcttagccactactgttcttgtttaattttacaggtgagagtgccaaagaagacaaacgtggaaggacaactttaacacatatttggaaccttccagaaggcaatcacatagtagtgaagtgcaacaagcttggacagcccattggagcagaaggtggactgttaggaaaatttttaggcacagtggcaagaaatgggtcttactgtccatttgacttgaaggattggagattggtcaaaaagaatggtggagctgaaacaatacttcaacttgtggaggtatgtgtgactgagcaaaaatctaggcatattgctctgaattttaaatttactgctctgccttttatctctttcccacatgaatataatttacataaagcagtcataacataaaaaacataacatatttatttacttagtatatcttactgattttagacaaagttcttgtaccctcaatcgtgcaagcaatggatattgaagtcaacagggagagattggaggcgattcaaggcatcactaaagacagcttattttcagcctaaaaagaaaagatctgctttgtataagttgtgtccagaagatatcgattatgatcaatgggttgaacttgtcaaattttggaagtcaaaaaagggaaaggtgatacaactgcacattatttcgcttacaatttaatactctgccaatctaaattaatgatgtatgatatggtctcattaatagtgcactgtgtttataataggccctttgtgagaaaaataaaagcagtcgtgccatgatgaagacaacacataccgcagggacaaagagctacgctcgttgggctaaggacatggtgagtaatcttgttttattcaatgttgtcctatataagtcactcatataactggtgtatgttctattattttcagagacaagatgatcctcaaaagaagcagccgcatagagccatggtttacttagcaacccacaagaaaagggccgaagatagaaatgaacacctggtatgctatacacataatatgctactacaattaaaaacaaattattatttgatctgatccaatttttctaaactgttaggctgagttggaaagcctcatggatgaacaacctgagctggatgaagatgatcaaggaagagttgcatggaaaggtgatgccttacatcaagttttaggtgaagagaaacctggacaagtgcatggtatgggactacttccagttcccaaccatgtttatggccaaacatcacaccatctcaggaacattaatatcactaccgtagagggtacaccacatgaagtagcgatacatattattgatgatgtggagaagttaaaggagcatgcacagaagcaagatcagcttattcaacaactgcttaaagaaaagactgataggaaaaacaaacaggaaaaggtgtccttgaaaaaaaaaaagctaagaaaggtacaaattttatctgaaccttcatacaaaaattagttctaaattgatatctttttcaggtcaatcgactaaaaggatatcatagcaactctcagctacaagcagtacattctaaaagaaaggtaattgttatagcttccaaccaataatgttattttggttgtattattcttacctttgtttaaatttagagagtccaatgcgacgcagctgatcgagaagacctcctgagtcagcaaagatatccattcaaggtaatatttgttactaaattgattcttgccccataattcatagtactcatatgtacgcacgtgcggaaacacaaccattaactctaattaaaaaatattgtgtctacatttaactaaagaatcatcaaattctgatcgactaacaggacatatatgaggacgatgacttgtcattctctactgaaaaggttagcaaagggcactacaattattttatagcaacaaaaagactataacaatatgataaatgatttttatgacaattctagtatcataatgatgcaaaccaggaagaaccccattatcaagaagcaccaccatcaccatggtccgctcattcctttcgacaagaagaggtaaatgttttcagatatagtgtgatatatatgcgtcaaataaaatattttgttgtcactctctagaagtaaggatacgacatgatgaaaccctagcaattgtcttggaactagttaattgccttattttgtctagggtgtttcagattaagcatttaaatacctgaaaaaatataacaaagctgcaggcattgtaatttaatagatctatttgttcaataattttctactgtatcacttcaataaattatataatggttagtttatagtattttatctattttgaatacaagcttacttttctatatttgtctaccattacgagtttagctacatcataatgtacacaaaatttgttcctatttatgaactaatctctatgtatataaactccccaattttatttccagtatgaacaaaataaactatcttgaagatagccaaatgatggcatcataggtacatatttttgtagatataaaaaaaataccatactgtgacttttttgagtatccatactgataccatgtgacaaatactatttatttcactgtagatggctaaagaagggcagaaaatgttcgtaaagagcacggacaatgcacatgatcaagtgattcaaagccgtgtgcgttcaaagaagacgcgcccttcaccaatggaggtaataacactgtgttccttttgcattactgtgtgtgttaaatgttaaatataggttgttgactaaatgttaaatataggttggttccacagtattactcatgacagcaaaatatccaaataaagaaggcgtggcatatgctaatttgttgagctgcaacccatattcacatgtaggtggtgttgagataggcaaccatttttggaaagtacgaatcaaccatcctattcgtaaaaatgaggagcttgtaagaccattggatcattgcaagacaattaatgatgcccatgccaaaggagtggtgattgcgtggccttcaatatgtgtatgttagttgtttctaccttggttcatgtaacttaatgttttgctgtacattctagcttaacaaccaaagtaatgtttgctacgtgcaggtttggaagattaatggttgatttcgcttccatctcaccctatggattgataaaccggcaaagactttcaagaagaagaagaagaagacgaatagattatcattttgttatattttagtatgaaagactgttattctgaagacttgcttttctcaaatggattatcatttatgttttgtaatgatgggaaggatgttttaactattttgttatgcaatgcaatctttattttcactaaatgtgatgtgagtattttgtgagatatgtggtgcttttgaaagaaaataataatgtcaattaaattttgttcctttaacctgatcgtgtgtgtgtgtgaatatgtatatactaaagtttgttcccacaaaatgtattggaataaggaaacatgttgctaatcatattacatttatgttactacaactcaaattatgtattcctggggtactatgcagtatcacataatatgtgttcttataggtgatatttgtgtgttacaaggtagcaacacattcttagttatatagtaatacatgttatatgttgcaacgtattgtaccagtaacatggcctacaagaacacttatagattgtgttactgggaacgcttgtaacacctatactgatatgtagtaacacatgtacgtgttgccaaagccccttcctgctgtagtgagcaggccacaggagcgtcagatccgatagtggcgatcctcaggagtacctcagtaggtctgcagctatgggtctgtcagtggtggggcttggtgccgcagtgagtcctttggctaggcgaccgtgatgacgaccacaacaatggcgtggggtcgctatcggcaggtcagggcagttttaggcaaaattttgtggtgaatataggtgaaattttggggattttttttgtgtgaattgctgtgtgaagtacaagaattttggggattttgaatgtgaatttgaatttagggacttttttttttgctgaaaatgcatcctatagacgagcttcataatatgcctgcatgtggaaatgcatctccactgacaggtgtcctagtacgctctcgcctgtgattttgattttcaccgccggctgtttccacgccttaaaaattactccctctgtcctaaaataagtgcagttttgcattattcacaacgtttgaccgttcgtcttatttaaaaatttatatgattagtatttttattgctattagatgataaaacatgaatagtactttatatgtgactaaatatttttaaatttttcgcaaattttttaaataagacggatggtcaaatgttgggcacggatatccacggctgcacttattttgagacggaggtagtaacgatttctaagagtcgtttggttataggcagtgctcagatccttctgcgaaaactccatttgactgtctagaaaattgttttttatgggtggtgtttgaatcttctaaaagatgaagataaagattaagtggttcacgtaaaatgatgtggtaataacatatgattaattgagttttagttattataaacttgaaaaatggattaatctcatattttagaacaactttcatatagaaagtttttatatgaaatgcaccatttaataatttgaagagtgtgctatgagtatccaaattttcatccacttgttaaagaagaaacaaaggggaccatagtcttgtatctactgctgatcctgaccctctactgcgcgtgccaattctacttacaatttcaacgggacaaggaactactccctccgttttgaaatgtttgacactgttgactttttagcacatgtttgaccgttcgtcttattcaagaacttttgtgaaatatgtaaaattatatgcctacataaaaatatatttaacaatgaatcaaataatatgaaaagaattaataattactttaaattttttaaataagacgaacggtcaaacatgtgcttaaaaagtcaacggcgtcaaacatttcaaaacgagggagtaattaacgaaactcgtcttcccatcaccgaggttatagctgggtagcataattcccgcagaaaaactatagaacggtgtcccgtcggagggacaatgtagttaatcacgttcatccatcattacacctgacgcgtggtgcgccgagctgagaagatcgcacgacgcgtgcgtacctgtctagcgaaggggagagcaacgtcgccaaatgtgcttgtgccaacctcaaagctaactagagggcagcagtgtgcaggctagtgtcctagctactattctttctaagtatcacctgcaaaatagttgcaaccatcccagaccaactcttctcctattatcttcttctcgactttcattgcttgtagatattattcatatgtatctatatgatatatatctcgccctttttttggtttttcttcaatttgttttgcgaatttggtcaaattttattaaaatttaatcaaaatttgttaaaattctaaataatttcgtgcaaaaagttccaaaagtcttgaaattgctgaaatttagatttttttctacaagtgttaaccctggatacgcctacaatatgtattatacagattaaatatagacgatacccatgaaacctatatggtactatgatatctcgtggtacctccaaatatcatgggtaccagtaccatggtaccttgtgataatctatgttacccagatacggggatacggacacggatacacgacacggcgatacgacattttccaaaaattaaggatatggggatacgctaatatatataaaaaaaataaaaatacagaaaagtagtaaattgaacagggtaaaaatagattgtgaataagtgctagaccacaaatagtgcatagaccacaaattaatagttcaacggtatatccaaacatcgcaatgaccatataagttcacaaataacaagttcacatccagcccacagggcacaggcacatagctagtttataaataacaagttcacagccacaaatagaataattaggatagaccgatagacttgttcaagactataagttcaattcaataaacgaacgggaaaacagatcggcggtgacagtgctgtgccgacgtcagagtaggaggcggcgaggcacagcccagtgcgcggcgccggtgcagctcggcggcggcgacggttgacgaggcagcccggcagcagcgacggcactggagcgcgtgaggggcgttggtggtgacagtgttgggccagcgtcggaggtggagagcagtgtggcggcgccggcacagcccgtcggcggcaatggctgatggggcggcggcggcgctggagcgttgggaaagagaggcgagagtgagagttgagaggcggcgcaggctgggtggatatgatgccccccacacgcacgcgggttttgataccgacgaaatattagggttaaacgaatcgggaccgtatcggaacgtctcataaatgtatcatgaattactttatttattttaaaatcaggataaataccgatacgtcccggacacgtatccggccgtgtccgatacgtgtccgtatccgatcccgtgtcggacacagacacgcgcctgctttgccgtatcagtgcttcataggtgataattccttgaatgtaccatagtgcttacacaacgggataccgttgcaacgggatattttaagtgactgtcccttttccttttctttgtccccgtgtgctccctggtacctgatacctggtatgtccacttgtactctctggtacctgatacccggtttgtcacgccccgaactagtcccgaccggaactagcccgtgacgctccaaattaacctgttaatcgataccagtcccaggaaacagtgctggtatcacagggagacagaatatcacagcaacaaaggtctctttattatagagtagatgtacagtcatgttgggctgcggacagatcccgagctcacaactgcattacaaaaggaaagcggaagccaggacttggaccaatcaacacaggcgcgacttgggaactaggccgaaaccctaaaactcatcgtagccggcttgctcctggaagaactcctcatcagcaggatccgcttcatcttcttcagcaactgggggggaattatttatatagagcaagggtgagtacgggagtactcagcaagccatgggaaataagtgtttaatgcaggcttcaaggaaaggctggtgtttttgcaattaattttatttgaactcttttctgaaacaactaagtgagtgcttctcaaacgacacggatgagacagtgcgtctcgtccggtcggagtatgtgcaatgtatcagtctttagaatttaaacaaggttggcacccggccaacagctttttcaacggccacccaggccaacaacttttcaaacggccacccgggcctacaacttttcaaacggccacccgggcctagctgatcccatcagctgcagatttttcaaacaccgaaccccttttcacacagcaatttcacaagcagtagtcaaaccaaactacgctaggaatcacctcacatccgcccatgaccgtgggcacgactgttcgaacagtttgttaacctctgcagagggggtacactttaccacacgacattactaacccggatcacccagcccgtggggatcagccacgtcgggagacctccaagctttcatgacaaggcatttccaaagccgacacaggtttaccatatgccgacgagaggggtcccagaccaacaacaggttaggtcccagaccatactgtgccaggaagcccaggggtcctccccgacaccaccccggcgaatccacatgtctctcggcatcaaggctcccctgataagctagttactcagccaggggtgtcccattccacccatgtggtcgtacttgtcttatgtttggatgaaattccaaggacccggtccttaagtgcgagagcgggaaaacgtacactgatgagctactg

SEQ ID NO: 7197 - DNA, 6590 bp, Oryza sativa
  unsure (1)..(6590): unsure at all n locations
cagctctctccacccgatatgacttttcgggtgaaaacctagtccaaggtggatagcctccatggaggcaccgcctcgaaggtcatgttccctcgcattcattgccttcttcctagtttggccttctgcgttcggttagtttcgtctctaggttggtgtaagaatgagcagatctttccccctctctctctctctcatcctcatcctcaaacctcctgtgagggtggccgggagtctgtcgtcgacattcttggtgaaattggtttgaagcgagagcgtctgcgacctccttgtagggctagcaattatcggtcacgtacaacgggtgtgtgtttggagcctgtagcatgtggtggagtagtcttttttttttccctaattatgaccttcttctgttgtaattctatacataatttttttcatgctatatcaatatgaatcttcttgtgttgtcttgtgcgggtcattcagaaaaaaacactattagtaagtgggaaactagaggccgaccggaggtttctttctatcgttgggagcctctctgccttccgacctccatcgaattgggtgcagaccagcagcagccaataattaaggtcgtcggccgtatatatgatgatggagaatagcagggagcagcagccggagtcgtcgccggcgaacaacaatagcaagaagaagaagaagaagaagacggcgtcgcggttccggcgtgtgtgcgtgttctgcggcagcagccccgggaagaaggcgtcgtaccaggtggccgccgtgcagctggggcagcagctggtggagcgcggcatcgacctggtgtacggcggcggcagcgttgggctgatggggctggtgtcccgcgccgtccacggaggcggcgggcacgtggtgggcgtggtgcccaatggcgtgctgccacgcgagctgatcggcgagacgctgggggaggtgagggcggtgggaagcatgcaccagcggaaggcggagatggcgcgggagtcggacgccttcatcgccctccccggcggctacggcacgctggaggagctcctcgaggtcatcacctgggctcagctccgcatccaccacaagcccgtcggcctcctcaacgtcgacggctactacgactccctgctcgccttcatcgacaaggccgtccacgaaggcttcgtctcgccgcccgcccgccgcatcatcgtcgccgcacccaccgcctccgacctgctctgcaagctcgaggaatacgtgccgccgccgcacgacgccaccgcctctgagagcttcaccttgggagatgnntnccaccggtatctggagcagcacgccggaagcatctactcccccaagcccgacatggcacgctagctagctagctagctactcgatccacttcattattacttatcttgtttcttctcatataatcttgctgctaattatttcttccatatattaattccctatatatatgtatatatactcgatcgtactatattgtatacatcatcaattacttgtaacttcaattaatcctagctacatcgaagaggcaggcggccctagttagttttcctgtactagaagctagttaattttcctctatggagtgttattatgagttgattgagttgggagtattaatttgttctctcatcatttactagtacacacgttgttttgttgtcatcgatctctattactcgtagaaagggtaaggacctagactaggtactagaggaagcagaccgatccaactatccaagggaggaagccctgtgattgggaagcagcaattcttttcttcttcttcttcttcttcttcttcttcttcttcttcttcttcttcttttaaaggaaaactgcaaaattaaaatagagcaatctaatactcgtttagggcaccacctcatgactaatcaagtactaggtttctgctttctccgctttaagatatattaacctagtactgaattatacaaaatctagtatcacgaatagtccaaataacctgttactaaaaatatgaatagcctggtaataagttgtgtctaatctaatactatgttgttatattttgggtcagaggatgaagagagtacttactaatactatgttgttatattttgagtaggattatacttactaatactacttttgtgtgcatacatagcaaattagcaatcaatcaacttccttcccgtgtcctctttgcaacacgacaggtcctccatcgatctcacacgtggagagatagagagagagagaggcgcaattggagtatatcggcaacttttaccaacaaggacggaaggaaggaaggaaggaagaggaggtgagacaccaaccgatcgatcgatcgaccgaccaaacgaggtgaggtcgacaaacaaagaaaagccagccgtagtgacaacactagctagtcatcgtcgtcttgtccatcgagtaacaaacaaacaacactggcattctggcaagtggcaacagcatttctcttctcttctcctctcctgtggactactagctagctaggagatgtttttccagtgagtttcccctgaattctgatcaagaccgaaaatgacaattaattaattggagtaaaatcgatgcatgtggactactctctctctctctctctctctctctctctcactcactcagagtctcagtctccttccaggaagccctctcctctcatctcctctttctggaccaaaaatgagaggacctcatctcttcacacaagagaagagccccatgctactgctagtggatggataggaatatagacagggaccatgcatgctatctttctgtttggctgtccatgtaaactaaatgttggataagaattgtctggacatgtttggactgtccagataatagccagtaattaatatagggaggtaaagtcaattgctgttgagttcaatttggaattcaggcatatgtataataatcctcctaaaataaaaactagactagtatccctttctacctaatcatcttgactagctccgtcgtttatctcataattcaattcaattctgtgtgcatacatatttatcccatgatgcaacgtgactagtcacaagtatactagtagtagacagaaacaggcgcctacacaccaagtgaaaatcttttaactatttggcagctgctttccatacgtccaagtcagatgatcaataataggcaacagacatgcatgagtgataatatatttgttcagaatgaccttaaggcctctaattaccttaaattggagtatttgatttgcctatttttgtttctacaggctatcttaattaggtgttgatatttcagtagctaccctattatcatatcatatgtacctggctacgacttgcgtcctgcagcaatcatgcatatgcatcctcatgaattaatcggcatcacatattgctcaactgaccactagaaaattaagcaatgcatactcattgttacatgtaggaatgcgattaatttgttgaatccgcggagtagcttgacgctaacttagctagctcaagctctctagatagcgaggaagcaaaagcagctgcccaattcgattttgcggcccatgcgcgcgtccttttccttgtcgggtaataatctctcaatttgtcgcggtagtgcttaatttcccagagttgaccatccgacacagcagaatggggaaagcatggcccattcaccacctgcctaaacaagctagtacatatcatactcaaaaccatacctttctttcacacatgaaaaaaaaaacacctttcagctggttgtgcttctaatgagctacgaactgatcaatacatcctcgctctaacatataagttggcagaagcgttctaacctcgttagaggccgctgtacgtgttaatatatgtttgggaaaagcccccaaagtggcgcatacaatggtgaagattggttacaaaacagaaaacaaaatctcttcctatcttatcatctcatgcgttgttatctcacgtaacaactctatgtaacaaacctctatctctaacataacacactgcgtcgtaaaacaaaagtcgcagtagctggcatcaaataacatgacacgttttcacacatttcatacaaagtgagaaacttctccaacttcccgtttgcagtgcactgttcaggaggaagaggaaaaccgcatcaaaaatctatataaccatcatccaaacgaaaaatctccatactccactagcaactaacacatagtgcttgttttgggttccttccgacaagttgtagcctctttcaaaatcaaaagttccttcaaacagtcaaaacttttcactcagattctaagtaactgtaattatagaatccagaaaatgaactagaagccgaaaaagctaggtttctcagcttcttccggttctcacggactacttttccagttctcacggactacttatcagaatttaaaactcccccaaacaagcccctatacacacttattggagcccaaacgctcctgaagaatcaggcttgaatatgaaaacataaatcaaatcgtaattcgttcagaacttgcgttaatatagaaaaaaaagtgacgccaaagattcgctccatgcatgtgggtaatacacgcgggcgatccgactttgatacagactcgacaaatcacgagcgtcaaaagaaaaccaaacagcacatatgcgggcaatgtaaaaagaacatatttcacaaaatagtacactacgaatataagtttctatcctgaatcttgtccacaatacagaatgcggccgatctataaactaaactaaaaatcatgatacaatgttgtaccgtgatcatactatatgatggccccgcacacgcagcaatgttagcaaaatacaggagcacaagagctgctgtcatcacattaacctgacagctcatactgcaaaccaatggcagtccaaaacagctcttgcgacaaaattgagttggcctttcctattgactagcagaaatctcgcaatcagcaccaagtggaggtaaccgaaaataaaattacagcaggcaccttctttcaccaccctggaagagaacttgggcaatggggtgttgagggctccagaggtttggaggccaaagcaagaaatggaactggattagcaaggctgaatcacagaattatgaatcaaccatctcatcttgtaattcgcttggggcaataagccctggaatggcaagcattcgttgacgctccctctctctttgtgcagcagcctcttcagcatacaaatccttattatcctaaccaaacgaacatgaaacaactcatcagatgagttcaacagcaagtaacatgaaaacaaataaaaaatgggcacttgtgcattgtaaaggccctaacattaacgctaaacttggcacatgattccatatctatcgttttctcaagtaggcaccatactaccacgtggcaacatccactctctggtaattagcaactgttggtttctgataaactatgttcttactatttctggtatagtgaagtattggttcctctaattcctttgaattgtgaaaaatcaggtccatgccagtgtcaaggggtaggagcaaattacctgagccgagaactcctttgattgcaccaggaaatccctaatatggtttttgaagcttggaaggtcatgttttgaactaagaagcccatcaacaaattttgtaacctgtgcgggaaaagttgttaggtctatgatggccacagaagcacaggatagctgcaaaagaaggatcatacctcagtaggtgtcatgttgggaaatgatgaacctaaaagttttattgtgtaatctcggacaaacatagcgttgtcagtatattggtatggtactgaggatgcatcccagagaggctccgtcagaccatcaacctacaaattaggaaaattaataattaagtgtatccatacaaacaaaagagaacagataaaaatgaatattgacataccacacaaaataagtgctgcagcaccaaaacatgaagcttgaaaccaggcttgtggaatgtgtctgtcagaactgcaaagatctcttgttcaatattcaaaaaataagttttgtagaattgattttggaatcctgaggcctgcaagtgaatcatgtaaaaaaaacataagcaaacagaatattatgcaatggtagcaaattgtggattgtattttctacctgaaagttctttaaaatttccagcaatagactgagaccagtctctgcgatgtttctctctgtatgtctaaatgcccagttgatagagtcaatcacaagtttcaattgctgaataagataacaatccaataatcagataaaacagaagaatagaagataatatgttgatgtatctgaactcaatagtaaatttaaatcaacaaggaagaatgatgttttaaatagttggtactaacctgacttgaaagctgaattaatgcttggaagcaatgggtgccaatcgcacgaagcaaagagaaaaatttgaggcgatgctccgggtaatcttcaaagtttttagtgatcatctgacaggacagaacaaattattaatccaatctaaaaata

SEQ ID NO: 7198 - DNA, 12845 bp, Oryza sativa
ttaatcggagaaaaagaaaagacagagtccatatagaaatacaatttaaaaatagctgaaattcggaattaaaaaataaggaatattagaagaggagactagagtccatatagaaatacaatttagaaatagttgaaattcagaattaaaaaaaggaatattagaagaggagactagagtccgtctatatagaaatacaattaggaaataactgaaattcggaatgaaaaaaaggaatattagaagaggagactagagtccatatagaaatacaattaggaaataactgaaattcagaattaaaaaaaaagaaatatgagaagtagagtatagagttcatatagaaatacaattaggaaataactgaaattcggaattaaaaataaggaatattagaagtagagtatagagtacatatagaaatacaattaggaaataatataaattcggaattaaaaataaggaatattagaagtaaagtatagagtatatatagaaatacaatttagaaaaaaaaatagaaattcggaattaaaaaaataaggaatattagaggtagagtatagagtccatataggaatttaaaactaactaaaatttggaataaacataataaaattaaaagtagagtttagagtctgtataaaaatacaatttacaaataactaaaattcaaaattaagaaaaacattggaagaagaatttaaggtcaatataggaatacaaatattggaatataatttagaagcaactgaaattcgaaattaaaaattaaagaatattgaaagatgagtttagagtccacatagaaatacaattagaaataataaaaattcataaataaaaatgaattaaaaaaagaaatattaaaagacgagtctagagtccatataggaatatatataatttacaaataactaaaatttgatattaaaaataattaataactaacacgtatataaaatataatataaatattacacattagtagttttgtaaagttattgcaaaatttaaaattatgttgtcattttaatatatttgaataatataatgagaaaacatatatgctattatatgagagaaaatataatgatgctagccgcgcaatctgcgcgggccactatgcttgttttcctaattggaagagattaaatgaagagagagagagcaaagctatctactaacatggagatagtctatagagaaaaaagaggcaatggattagagagctatagatacccatgtagacataccattgaaatggtttactattaatctagtctattgttgaggtgtacatgttttatagatagcaccttactttaccattgcgggtgctctaagagcatgtacaataagctgactcagcatgctccaaaacattttatattatctaaatcctacgtggaagaaagagaattgaagagagaaggaagcgagcgaccattctgtcgccagcgctagctgcatgtgcctgcgcgcttccgaataaaaaatacgctttgcggaccccacaaccaaaccgtctgatcccctgtatgttcccatcttcatgcctgctttttctcttccgctccgtcgaatgctaggcgaaatctccgccgcgccaccaaactgcgtcgctcacctcatctgtgttatttttaaaccgcaccaacccaaagcttcccctttcttacatgattcgatcaacccccgtgttcgccgcccttatggacacgagcgttcctttctaacctgacctcaattgtcaacgcccgataaaaccgtgaatcgatttatactgtaagtgctaaccactagcagagcttcaagattttataactaggccgacaagtatttgtgtcgagaattatattttcaggttatataaaagggcattatagttcgtcgtgtcgttacataataatggcataatataaggtgtgtattagatgtaatatataccaagtagataacggatctagtaccaaatgtactaggttgtaacatctccgcccagggcttaataggattgataggatactcatatcaacaatttgtaacttctttttcagaagccgatctcgaaagaacataggttaagcgtgcttggttgcagaaaagacttgtgttggtctgtgagggcagtctatggcctatgaaagttgccagatgtaagcgggcccaggccggtctgcgagaggcgggacgttgcacaggcctcaggtgttgggtacataaactctccgtccctaaatatttgacgccattaacttttttaaacatgttggaccattcgtcttttttaaaaaatttaagtaattattaattatattcctatcatttgattcattgttaaatatatacttttatgtatacatatagttttacatatttcaaaagagtttttaataagacgaacgatcaaacatgtttaaaaaattcaacggtgttaaatatttagggatggagggagtatttaccaactattacaaacaacagatccacgattagaaaaggaggtgcatgcgcatgcaatatattgcatatgcactcggtgtgaaatggcctacgtgcatcagtaatgatgcagctaatgtccgatcaatcgtactaaaagaacatcaaacactcgatggatgcctgccatgcaacctaggcatattcatcaatggcaagtgcaagtgcaaagctagctgctgccgctgccgctgcacacgctccactcaaaacaaatcatagcgtgatgcagaggcctatctactgtgcgcacacgagtaattataagtgctcggattactgtctctctctccgaccatgcatgctgttcctcaatagccgctccatctcctcattagaaaatctctttttttttaatatatactactaccatttcatattgggttattgtattttatattatagacaacttgtctattatttcctccgtcctataaaaaaccaacctagtatcagatatagaccacgaatctagttatatatctatccagatttgtagtactatgatgtgtctcattcggtactatattcgtttttcatgaggcggatgggagtatctcataaaatatacgcgcaccaagataacattaatttgaatattcttctttatctggtggatatataggcctaatgggaaaaccgccaccgcccgcctaaattgttgccaaccccttcggcttggccacatgtttctgaccctctgccccgaaacggtcttacctaataattttatactataagctttttaatatagaatcattctatataaaattatttaaatccaatcagtattagagcaggtacaatagcaagctataagccagctgcaaacatattttaaggagataaataaggagagagaagagcagcgggctacagatttatagccagctgtagcatggactcaaagacacagtgtttgtatgacaggtgggaccaggtattaatagtgtagtatgtaactattgtatgaatgagctattagattggctatggatgaattgaatctataaaatcgaactttcagtgcattaacttacaagaagatcgaggaaattaatgatgtggcggaaaaagaaaaacacgagcattcgtgattcgtgtgtggcccggacaggcgaacattccggcactagcccttaatttcgatcttgtggttaaagtttgttatggagatcgtgttgacacttgacagagtggcctaattggtttcttatgctgcagtgagagcgttaacattgatgtatggctgacacatagcacctgatcattaagcaatggtgggcccttcattacagataaaacgccccctaatttctgcattgaaatgaagtgaaattgactaggtactagagtatatgatccatcatcataatagccatgcacctgtgttttgagtgtgtgtaataataacatctatggcactgccactaatacttgttcaattcatagctaatctgtagaggtttttcaagtctgaactgagattactttggagcacttacaaaactagagaatcaatcgatgctctcttttttttaatcaaggatgtttatacaaaggccaacactagaaacaacaacgttaatatagatagacaaaatgcaaattattgatggagctggatataattcagagcagaggattcttgtgcagcgagacaggggtaatccctagcgataacttatatagaaatttgatggataaagaaatatagtagtacatacatacagtctacagaagaagagaagagataagaaaagaaatgaaaagaaaaagaagaaagtagaaaagcagagtccgtggagcagagagaagagcaggacagagttaatagttatcacgcggtaaattaattaagagcgggacagagttaagagcgggacacgcggtaaattaattaagattatgataattttgaataggacgaatgggcttgcgttgcatcgctggcgaatggcgatggccggccacgcttgcagctcgagtaaccttagctatcactctgctagctactcctacgccggctcctccttccgtcgcatagtataacaatttgatattgaatgaaatattttacagtacaataaatcttaacacttttttacccagatttattgtacggtaaaattttttatttaattgtataagttgctatattataggacggaggaaatagtacagcagtgagtagctaggagtacaaacttaattactagattaagtagcgataaatgaatatccaggtccagttccaggggaggggacgacgcgcactcctttctccagctgcgcgcgcgcatgcgctgtgctttaactctctcacaagacaacctaacctaaagcaagctaagctagctcctacagggagtatatagcacgccggccttgcacttgcacctcacctcgcctcccttgtatatatacactcactagtacactagtagccggccggccggcgagcgagagaggtcgagtcgagagagatcgatcgagcgagagctacctagctagctaggctataggcctgcacacacatacagctagctagctagcgcgctcgagacgatgctggcctgcatcgcctgcgtcaagcaggaagatggcggccgccgccaggacacgccgcgcgccggcgccggcgccggggacgacacgcccacctgcagggaccccgtcaagacgctcacctcccaggttaatttcttacttaatttattactactataccttcatttttctccttcctttttgtttgctgctgctgcttcttcttcttcttgttgttgttcttgttgcaaccggccgggctaccttgcttgcattgcatcttgtttgccatcgatctgcactccagcttattttcgatcgatactatcatctgttacttaaccatctgcaccaccgtaccatccattactttcttgaggctccgatcgagctttaattaatttattaattattagctgcgcaatatataaatatatatatatatatatatatatatatatgtgcaagttttttttctatataaatatacactattaattagccacactatatgctcagtgtattactagtagcacatcgatcgatctgccgatcgaggatttgatcacggcacatagagggttgttatgacacccggcacttaactccgatcctgtaccatcgattccttcaattataatcgggtagtactgtcttaattcataattaaataaataaaataaaattactagtaaatgctaactgagtacgtacgtactcagggtcagagatgcgtactacgcacatatatgtgcagtatatacatgtacgtatatggcgttcgcgaaaaaaacttagtacgtactgtatatatatacatataaagtattcgatgatttcaccaatccaacacaacgtacaatataatagtacctgcagatgttgtactcctacgtaatgagtagtgtttagaacttattaatttactactactacgtcactagctagatcgattgatttggccttatatatgtactcctacgtgtttgaaggttctctagcactacttacatactcgagactgattaatttcaaaactttacatcgtttgtttcactgtttggacggtagagtttgctatatatatacacctagcttttcctcttgcttttttatatgatacacgcaaggcaattaatatcagagtcttatactctctccgtactcgtaaagaaactcgtttaggacaatgtttaagtcaaacctttaaaatataaatcattaataactctcaagttgttgagtttgaaaatgtaaaaattatatgaatagatttgtcttgaaaaatacttccataaaagaatacatatatcactttccaataaatatttttatagaaataagaagttaaagttgtgttttggagaccgtgaagctgttcaaaatgacttctttttttttaagtacggagggagtatatatatagaagaactaggtagatagagtccccaattaattgcattacggtagtaattaactgacaaaaagtgagtgagagagatgaagctgcagctacataaattaatggacatgatgatgaggacggaaacgataataataatacagttaagcaaagtgtgatgctgcgagcagagcagtaatgatcgagagaggatgagtggctggtcggccggccggagatcagagggcgtgcccgtgcagtcgctttcgattgagcaatatatatatatatatatatatatatatatatatatatatatatatatatatatatatatatatatatatatatatatatatatatgcgcgttgccatcctctctcttaagtttactatatgccctaattaattactagcttaataatgtttttatacaaccggaatatatacccctctattctaaaaatacttatatttttgaatggatgaagtagtgcatagtaggttaataataatgccagtgtaagaagcaaccagaggtattaccaaacaagagagaagactgacagtacagcaagactacaagagagacgactgaccattgtctcgcttggcacgtcttccgaggcgtacgtaggggcccaccaaccctacccagggcatggatgatggatgcgagcgggcgtgtacggtggatgcgtggcccacgtgtcggaatcatggcagctcaagctgatgctgctgctgataataacagcatacgctgctgcttttcgcagcttcattgctttggctgctgcatgcatgagactgtacatgatacagatgatgcagtactagcaaaacacaaaagccaggcgccaatcccgatccatcatccgatctccatcgatccatcgatcaatcgacctaccttactagtattgcattgcagctagctactaatttactgtaggatcgatcgagtaacaactgtgatccatggccggccgtgggctccattgctcccagcagctgcctccttctgctacctcagctcatcgatcgaccaacagcatgcagacatcgatcgatcagatgtctgcaagcttcaacagatgaagctgctaattaactattagcgccaaccttaattaaatagtagtagctacctaatcagtccaacgtcgtccatgtatctctatcacttttctcttttcttctttaatcgatcgatcgatcggatgaatactatagtatactaacacctggtggccggtcatctgccaaaaagaaacgcatctcacttctctccatctctttcggcgaattgaagctttagctgagcatgacactgacgctagctagctatctttgtgccaaagtcgatcaattcttctttctcttttctctttttgttattattatgcttgtctactagaaacagaatactggaagctcacctgatcaatcatccggccagtacctgcctttaacttcaaagcaagtttcgcgccttttttgccccggcctcttcacgaccgttgttgcatgatccatcgccatttcaccaatgctttcccagctctcccaatctgaaacttttcagagtagcatatcacaagttagcttgcagtagatgcctgattcaatttaaccaatcacccgtttcacccatctgatcaaactaatccatgctttggcatcaatgtgaaaccagaaaagatgtgccccatttagtcctgatcaacatttgttttcacatttggacttgctttgaatccaatgttttcacatccatactttctgtaaggataataccgctaccggtctaccatatgaaaatctgaaattagatcagataggactagatatattgtttttaattagctattcccatagatgtagcagccagatggacactgcacttcatattatttaagctaactgaacacagttactaatatttgagtgatgtggatacagttagttagatactgtatatatgttcaaactgaaactgaagcgggcaacgagatggtcaaaatgaggggacaggtagcgtagtgtaggctgtggctgccctggttggtggatgatcacctttcactttgtgtcgtttccttggggagagatcctggaacaaattaaagcaaagcacatagtatgcgtcatctacatatgtctattgtttctttctttcattcctcccccacaaagagtggccatggactattcccttgttcttttgtgacaaagaagctttgtgccccaacttcccatagctatgtgtccatgtcttttgcttctcattttctctcttttttcaacaccaaagtatatgtagtataaggtatgctcagagcttcagatgagatattgatataaggatggggctccagcatgctttctttctcaaaaggagagattgagagagtggcactagtgcactgcaatgcaaataaagagatcccctggttggatggatggatggggatgttgcactgcatctgcattgctgcttgcatgcttcagttgttatcagtagcacggcaagaatctatgtgcggggatgttcattgtactagtacatgtttttaacaataacaatacataaaagagaccagtcctaaagtgatgcttgatatcatgaaaggggaaaacaaactgtagatgaaacatacaggcgcatggacagtagtggctagtaatggagttaaatagctaggaagaaaatgtaaatatagtatatacttgtatgagataaaaacatacatatccttgtttcaggttgtgctgctttatatatttacctcatggtagaataagaatttactaccacttactgtgtgaagtgtggaacaggtcgtatttactttcttcttcagtcttgatgaggtagcaatgcaagatggcattgtgcagtctgagctgaataaagattacaaattgattggctataggtcaaatagtggatcctagagtgtaagatagtctttgaaaatgtcattccctgacccctaaaggggaagcagcttcattatctagcattcatatttgaccggagccttcaatggattcactagctgcactgccaatagtaccccaatataaaatcgcccatttgaatgctgcagacagatttgtcgacaactagtggctattagtgcagatagttgcaagatgatgcgttaagcaataacttactagtagctattagctctagacctctagtttccagaaattctggttgtagaaccaaataccttgacaataatgcagataggaacatggatgatatactaggtagtaggactagtacctggcccaaagctgcagtcgtatgaatgagtccaaatcaagagctgaacttccctggaaatcagccagttggaagagtatacaacttattcagcaaatcatgatgccttttaagttgtaaccaagagtaatgcatccagatggaagcttaatgactgacacatacccagaatgagcacaaatgcgtcctgaattatgattcaatatattcagcaaaccatgatccaggtataatcttaacggaaggaaataacatccagaatcagcacaaatgtatgattcattatagttcttttcaggactataatgtgatcgaatagcacaagttcgatttgcattgcttggagaaagcgtttacaatttcttttactacttgttttacctgcagtgtagctatctgctgaatgcagaggcaaccatcaagggctaaatatctcatttcaatgcacctaatgaaccctgatgaagttgacgcaatgtcattttcgtcatcataggacaaaatcttgcatctgatcacattgatatttaagtatcatcctagtgttgatcatcgatgatcccatgaatccaattaggagatgatggatgatggatcatcaaaaattaaatgtgttattaattgttggtgtatgcagctcaaggacatggtgatgaagctgtccggcacgagccgtcatcacggtcagcagaggcgtggcgggtcgccgccgccgaggggccggacgacgtcggtgtaccggagcgggtactaccggccgggcatggtccaggacgacatggcggtgccgccggcgacgtacctgggcggcggcgggacgtcgatgagctcggcgagctcgacgccggcgtgggacttcgcgcggccggcggagggcgaggctcgggagtgggtggcgcaggtggagcccggggtgcagatcacgttcgtgtccctcgccggcggcggcggcaacgacctgaaacgcatcaggttcagccgggagatgtacgacaagtggcaggcgcagaagtggtggggcgagaacaacgagcggatcatggagctctacaacgtccgccgcttcagccgccaggtcctccccacgccgccgcgctccgacgacggcgaggtcacttcacttgttctttcctgactactactagtacaaatgtcatggtccccatgcatgatgtggccggcgaggcggcgacaaggcaacagcacacggccacgacggcgacgttgcctagcctagcctgtcccgttcttggcttggcatcatgcagtgatagatgctgatacgttcttgcctgcatctgcaactctgcatatggcgatgcttttacagaatattgctttcgtcgttgctagctagtagcttgcatcaaaagatgcaacgacgatttgctagctgctgctagtgctgcagagtgcagagcatgcatgcaacgattaaagctggtgatctatggatatcatattcatatatggccatttctctctctctctctctgcatttgcatgaattaaaattaattatttgagcagagggaatcgttctactctcaagtggggtcgacgagggggagccccgccgccacgccgtcgccggcgccgctcaccccggaccgcgtcaccagctggagcgccttcgtccggccgccgtcggcctcgcgccagcagcagcagcacagcttccggccgctgtcgccgccgccgccgtcgtcgtccaacccgtcggagcgggcctggcagcagcagcagcagccgcagcgcgctggcaagagccccgcggcggcgtcggacgccatggacgcggcgagaacgaccagctgctcgtcgagggacgaggtgtccatcagcaacgccagcgagctggaggtgacggagtgggtcatacaggacgagcccggcgtctacatcaccgtcagggagctcgccgacggcaccagggagctccgccgcgtccgtttcaggtcacaaccttcatttttctactactctagctacctatccctgatgtagtatctattaattacttcctgaatgatcagatgatctgctaattactatagatgattgattaaatgcgtttttgagtattgctgatgattttgttcttgcagccgggagaggtttgcagagctgaatgctaagctatggtgggaggagaacaaggagaggatacaggcgcagtacctctagatgatcactttgcattattggtaaatctgggaattactactagctaagctacaagttggatgcttccattttgcaaggaggaattaaactacataaagtttattttacaagtaaatagagtttgtgttccaagttggagctgggaaagattaagataggaggtgggaggtgaggggaaaagaaagggaaaagtttagggcattagtacctgccccaggtaatctgtgactggtgtaccataagttccacacatcaacatccttcagctttgttcaatccaatttctcttgagtatgcctagcaacttatttcacagcagaaaaaaatgtgtgcattttcctttcttaatttaccacctgtaaatgcaatatagatatagtgaagctacgaatcacacatgatagtttcatacaacagccaaagtgatccagcatttacaccgcatgttggcccaacgatcaaaaaaattacaatgtacataaatcggtaaatgtaagctagcaagattaatacagactagagcatttatcagaggcataagcataaacctgtacaattactaaccaaatgaactgcggtaatgcacattgacaccgccaactgatcgatgtctatgtgcaaactaatgtagggcatctgtagtacacactgtgaatgctccacttcatgcaagttcgcgcacacccttgtccagtggaatcctcaacagcaatttggataaatgtgaagaaaagtgatctaggacacgaccaatttgtgtcaaaacatgtaaccggcaaggagaggagaaaaattctggataggaagttaaaatagacatcttaaacccatcttttgtttctcctttggttcaaaagaaatcagtgaaaatatcagtatggtctaagatcacttctcttc

SEQ ID NO: 7199 - DNA, 5647 bp, Oryza sativa
tgtgtggacgggaaaagaggatcggtactatggattatatagtgtgttttgatttttattcccggttagtaataccaaccgggactaaaaataggtttttagtcccggttggtgttactaaccgggactaaagatcatagagccctgacacagcctgacatggaatcaaccgggactaaaaatcatctttagtcccggttggagttaccaaccgggactaaagatgatctttagtcccggttggtaacaacaaccgggactaaagatcttcctcttattaaccgggactaaaaatcatttttagtcccggtttttaatggaaccgggactattgtggatatgggtcgaccgactaaagatggtttctctaccagtatatggcatttgaattagggttgattaatttctccgtgctagctcctaacccgatcctgacacttaagcttagtctaaggagctctctacttcccaaacttaattagccaattatacaatactatatattatcctgacacttaagcttaatctaaggattttctacttatggcccctttgatttagaggaaaaacataagaattttagaggatttcaatcctataggaaaatttcctatgaagccctttaaaacaaaggattgaatcctatctaatcctttgaaattcctatggaatggacaattctatagagattttggaggaaatttagcaagaccttcaacctcttgctaactttcctttgagtctatctctctcatccaattcatgtgtttttcctatggttcaattaaacggtcattcctgtgttttgcaatcctctattttatacttacattcctatcaaaatcctacgtttttcctattcctacgttttctcaatcctgcgattcaaaggggccttagcaaacttaattatctaattagaaaggtgactaaaatgagagaccatgattttatctttgcacttaagcttagtctaaggagttctctacttatcaaacttacttagccgattagagttagaaaggtgaataaaatgaaagaccataacatttttcaaacgaccaaatagattgattaacgttatattaatagaagggagtttagctgggatttgggttgggaagacttttccgctaatcgattgatcatcgcatttatactgttggccaacagtggcgactgcctggtatggtcattatcgactcatactccaatatgtttataccaactattatatttaaatggccagcagtggagtaataagtaacaatctattatttaaattatgataagattcactcatatatgtttatacaaacttgttactagtaagcattagatcagctgcagattggttgcatcaggtgtacgtacagaaatccttccaacaaaaagcatatgtaccatatgacaatatgtacttatgttgttaacttgttctagaattaactttccatcgagagatttaatcggttaatgacactcacgttcccctggtagccgttgtatatcattttcaggtcaagaataaactaagatatgaacatcacatccatacccatccgacgattaagttaggtggccaatcactcttaccatccatatatgcatatgctccattagttagtacggagtacttctttccaaaatagtataaacattgtcaagtaaatagccaggaatgcttattcgtctagttgcacaatcagaaatatttatattttcaaatggagggattactcaacttttacttacaggcaggggaagtcagtactgagtagctagctaattaccccgttgatcatgcaactatgcagtgacagattctgccagaatttggttcatggccgctagctgcagggcatgtgtgatgtccccagtttgaacagtagagagcagccggcagtatgcacatatgctgcatttaaggaggagttaggaccggagtaggagtactagtacttgtttattaatcactcatctattagcataatggtccatggtgaaagtacagcaaaattaggtgaaggtaacgtcgatattagttgtatagaatcatagaccatcttcccaacagtggtactttcagatcatctgtccttgtttccgtccctgttggagagcgacaatcggaatggtcactgacaagggacctctctgttgcccggaaacgacgaaacatccagttcagagttgcagacttcagacagttgccaaggatcaatggaaaattgcaactgaaaatgctggagactgcattgagattgaatattaattcctccaactataattgaatttcatccatatttttggaactagatgaatatgatatccataattgtttttaccctgggtaatctttagacctatgttatttgtttgtttttatgtgatgttcacatccatgttccatcaaaccatgtattcaacctgtattagaggttgttatttggttcaatgcttcaacttgccacacctctttagacttgtgtttggttcattgctatagttgtggcttacctatacttttttatcttgtctcgcatatcatagacttaatctttatctaattttaccatacttgtctagaatgagttatggcaatattagtaaagatccaaacaaccctgatcttcttattgggcttctcttaagtttatatgcaactggtcccttttaggcccgaaagcttgttcagtatgtgtgctgggccgtatggaaccatgacttatagaaacttctggcctgctcgggccctgagcccctgagcctattctttgtcgagactaattgggatgtggccttttgggttttcaggcaatagaacagtgtgagaatgctaccctcttatcctggcccatttattccacgaagctgaaatttattttagccttttgggttttcagaaataaaaaagattatgcaagtgtttgaaccctttattttcggtctctggacctattcagattgtagtcaaaataaaccttaccaatttttggcaatgccattctaaaattttggcaggatttcttatgtattgatcaaattttgcaacaaactaaatgtagatatgtttttggtaactttgccaaaaaaaaatgatgtgattgaaaatggcatcaaagtgaacagaccctcaataacggagtaccggcccatttattttatcattttgttccggcccatttattcctcaaagcagcagcctttaacgatgtatggcccgtatgaactttacggccttaatcagaggcacagtgttaagaccgtaaagttaggcccactacatatggttgagtaattcagtgttgccaccagcgccgcataaatatcttgggataaactaacttttgaatccagaaatagaagaaaaaaatagtctggacacatgcttgatggttgatgcaagctgatgcactcttttatctttacagagggagctccaggatacaagcatatgctagaattaatttttatacatacgtacgtaggtataaatatatggtgtaataacttaatatatagattttcctaacttgacaaaaagaatcggcgcaactaataattgaggagaaagaatttggcagctcgagaaattaaccggcctgcagacgagcgatcgcctagctaaccaagcaaccaaggcaatccgatccagcaatgctgatcaacgcccgtccgccgcctactttttataccgtgattctaaaaatcgaacataactattgttgcaattcattttttattttctagaagtcccgtcaaccgtcagcggctctgcaactatactcttacacaccccgcccgctgcttctcctttttattgtcattgagattttaaaattcgaatatgattatcaatgttgttttttttttaactttctagaagtcccggcaaccgcctttcatgtttgcttcacggcctgcctaacgtccttctttttaatcgtcattaggattctatttggtgttttattaacaatttttatatggcgtatcaaccgccaccaactctactcatttataggcatgttatttaatttatctcgtcatgtgttttagatggtcttttctttcaatagtctttatttttatcaaaaattttagttatttataaattttattcataattgaaatcttttttttttctaatttcagaatttactttttttaaaaaaaatagttgatatcgtattgtgttcttttaatgtttttatttttaattttcaatttcagttgtttcataattgtatttctacttgaactctcttttaattttttctaattttagatattattatattttttattcgaaattttaattaatctcgtatcgggttcttatatggattcttctttcaatattgcttatttttaattctgagtttcagttaattttaaattgtattcctacttggactcttctttattttcttttgctaatttcggatttatttttatttttattctgaattttaattaatctcgtattaggttcttatatggattcttcttttaatatttcttatttttaattccgaatttcagctatttttaaattgtattcctacttggactctcattttcttttctaattttgaattttattttatttttatttcgaattttgattaatctcgtattgggttcttatatggaaacttctcctttccttttctaattttggattttattttattttatttcgaattttgattaacctcttattgggtttattgggttcttatatgaaaacttctttcaatattgtttatttttaatttcaaattttaactatttttaaattgtacttttacttggactctccttttcttctttttctttttattcaattaacgtgagaatttctagtctcaacagcgaacgtggtgcctcctttcaaagctgtctttatataatataatataatagatataatagataggtagataatagcctggacacatgcttgatgattgatgcaaagctgatgcattcttttatctttacagaggagctccgggatacaagcatgctagaattaatctgtatacatacgtacgtacgtacgtacgtataaatatatgatgtaataacttaatatatagattttcctaacttgacaaaaagaatcggcgcaactaataattgaggagaaagaatttggcagctcgagaaattaaccggcctgcagtcgagcgatcgcctagctaaattaaccaagcagccaaggcaatccagcaatgctgaacgctgcgtgtatatgcatatgaacatatgatcgatcgatcgatcagtggatgcagatgccggggagcttccactggaacttgcccgagcgccgctcgtcgggcggcgccgccgtgtagttcctccagacgtcgaggacgcctcggaggtcgtgcatcttggcgccgaggccaacacagcagttggcatggagcgtgcagatcttgttcagatccttgctgagctgacagaagccactgatgtaggtggtgtcgaggaactggatggcgatgcccagcttcgcctgctgctcgtgcttgatcaggttgaacacgtcctgctcgtgctttccgaagaatcgccacctcccttgctgccaactccggtagaaatcgagggtcttgtcgttggatcgcac

SEQ ID NO: 7200 - DNA, 11981 bp, Oryza sativa
gccctccccctccgcgtccggctgcagcagcgcgatcgtgcccgaccgccccagcaccgccaccacccatccccgcgtggtgggcggcgccgacagcaccaccttcgccaccgggaacacggggggccgagggatgcccacggattcgccggacgtgacgctgcacagggcgatctcgcggtcgtcgtccaaggccatggcgagccaaccgcccatgtggccgcagcagcgggcggcgctgaggcgggcggggagggcgaaggggaggatctcggcgcggcggaggctgaagaaggcgagaggtccccgggggggcccagggcggcggaggaggaggcgcggggcctcgaaggcgaggtcggaggggaaggaggcacgggcgcaggtgcgccaggaggagcagacgaggcggacggtgacacgctccagggggctcatcagcttcatgattccttccaggagctccggcgggagatccgcccaccccacggacaaatccgcccgccgccggggatccatgtccgccccgccccctgcttctctctcttcccccctcccccttttcttcctctttcttcttcttcttttttaattatttttctgtcaatggccagtttatatttgtccttacacttcctccctaaaataactttgagtacctgtttgaaaaaaaaaacctaaatattttgcggggttcttgaccgttggatcactttgagattcgtgaagtgcccaaccctaaccactcattttctcgctcctcactccgaacgccgccacctctccgcccgatacccctcctccccaacaactaacatacaaatattgttatatgcctcaccaattatagaatacgccaacagtaccagcggggttcatcagacctcaccctccctccctatcctatttctcaagctgatgatggtgaggtgtccccatcccgttgtctttgacgactcctcaccatcaaagacaccactgcctcctagctcgttgtgctctgagctatcaacattggtcgttccaccgcccataaattactatcaagttcttgtattttacaaccatccttctaaaacttgaggaactctctcctctttcttctaccccgcctcaaccttaaccctatatcttaactggactgggcctcctaagatcaaagagctcaccggaatgtgaagaaaatgtcatggtgtacaaatctcagattgaattggatggtccaaaatatgtaagatgggactttgagtttctattgtagggagattaataattttggaaaactattgaccttattactttctctcttttatgttgtccccacggcacacaggacaagatctctctttgggttgtttaatttgattcatggttaaaatttgtcaatccaactacaatagcaaaagtacgagtaataacaaaaagcttgacgcaaatttaattggcatatgaatacgttagctccacgccttgagaaaaatattttctttttttaaaaaaaaatttctgcaacatcatcaagatcactgtttatttcttaaaatatttaatttgtaaataatctataacaataatttgttcaataatctaaatcaaattattgcctaaaaagtatgagtaagcacgatcatggaattcaatcatgcagacacggaaatacatttacatataacatgagacgtggccatattaggcatcaaaccaaacatcctcttatttttggcagccagggaagagacaaggtcatattaaggattaacaaacaatttggttttgtggattcataatgtaatttgatatttgatgagtagcaacgattatgagttgttggaggaagaaaccatgggagaatatatatgtttttattgggaataggatgaaaaggaatgatcggtcatctttggaatatagagagatgtttgatgaaatcaatgggaaattgcttttcctagaaagagtgagatgttcctcgctagggatttcatcttgggaataagttcactttgattcccttaactagtgatcgaatctgattcatatccctgaaccacaattacggatatctcgaccccccaactattaaaaccggtgcaatttaactcccttggcggttttagagggcggttttgctgacgtggtgtctacgtggcaatattgacctggtcttcgtccccattcggcgctgacgtgtcgattaggtggcattagaattaaaaaatatgtttgggggcccatttgtcattaaaaaaatatgtgtgggacccatagacatgtggccccacatctcatgctctctcttcttccttcttcctcccccctctctttctcttccccatcggcgagcgtgggacaggggccgtcggcaggcagtggtggtggcgggcgggagggtgggcgagcgagggtcgggtcccctttgcgagctcgcgacttcgattagacctctttcagtccccgatcaaccaagccaccaccacagtcgagcttctctcctcccagaaatcccaatccacacctcgctggcgcccaatcaccaccactgccgaaaccccccaaatccggtctctgccgatcaccattgcggagctcgagctgtgacttgccgctgcaatccatcccctccgtttcttcccatttctcccctccctctccttcttttccctcttcctcttccacggcagagaggccaggactcggggagggcggcagtggcggatgaggtccgcgcggccctcgcacgctgtgtccagggcgggctcagggtgggagcaccgaaaggcagtgacgaggagtgacctcccccatctcttttgtggtcggggcggctaggctatcagaggcagcgagggagcggaaggcacagaaggacgaaggcggtggctgccgctcttccaaacgacgttctaccactgctgttgccgccgttttgcttctccgactcgatgcttcttcgtcttctccaacgaaggcggctacacgaagccgggaaggttgtgacggcgacaagaggttgggagggcggtgacggcaaagtgggaacaacgccagccgactcctcttttcctcaaggagtcagctccttgttcccgccatggcatcctcgatggcgaccaccctctacgtcaattcggtcgtcgacgatgacgtttagtcgcacagctccgccgccaagctgtgccgctcgtcgccggctaccgccatgaccccatccatccatctgacgccgcgaacacagccgtgtcgttcggcccgaccaccgcgggtgccacacattgagctcatctggggcgggagcggcgacagctggggaatcgagccgctgccatttccgcatctccgtcgcgccttccgtcgtctccgccgctcaccgtcgtctctagccctcgcctcccaccgcgggaaagagagagagtgagaggaaagagagagaagggagcgacgaggagagggaggaggaagatcagagagcatgagatgtggggcccacatgttagtgggtcccacacatatttttgtgaatgacaaataggccccacacataaattttaattctaatgccacctacgcgccgcgttagcaccatgtggaacgaagaacaggtcaataccgccacgtaggcgccatgtcagcgaaaccgccctccaaaaccaccgagggagtcaaattacactgattttaatagttgggggttcgagatatccggtattgtggttgaggggtacgaattagattcggtcactagttaagggagtcaaaatgaactttctcctttcatcttgtggaggaaagcaatatatatggcctagtggatgaaaagatggctcattggcccattgggaagggaaggcaggagcccatacatattccaatttttctgggctgtcagtgcataaggttagtccaataaggaataagtctatttgacccccttagctcttgctcctgattggatcacctccctcaagcgtaataaaccaggtataatgcctcccctttaattaacgtattatagtcatctttggagttatactagcaaatatgcccgtgcgttgcaacgggtgaaaaaacgtaatgataatatacgtttttcatgcataaccacgtcgataacaatcagaaaattagaactacgaaactttattttctagcgcgttttcttttgtgcttttttctgacatttttccctcacgtgtttttttaaaccgtttttattttctcgcgcattttttccttttttaatatactgtagaaacttctctttttatagttagattagattagattagagataaagaagatatataaatggactaaaaacgacgaatataaatttgacttttttcctccgcgcttttttccgtccttttaattttttttctcgtgcatttcttttacgaagggtttttttcaccactttcacatagtgtcaaacctttctagatataataggattcgattttttttaccgcatcgcgtataattcctttttctttagaaacagacaattttttcgcccttttttatcgcgtcaacggagtcggaatcgttttgattttttccctttttttggatcggacagatttttttttgcccggtttatttcgcccgatcgattttttttaccgcgtcacatataattccttttactttggatttttttcgccctttttttaccgcgtcgacggagtcagattcgttttgattttttttctccctttactttggaattttttcgccctgttttcaccacgtcgacggagtcggattcgttttgatttttcccctttttggctttttttggataggacagatttgtttttttttcgccccgtttttttatcggacttttatcttttttttcgcctggtttttttattttttttaccgcgtcacatataattcctttttctttatcggaaagttttttttcgcctttttttaccgcgtcgatggagtcagattcttttcagctttttccttttcttttatcggacaattttttttttcgcccatttttttttctcctgtttttttcggatcggactatttttttcttttttcgcccggtcgatttttttaccacgatatatataattcctttttctttggaataggacagttttctttttatttttttaaactctttttaccgcgtcgatgtagtcggattcgtttcgatttttttcctttttttgctttcttttttgtcggacagatttgttttttttccacccggtttttttccgcccaggtttttttatcggacttttctttttttttttgctccacgatacatataattcatttttctttggaataggatagttttctttttatttttttaaactctttttaccgcgtcgatgtagtcggattcgtttcggtattttttccttttttttcctttttttttgtcggacatatttgttttttttccgcccggttttttttcactaggtttttttatcggacttttcttttttttttcgctcggtttttttctcccgttttttgacggacgacagaagcacctagagaagtgttttttttcttttctccaatccaatacagatcggatctcttccagggaaatcagattttttttctccagggaatcggactcttttttttcgctttttttattcattaaacggtttgtctctcggacttttttttcccttttaagggatcgggtgtttttttgccagggacaggtgtttttttcgcccggtttttttttcacttttttttggatcggacttttttttcgtccggtttttatgatcggacaaacttggttttttctgcccggtttttttttcacccggtttttttgacggacgatggaagcacctcttattttttaagtagtatatagtagagtagtagataataaccacaacatcatgcgttcttatatatgggcttgtttgattgcatccatttaaaaatactccctagcaagccaaaattttagcaaagtaagagttttgacaatgttacttcaaagcttttagttagctttgccaacatattggaattatgttcttcttcttcttcttcttcttcttcttcttcttcttcttcttcttcttcttttgttttttgcaacaaaccaaaatgaacaccgaagtcagtcgccattagcatttttttttggtatggtttcatacttttattgagtgttaaatcaaacacacgatatgatatatctcatcactagtctcatttgttttttcgagtataaataattataaatgtttacatggtaaacaaggttttttttcatgaaataatgaatcgtaagagaaataatcaagtgaatgaaagagatgatgaaggagcatgcatgcaggaatcctatgtataggaaggtaggaggacatgcatgcatctttttggttggcagcaggcagaggcaggcatggcattggcatcggcatctagagccgcatggatgatccagatccagtccagagaaagaaaaaaccaaaaggaaaaaggaaggtcaatgccatcctcagctgtgttcaatccgtacctccccggccaccaccggccaaaccaaaacataggccagccacccgcacccacagacccagaccaagcttttgcgtgcgtggtacgggtaaacgacggttactactaaatactattatctttaatttaagaaaactattttgtgtaactaatgggtaattaactgcacaacatatagaaggtatgataatttgtgtgattaactagttttagatgggtacccaacgcgttgtttgcgggagaagtgtgtgataaaatagtatatatgagttgtaaaattttatttcttggttactatatatttttttaccttaatcaattatccaaaggttataaatgattaggttgtatggtgtgacttttggagagaaaatatacaatttgcatttttgatgaatcattcaaaggctaaaaacaattaaggtgatgcatatcataactacacttagggtgagtttgagagataggggattgagaagattggaaagatacgcaaaacgagatgagccattagcgcatgattaattgagtataaactattttaaatttcaaaaatggattaatatgattttttaaaacaactttcctatagaaaatttttgcaaaaaacgcatcgtttagtagtttgggaagcgtgcgcgcggaaaacgagttgttttctcaccctatctcacacaaacgaacacagccttagtgaagatcaactttatagatatatagatttcttacatactatacgattttctattgtgtgcttatatattataccttgatcaaatatccaaaaggttataaatgattgggttgtatagtgtggcttttggggaaaaaagatgcaatttgtacccttgatgaatggtccaaagactaaaaatagttgaagtgatatggcttcatgaaagaggagggaattagaattagcattttctttacagagggaaaaatagtaaccttatctcctcctcctccctcctcattcacgatgtgcttgggatgagaaagcttgtgctgatgccgcgtgctccgcttcccacacaacaccttggccttgccggtgttggtgatgcctactagaccggcctcctcccgcccttccccctttgtccgatgttcttcttctccaaatacaatgatgtgaagcccctaccctgtcggtccttcctcatcgccggtggctcctatcataaccagtctcatttgctgtcgtctttcgatgccaaccctgcctgccaccacctctagccccatggctccgacagtgccaccgctgtcctccattgctcgctggccactacccaccactgctctgaccgtcgccactactgcccctctaagcctagggaaaacccccttcccctctttcttaaccccccctcccaccttaaccaccctcttgaaacctaatccaatccatggcaatcatcaaaagggcatcagagaagaagaagagctcacaattaatcactgaaagaatattgctatcatttttttcaaacgtgcaaaagccttgcacatcgatatattaatagggggaaaggagattttacaaccacgactagctgatgcaggtcatggggggttacaggagagatggcgggcacactagattaactaggaaagacaaccaaattcctgaaaacaaaaaaagagaaagagcttgtatctaaacgccaagaagaacttttaggggactagataacgccacaacccaaagctttccttattgaacgatacgatgaacaccaccatctccaccatgaaaagtatctccttgaaaacacgagcatttcttttcaaccacaagtgccatgtaacaaggaggacaagggagtcgaaccctttcctgttgtaatcccctgcagctgcgggcaagaatactcccaccaaacctggttgctattgcaattatcatcgttgttgattagttaccccttcttccttacccctccctttattcatagcaggtatcggagaagaggaagagcttccaatcactgaaagaactacccctggctgttggatgcccagacaagcgatttcaatcacctaaaggctagcaaaaatacccttagttgcttcctctcatgcatcccaatggccatgcatgggcacaatcacacggctattaaacaatgtggtgcttgctaatgcagtaaagccagctgctggtgcttgttgcacagggccagaaaagcaaagctacagaggccatggatctccgggccatatggtctccactggcagttgctctgaccaaaagccactgttgcatgcatgccaaacacagctaccgcagtactccactgcactgctctgcaggacgacctgacccagatctgaccatgcattgccttgcatatagcagcacatagatccatcatatccagagatgagaccacacgatgagactacacgacgacgctgcctatttcccatccaaaacaaacaaatctagtagatgaaatataatattctctctatttataaaaaatccaattctaaaaattaatctaaaattagaccaataaagtatatatgctagcattatgaatctgaacccatactagttttgattatttttccgcaaacttaaccatctcaagcgtaaccccatactccctccatcttagaatgggtccaattttttatcgtcttctttttatcctaaaattattttgaagtattcactgcatcagaatttgtaaaatagaggataaatatattgataatagaaaaagagagcaataactacattgggattaataaagtgggattcccagactttttaattttatattgatatgcagggcagaagaaaaattaacttattttgagattgagaaagcagggtaagtattttaaaagttatacttgtctctatcagttactcctatctcttaattagtatttaaatttctctgtctattatcgatctgaaccacactgccctcaacaatctctcgatacaataaaacacattatgacttctttttttacattcttgatccaaccatctctcaatggataaaacacattatactttttttacatccttaatctctccaatacaatctagaaatacttacttccatcattttaaaatatacgaattttaattttatgtgttttagaaatatatttgtgaaaagagggagcagtatatatatgaatatatatactgtgttactactactctactcctaattatatcagatccatctatccattacgacggtttaacaattttcagccttaattagacgatcgatgatttggtactgccttccaccattaattccatattgttgagacctttcaaagggattgaaaccaaattaggtgcggaataaattcacatctattttggtgtaaaatgaattaatgttctcaatccaatctaatttctttctctaccggattaactgaaaatagcatagtttcagctcaaattaaccagctatatatatacgtaccattgtgttgttatatttaggtggtgttattttttaaggaagatgaagataagttaggatacgtaaaacaagaaaaatattagcgcctgactaattgagctttaattattataaagcaacttctttgggatccgtacgggaagtacatacgtatcaatttaattataatacgctatacatccgtaaagaaaacttcattctttacaggaatctgcacaagtgataacacgtgtagataaatgtgaaaactttgaggtagtagccagtagactactccatgcggtcgtcaatgcatgcatggatgatctttttgttcaggtgtcacttggtacagtgcacctagcttacctagcacctcgaagctagctaggctttctgttcagttactactacatttagcctcgaaagaaaaatcaacttttatacgctaatttagtgatgtatatgttcaaatttatatacctaaattgatctattttgagacggagggagtaaccattacacctagctaatcttctgttcaatgcgcgtattcctaaccattcattttaatttggtcaaaactattaatcatctttgtgcatcattaattcactgtaaaatacttcatgcaaaatgcaatatatattggagtatttaataaataaccaagctaggaacttaatcaaatttactatatacggctatgtatatactttatatagatatgtacttgtctttcattctagactaaaacgaaataattacgaaaatgaagcctactggtggagattaattgagtgcataattatggagaataatgtgatggtctgaaggagggcaacaatattcttcgttgagagcctgagaatgacattttgacaagtataggtacaactcacctcaccggtcaattatattgcaaccatgcattatactatatggcaccatgcgttgaataattaagctacatgttccacgaaagtgctacacatttgtctgtgaaaagtgaaaacaaccaaatattgacttttagcttagtgctatatatatactatgtgatgttcacattatttcctgatagatagttaaaagtgtgatatatatatatatatatatatatatatatatatatatatatatatatatatatatatatatatatatatatatatatatatatatattgacttttagcttagtgctatatatatactatgtgatgttcacattatttcctgatatatatatataaatatatatatatatatatatatatggttaacagcacgctgtatttgctttcagaattgcaaataacaataaaaaacaactacaattaattataagtaattttcttagtgtacgtaatttattattttcaacataaaaatgttttgtttcctttgatacgctttaggttttgtcatatattgatgctacctatttcaactttgtgcccccaagcatttttagaatcctacgtccaccactaacattactttggtcacagtgcgctttctattggattttattgtgactatgaatttgcagatggttgacactggtgcgcgagtgtggtgtgcgtacggttaaatgtagactatttgaaagaacataaatccatttttcaaaataaaccaagcacctgtttgtagtgctacagtaaactcataaaagggacaaaattgaattttaatgaatgcatggactggcctgctatatattccctccatctacttttgatagtcatatttccaaatctgaaaaatttatttttgataggcatatttcaatccaacaacctatcatcttaatgactttctcagaattaatgtgtgactctctattcttccacacaagattggctgtgtcagggttacgggttaggcataccctttacctttcgatatacgttacatatcggcatggcatacccacgcgcatacggatacttcccgcgtacactaaggaaatccttcacgaagt

SEQ ID NO: 7201 - DNA, 21019 bp, Oryza sativa
tacactaaacttttgataatatgaattaattagacttaaaaaaatcttctcgcggattagctcttatttatgaaattagtttttttattaatctatgtttaatactctaaattagggtccaaacatccgatgtgacatgggctaaaaagtttttagtcccgtctaaacacccctaagctaaacaacagatcagatcaccaaacaaagaaagagcagatgagtagactcgtgcagtcgtgctaagctgaaaccaaattactgttgctgcctgtgctactacagatagacaaacacagccaacggctcttgatgacgctttgtcctttgcatattacgctgcctgcccgctctgtagtctgtagtctgtaccctccactggctgcggctggcccccctgcatcgccaccatgaccagcccacagctagcacacacacaccagccttacatgatgcacaaacgaaaaggaagagctataatgtgcaaaatctgaattgatcagggacatgaatgaccctattcaacattataagatgcagaaaatccagacatatgctaataacatgcacaatggcagctgtatcaaaatcactttgcattcacaagttttcatagttgctatcattcatgcacgaggcattgtacctttgattggaagatcctgctggtctcatatgtcagtgaagtcagcaagggtcatttatcacctacagtgccatgttcaatgtagcaagatcacagtacctcatttatcactacatgagcaccatccaagccaactagtagtaggtaagtattttgcagatacagatcgggaaccaacatgaagatctagtggaataatgttgaagccttcagaaagaaaaaacaagaacccacattactggaagttcctctcagaatcacacaattcaagagcacctggacttcatacgcagcaagggtttgcaggaatcatgtttctgcatcagtgcttggtgaatctgagactgaaccaacaccaacaaggattctacataattcccagcgtagggttgtggcaagtcatatattatgtgatataaacagcagcatctgaatacacagaatggaatctgcaccaaatgtgactggctccaactacatgttacctgatccaactgcaaacattatttacagtataatagttgaggtaaggcagtcatccgtgcaaaacaaacatcagacatgcttgcaggttgtactaaaaaaaaaaactccctatttatttgaaatgccaacagtaccttccaaaccacaaaacacatatccttattcattgccttcaggaatctcaatggttttggagttcgcttatggggcacaaaatattggcagtcatatatttggagcacaaactctcggctaaaactgaaacattatgtattgatattcaacatgtttcgaaatcctcagcaggcgacagataatctctgagacaatatgtatattctaagggcattcgtttagcatattaatggttgacaaaaaaaaacttgcttcctatcaatactgtttgtgacaaagtgtttcttaggaacaaaaaagataattaacaatgaacactaatctaaacagagaagaggacataatgtagctgtagaatcttggtgcaacacagaacagatgctcagattcagagtttttctttttatacacagaggctgcagatttgcattgttttcttggtaatttactttttcatcactatttagaactaagctattcactttcttccctgctccaggtaatatacagtacgctaggacagtcaatgtgtgcatcagctataaaagcctaacatcatgaataatagaaacaactagcaaaaaagtgctggattatgggattgattgatggaaactggcatgaaaagtttcaggtcggtcaaacagaaacattttgcattggaagaatggtccacaagacatacgtaagaaaggcctaagatgtttacaatttccattggacataaatccaggacagaatgacagaaagacaatattatattttgtataattccatagacctggatgtactggtatcacttaaaaaaatacaataatcccagttattcaattatgttgtcacccttcgtgaagaataatggaaggaagaatagggaaagcgcacatgaagaaaacagagtagacacgaatacaaacaaagctgagaagcttaactggtagtgtaagttatagatatcaaacataatcttaaatagaagcgttcatgcaatatttagacaccttgcatctttcaaaaaatacattgtcagttagctaaatgtaaaaaatggtttgctgatgcaaacagcaaagacattctgctcaaggcctcaaaatatagtaaaattaaccatacagacacgctcaaactgtcatacaatatgtctataacacagaaaagtgctagaaagatatatatttgcagacagttaattagcattggtaaatggtaattaaaaatgaccataatttctgaattgagaagcccccataaaatttgtatggataacatcatgcaggattgaacgaggaactcatgatcatttaatgtacagaaaacctgatgaagttacaacatttcctaaagcagaaggattaagaacctgtatcacagtcaaaactggaattcttgtggtatgccgaataagagctaaagggcttctctgatctgaaaagtcttcaaaatagctctagctttatcatattcattcagttctaccaatatgtctttcaaacgacgagccagcccacgtgtctcttcctcacttatgcctgacatgtgtcgcctctccaacttgtttcctagttctaccacgagatctatgaaaggctgcaacttttggcttggtgaagaccacactcctttaagtaatgcagatatccgctcagccctagcaattgcatcatgggcatccaaaatgatactcttcatatgaggaagaattttccccttcaacaattcttccagagcaagcttctctaaaacaggttttgcaaaaatatccttccacaaacacacatttttaagaagacgtatcgcaactccaaatctatgagcagcatactgcgaagcacctggaacagtccttgtcaccattgatccccaagctggcactgaaatgtcagcaatggcctcagtcagacgactattgacagcggccaatagttgatgcaatgccttgcttgaggttggtaaatagctaatgaccatattaattgcatccacagcgtttttggttctttgggtgcttaaaatatcccaacagtgcataatacggtggtgcaaaataggaagagccaccttctctactaatactggaatgaggtccttgtccacattgttagggtcagtgccactttcactgttttgctcaccataatcaaaaagaatcttgtgccactccatgccaaagaaatcagttgtttcatggagaggatcccacttcaaaagctccagtctgacataaggggtgaacacagatggcgcactcagagctacatgagcatctcggtaagccagaggatactgagttttccatccttcaaacttgtccttaacaattctaaggcttgagtattcctcggcagcatcactgaatacaagatcagcagtcttgagcaactcatcacggctggacagataggcactgctctcactatcactctcatcagtgcttagttccccttcgatatgttcattatttgcactcctcccttcagatgacaaccttttagattctgatcgaatttttcttcgcctcctgtcttcttccctacgcttaagatccattcgcttctgcatattgatatctctgccgaattcatccagctcaggtggtaggtttgaactttccctagcagcagctgccgccgcttgtgcagcattagatgcagcagatagataagctgagcttgatcctttgctaaggacagatactgctgcattgacggcagcttcgataacacttgattcatcagctagatcagctgccctcctctctgagacagcagtcactcgattctcatgcagcttctgcatgtgctcctccaattcctctatatagaatgccttatcattcaagaaatcacacatgacagaaatgtaatttcggagctcctgcatgtacacaaacttcctttctgcatcttgtaaaccactctcaaggctagatatctctgaaagagcttcagtaagatgtgtgtcagtcttgactaaagcatccactgttgtcttatgggtctccttaagcttcctgatgttctcctgcagggctttgcttgctacatcagcttgttgagcgattgacaggaactctgcactcccagatgcaaaaatagaagtcccaggcaaaaccccgctaaaggaaggctggtaacggggatcgattgagtatccggatggttgcggctggacctgcacaggagctggtccaccattcgctgctctctgagcagaagcatcatccaccctcctaccaagccccttcctgaactgctcctcctcccatttcctctcttcctcatcctcatcgtcatccttttcatcctcaacctccctgaaaccatcattgataacccccaaactggcagcaggacctctattattgatcacgccaaatacacctttcgtgctcctctggctatctgacttctcagcgtacattgcaatacggccgcgtgtctcatcatcatcctcgtcgctggatccaccagcagcttcacgactgctaagcacaccacctccatcaagggagatgtaatccggtgctgcatgcctcggctgttgaagctgctgccgctttgctcggatagcttcaattgttgcgcggtcaggtatgactggtccttcttcctcctcctcctcttcctctgactcatcttcgtctttgtcctcgttctgcgatggattccttggtccaatgctagcttgtgacataggttttaccagacctttgagaatcaccacgggctctacagcagcagcagtggtgtttgtagcaggagcaggactggcggcagctccaggcaaacgctgtcgtggggcttcagcggttggagggggagggggcggcggtgcacgcatgaggctcccagggagtgggcgggcgttcttctggagctcacggaggcgctccggcgtgtactctccagcatgcgactggaagttggacggcttcggcgcgggaaccgccgctgccacggccgtagagctcttgaggcggtccctggcgggcgtgagccggtggagagtcgccgcagctggcgatgccgtgcgggcctgccggaccgtagcagccgggcggcggcgctgcgacaaaggtccctcctcggcgtcatcgtcgtcctcgtcctcgacgaagctgaggcggctcgcgccctgacgtctcggcgacctgggcttgggaacgggaggggtttgggtcttggtggctgtgggcttggagttgctcgagtcgtccccgtaggcgtcctcggcgtcgtccgtgcggcggcggaagttcttccggtggctgctcatcccgcccgctcgccacgacggagcggcgaccaggggtaaaaaaaatctgcctagtttggggaactctattagggtttgtgcctagaaaaaaccttgggttcgagtagtgaggtaataatcaggtaagagaagaagggaatctcaccggcggcgacgggcggcggctagggttccggcggtgcggagtgtggagatccgcgtgcaaagagagagaaagatgggaggaaggcgaagaggtttctggatccggatccaataagaaaccgcctcccagctaaggcctggcccatatcggcccatgtggtgtaagtttaggcccgctccgcttcgtctcctcttggcctctcctccatcccttcggaaaaaccctagcaaatccccgcctcgatcggaaggagaccatggcgacggcgaggctccgatccgcctcctccctccgcggggtcctcctccgccactgctccgtgggaaccacctcgccgccgcaagttttctcccgcgtctcaggttcgcctcatgcttcgaatctctccccccgtggttctctccatagttaaatctgatccgcgtggtagtgcccagctatgagctgcgaaattgttgtgagaacgggcatacgattccatggtgcacaagttcggttctagtttgattaggtcctgggctcctggaggtgctgtgccctctatgtagtgctaatgttatctgactgactagctatatgttcttctatgttgtgagtaatctcggaatttccaagttagattgtagttggtggttagacttcggtgagagtgcatgtgtcaatgaaaaggtagtttaaatgacagtcctccacatctatttcagggatgattttttctaactccacccacaatccaacataatctgtggattcaagcttctaccttgaatttcatgatttattatctgctattctctacatattactctcgtgagcccccaatacctctttcggtttcacatgatttagttttgccagttacatgtgtctaattgtactgtattgaggtgcatttgttaggaagatgtgttatagtaattcaacagggcgcatggttgaagtccaatttaccactgtatgttacctcaaaatgcttaatagcgtaatgatcttcctttctgaaagcaacatgctcctttgctaacttaatggtttctgaaccattatcttggatagccgaagtatatagatttgcattcttattttttttataggtgtcaaaaatccgattaaagtcagctaactgtcctttacattatcagatcttcaggctcctggatgtattgcatggaagcatttctcaacattcaagcctaatcctcttccaaaacttgatggccttggttcagtcacttgtttgtacagtcaggcaagatgggcttctcaagctgctgctgttaaagaaactgaaaatagtggcagcaagataagcattgggccaaaatccaagcagatcaaggaagatgacaaagatgacaggctagtttaccagggacctatatcatcgaccataagaaaagtgaagcttctttctctgtccacctgctgtctctctgtgtcgcttggccctgtgataacattcatgacatccccagatatgaatgtaatcctcaagggcgctgttgcatccactgtcattttcctcagtgctaccacaacggcagccttacactggtttgtgagcccgtacattcacaagctcaggtggcgaccaggttcagatagctttgaagcagagattatgtcatggctggctacacccctcacaaggacaatcaagtttgctgatgtcaggcctccagagaccaacagaccttttgtcacttttagggctgaagggaacttctattttgttgatgccgagcacttcccgaacaaggctttgttggcgaggcttactcccaagcaccctaatgagtctgcattcaagaacttgtgattgaaggttgcccaatgacctcatggctgcactcgcgttcatgatcatttgttggcagtttacatttttattgtgatacctccctgctaatacttccagaagaagtagtatactatgttattagcgttcctttaaatccatgtggaaatcagtaaatgctggtgtcatactacgattttagttaagacactgagatggcgtgctgactgttcttaataagtagcggggacttttgcttaggacacctcccaacattctgttgtttatgatgttgcaatgctacacgcccgtgtgtgcttggcagtttaattacgtgatgctcttgttttggcttagagatatgatatatttgcaaccattgttcaaatttcatctggaacaccgagcgattggtcgctggttgtttttgttcagctatccatgttttcagagactttgcaaggcatgactaatgtcctctgaccttaaggacgcagatgcctatgccttcagaagagatgcggttgttatgcacagggcacagtttcgtcacacgtttctacctcatggcaaaaacaatcatagacagttgactttgaccacagtgtgatgtatatcgatcaaacaaactcccagctaaaatgtggtgcgtatgggctgagaaagaccatgtcttcgagcaaccaaaaaagtccttcaaaatctcttgatatcagtataagggaagttcataattgatttcctcttacacatgaatttctcttctactatggcaatgctagcaattcaattagggctttgcactcacaaacttagcgtccgcgcttactagggacactaacaagcaatagcaagagaagatatggaggttccaatatcatgtggacagcagcaaaattccacacgacctacaatgcgtggagagaactattcagatagtagatcctccaacttctttcggaacttcggaattgcttcagctttgacggccatcactaagcccatctccttgtaattcttcatctgaaagggtagacagggagtccattcaatttaggtgtacacaacatcaaacttagaatgatgcatgttcagattctgcttgaaatggtgagctaatgatcatcagaagaagaaagatataacgaaagcataacacaaaggaacgaatgttcctacttcacatgattgggatttggtcatttggctactactacctctgttcctaaatatacagcgtttgttgattttttggacatatgtttgactatttgttttatcaaaaaaattatgcaaatatgtaaaaactcgtgcttaaagtatttttaattataaaacaaaataaatgatacttacatatttattaaaacgaatagtcaaacagatgtccaaaagataacaatatcaatccaggtaccaaaggaaatttgtagtgccagtgccacaagtgaaccagttccagatgctgaaagtaactatgaaaatatgaataaaagaacagcataataaagcctgaagtacttatacacaactaacctcttgctgagccgattgttcagaacgtattgggaaagtgaacgaccatgaagaaagctgaggaagaaagttttgttaccacatcaaacagaactgcacaaagaaaaattaatctcagattgtcagtagcatgtcctgcttgatacctcgcgaaaaatttcgtcttctaacttaggatagataataggctcatcctcttctgtactgttctttgccttttgctttgctggagttttcctctacaccagatggcaaagacgtgttattcatacagctgaagcagttacaacaagacaggaactttcatatacagagcacaattacacttgaaaaatgatctatacaacatcttacacggaaatactgagcaacaaaacaagtcgctttgaatatcaatgggcaaaacaaacatggaaacaaattgcattgctcacctcaagtactctgacaaccattaggtactgcttgaaccggaaggagtcccggagttcttgtgttggcttcagatatgcgaggacagttgaaaacacgttataagaaagtagagaaaagaatgtgtttcacactatctgagctcgacgttcataaaagaaggtgcttgacaaacctcgtcttctgtggcccatgaaacttcgtcaaataacgattcatacatcttgggcacaagttcatatgggaaattcacaaaacggcggcacacaagcagacccacatcaggtgctttgtcccccagcatttgcttgagcttcttcttggtatccttgtcaccacaaacagcaagcaggtaatccttaagatccttcatacagcggtgctcctacaagacaacaccagcaagttgattaatcagaagccaccagtgcagcaagacctatgtatcttgtggatgaagcagtgagtaggttgaacatacactgtatcttccaagattaagcacgctaatgagaccaaacagatcgtcattgccaccagtgctgcttccatcagcaccatttccttcaccatcctcttcatcgtcagcaatcttgacaaccgtacccaccgtggtctgctcaaggatgaggtcgacgaagccagtgagatcccacggcttggagtcgaggtaggtcttgagcagcagcttgacgccatggaagtcgccgggcttggggtcgtagaaggcgaagtccgcttgcaccgtatcgagctaggagcaccaatccgaagagcaactcgcatcaatcgatgagtaggaactccagagaggctagaaccaaggtagaggtaggcactcacctcctccgacgcgtcgtcgctgtcgtcggagtcgctgctgtagctctcgtcgtcactgctgtagcgctcctcgtcgctggaaggctcggcccgcttggcgcgcttgggcggcggcatatcgcgactggagccggcgattcctggagagcggcgaggcgtgagaaggaggtagcgaggccccggcgacggcgttgccaattaagtgtaagcacgcgtacctgaagggatttcgtcggcggcggcggcgggtggatcctcggggggaggtagtggtttagaggaggaggcggagaagaggagggagcgagcgaacggggagaatccggcgaagggagccgggcgctttcggtcgccgaccatgatcgccgagcagtcggcggcggcggcggcggcggctggttcggagagggaggagaggcttgccttctccaatggaagtagaacgaggcccatgcatcaaggccctgtttgttgggccgcaaggtgagtcgagctccgtgcagcccatattgttaatgggctggaaggctaatgcgacaaatgtgagaggctgggcccacgcgacatcgacgaagcgggcccccctctctcgataaataagccgacccaagcctcaaaacaccaaccaaccaaccaaagaaagaaaagctcgactcgagctcgccgcgattgaatcgcgcatgggcacggcggcgggcgacgcggcggagcagccaccggcggcgccggaggcgaaaagggcggcggctccacggacgctggtgttcacgtacggcacgctgaagaggggcttctccaaccacggcctcctccaggacctggcccgggacggcgacgcctccttcgtgggcgccgccaccaccgcgccgggcctcccgctggtttgcgggccctaccgcgtccccttcctcctcaacctccccggcgccggacaccgcgtctccggcgagctctacgccgtcacgccgcgcgggctcgaccgcctcgacgagctggagggcgtttcccgcgcgcactacgagcgcctccccatttccgtcctcctcgccgagggcgcccaggtcgacgccgtcgcctactacgcgcaccgcggctacgccgacgacctgtgggcgcgcagcggcaagaaggggtacccggagtactcgccggccgtcgccgacggctacatccgccgcaaggatcggccgcagcagctcaccttcctggagcagattcgggtgttcgtctcatcgcagtcatcgtagaacccatcaattaatctcttttcttttcttaatctatttttcttctctttgcaatcactcctcctatttgtgcgatagcgtgcatgggccatgtgacaatctcttgtgatgaatggatgatcacgcgtgctacctaacctaccagatcgccatatcaggctatcgctgatcgcgtgatctgtagtatcacatccgtttgtgtgggggtaaaatcagccatcttcctgtaataaaatagaatgattttccattagactcactgatcattggctgtgaaatttgccggccgcctgttcatcagttatctcgatcaaggcttcaacttttactgtggtatgccggctcctagctggaaaatgttgaggacaaaaactcttcttcaacccaaagataacacaaccatcctgaatttggttgtaggggacgcaaattcaaaaccataattttctggtcacaataattgatgtgttcaagataacctgctctgctctgaattttctgtcatcttaattaattacagctgccttgaatcgttcagacaatacacgatatcttagttgactcggaaataaaatgaacgaatgaatctaaagacgagccttgcgtggattgcaaattggcaaaggcagcacagatgctcccgtcactcgcttagaataacaagccacaaacacaacacaagaacaaagagaatttgctttgtgcaagattcttctaatgcgattacatcaagaatctgttactgtcagtgtcactgtcaaccatttgcacaacgggcgggccttgacgttccagcatttttgacgacgaaaaagtggagaaaagagaggagacaaaataacagtcttgcgtggcaccgcctggagtccacgtcactttgaacggctctgctacaacgatacacccggcaagacagcaacttgcattgtgtttatcattggtggctcaaaatcacagcaaaacaagccattgcaatatataatatgatgtcgacagacggctgttcgcaaagtaccatttttcccacgataagctgaatctatcatactcgactgccagtatttggtcagtttccatacacggttagctgaatcttgccttcacaaattaacagtttttttccaccctgcaagattgcattataataaacctgtaacatttaagctatcgacagagacgtcagtaaaaggaacaaccagccagtttgcaatagcttatctgcttataataggaagatgaactctaactggcagtggcacagatcactgtgagaaataagaaataacatgactggttccatttagcacaggcacatcaaagtataccttttcttcccagctataccactaactggaatgaataccatcgtatgtttcaatcttgtcaagaaacgaataaaaatatcttcatgcggacagggttccaacaatagtaaaaaaggaaaaaagaatacagacgcataattgccaatcctctactttcatctacatagctgtgcaacaaatgcttctctgagctgcaccacattttaaactcaatacggtattctgtgcaggtttgccaaaacaaaaaatgctaatgatctcgccccatcaaccactcaaaggattctgtcgaggtcgctgataaaattggaggctatagatgtcagcttctttccagtttctccagccatattcttgagggaagacagatcttgagatgcctgcacaacaatcccagcaggtaagatatttgtgcgtttcaaggatcaatctttgtactgaataattcagtagtaactcagtgtagtaatgatttgcatgctcggttgcttaaaaactaaatatgcaagaggtgacaaaaggctggcaattatttacagaataactacctggaatgatattctgttgatgagatccgcagcacttaaatccagattcgagtcatccatgtcgcggcggccaaaaagatcagcacttgaaatggacgaagaaccctgaattaaagggggaaaaaaaaggagaaccgtaagggaaaaaaaagatgcaaacttctacagaatattcaaatgaagtactagcacaaacataaacaatagacaagaaatttcaagtctggaatgaagttaagaatgcttcgacaagttcgaaggagatgcaatgtaatggtcctcggacaaagagatgctaaactaatacgcaccgcaaacttttgaagggacatttgagcgtctttctcttctctgctttgattgccaaaaaactgagatgatgaaattgcctttgcattagagaattttttccttgcttcgtcagtctcctgaatctgaaaggtattcacgtccagtgtcagtacttattaacataacaaaaatctacaagcggaaaactatttgatataataagaacatgctagcaataacaacagcttgcatagagagaactgacttttccaaagttcaaaaggtaattattctgtgaaatttgtagatgttcactgatgattaaacagcagaatgcaagcatgcagcaaataaaggaaggggaaatgacatcatgaaatcaaaacaagtcaagctagtggatgcagcaaaatctagtgcagtgtttacattatcatagaaagtaaactttgcaaacttatgtattgatcagaaaagtcaatctatttattatttacttattgacatagcacaaacattggttcaatatttacctgggtctttgtggcagctgtgcttgttttcttttggaacccattatccattccgtactcttgaaagaagtttgatgattttggtggtgctacgtggccagtcatttgagttcctccatttcttgaatcaactgctggctcattctccacatattcaaaacgtgaatgcaaggacgggccactttttgtggtggaagtagtcattactggggcagcaggttttggctcttcaggtttctgatcatacaggctttcacttggctgcaacataaaggcaaaggtcagtccttaatgttcacatcatatagatagaagagaggaggtatattaaatattaactgtgggaaggaaccaaacacatgcatacatagcgctaatgatccacagtgttacctttgtggtgagctttttaacaccaagccctccagtcttgcctccaatcttcttcgcaccaatggacttctttacagaagtggcaaaagtgggatgagtaggggcttttggtgtctgcgtaggtgctttttgcgaattggtgacatcaggttcctgcttcccattggtattctctgctggtgcctctggtagcttgaactcagggaagtcatcggatggattttgtggttgagacgctgcaactggcgacgatggcaagacgttatcagcagaactcttggcaacttccttttgcagtatctgcctgtacagctcagcagcccttgacgtgtactttgcgtcgaccttgccaccatctgtccacccgtgctgtttaaagaaagcatgggcacgattgttgcctccaaaagccatcatcttcagttgatctggagtccatgaatctaggtttgttgacctatagaaaatacatacggattgtataagagaaagtgaaaataaaatgggtacagttttgacatttggcaggcacaatactagtacttttgcggagtatcaaagcaaggcattttatgatttttttttttgtgtggtagaaacaacacaataagacaaacgtgcagcatcatgagatgggtagcaatgtagcatagccatagtagtgatcatagatatagcagccagcaatgaagttcaatatgttcattgcagaaaaatataacgaagtagtaggtgatttactgtgaatgcgcatatggatctgttagaccaaaatgtgtaacttgtgaatgcaaatgccgatgggatgaaggtgtaaagcaggtattgacgttgatggcccaagaacctagatctccggctgcattccccaccagatgggctgtaccaaaaataggaccttttttttttctttttgatgaaaggctcggccagatccaccaaacccagcaaccacaggcacctatgcgctgtaccatatcccttttttggggggtaaagaagaaaaagggaagtattattgagatcgttgagctggtctgcgctagttcctaggagtcgtgatgggcttagagttggttggtgatggaaagatgaggaaaggaatcggatgtgatggcgtgggcggattgcaaatcttgtgaggggagggggcgtggatcgggatgggaagggggggtagaaagaaacctgacgaaggtgatgtggacgccgaggctgcggtggacggcggagcagtcgaggcagaggaagatgccgtaggtgacggaggcccaggtggggttcttggcgctgcagtcgaagcacatctgggaaattaacaagcacacgacaatactagtacatgagatctgactcttgaggcgaagaagaagaagaagaagatctgagaggaggaagttaccttgttaatttcccagatgtgcttcgactaattggattcatatttcgatcactcctcttcttccttaatgtatacacatcttggtccttccttcaattgatgatttgcatccctctgatcgatcccggctttgtgttaccgcttctttttatcactttgatctttttattagttcatgcatgtgtgtgtgtgcagatatctttggctctcattttcagcattcctttcgatccattacatatactgacagattatatatatatgagtcgtcattaattctgacttcatcacctttaagcaagctagcaggatttcatggattggcatttgatgcttgcaccccctacccatatcgccaaattaatattaactcgatcttactcttctcagagttttactcctcgcatatggccgttttcagtattaatgctcatatctagcaactgtacatgtacacataactctttgacaggtttggaactaaatcatacttgacttcagttcctcctaatttgcttttcacgtttctctaatgagcgaggaatacttacatcaatcgatttccaattaatcaaaagtcttaactatttagtgttagtttattttcaagcaattaattaattacttgcttgcatcctttggcatatatactacaggaagaatgaggtgaagaaagtggtgtgcatcccggcgccgccagcgacgagtagccgtggaggtggaggagaggtgatcccgtctgatctatgggcatggaggaagtacggccagaaacccatcaaaggctctccttatccacggtaaaccggccacattttcatctgtttcttcccctctttttttttttaacacgcgctcacttaatcgatctgttcatatatatcttgtacctaatgacccgattcatacatgaagtttatttgcatcaagatctcatcaaatatctttcaatcattcctattcctcccattcttgataaacaattaatcactttctgcataaatatttttatacttaatgaccgatccaatttatacgaagtttattggaatcaagagatatctcatcagatatatatgtttcgttcattcctattgtgtgcttactgcttagttatattatgttccctctaggtattaattatattcattttatattatgtaagttcattaatatttattgctcatatctctgcaggtactgtatctctgggcaaaagcatcaaaatcatggccatccttttttataagctaattaactaaaaaacaagcagcttccatatttcttgtttagacaatttcaattggtttgtcataattaaacaacttttgaaatatatatatactgatcccctatgagtccaagtgtaagccatcttagccttttttaaactctaaaagtatgttgtttcaaaatttgcaggcatcttttaatttcaacttatatttatggtttcggtgtaaaaaaacttatatttatggtttctcttgccaaataaattatatttttctcataaataaactaccaatattttccaaaacaatataaataaagggtaacaaaagtcgcttgagctatttttttttaattcttgcacataagttttaaatggcttacatatggaataaggaagtacatatatatctgtacaccccccccccccccccaattttcaattcaaacaacattttttgttagtaagccacaactttgggtttattacttagctagattacatgaagttccccattatttgcttgttggcttataagtcattgacacaatttaaattgagttaattgcactttggtccatcttttattaccaaagtttcactttttgggctaccctctagctaatattttcactttagactaggtaagattatctttgttgcagtttggaccaccccaagtcacttttctagtgcatctaccctctaatcttgtgaataatagtctacatgtgagccaggaagttagcggtttatgggtgttgatgtggttaaagtcatttatgtgctcgagaaaagtttttgggatggttcaaagtgaaacaaaggcaaactaatctagtccaaagagaaaagatgttttaaagggtagttcaaagtgaaactttggtgataaaaggtcatttactcatttattttaaagttaattttaaattatcctccttttttattttaaacttatttccaaccttggctttttaccactaatggtataaatagtatataaaaggcctaacctaaaattattttcggttgcttcgtttacttttgtataacttatcagccaaagccaaccaacgtgaatagaacccaaaattaatttactgcacaatacacatttaatataccaaatctccaatgatccaaatcaagtatacaaaacatttcttttagaaaaataattcgacagcatcataatagacaatatgcttgtctattattgattaattatttgtgtagtgttgggtttcaaacttccaatggcacttgaacgacctaataagggtttggatggatatgtatggattaatcaaacgtatataatcacttcagattgtgtcggagtttcaacattgtaccgtctgaaggttatatatacacctatgcccaagcaatccctaaaatgtaaatctatcatcaatgaattcttccatatatacatggggatctaataagtgattcatcacaattatgacccaatgtagtgtcatttgtgagaaactaatactcccaattgcaaattgcgtaaatcaaacattattaattgttgaaatagtagatattgcaagactgccacaaattaagttgcttttacttttgaggcaaaaattggaacaaaatagctatgtttgccgttttcaaattaatttaaaaggtaaaaatgaaacttcaagtacagggatcgataagcttaatttactcacaattaattaaatttctcgatgaattaacaattattctggcttagtggactcagtttgacattactgtgccatcttcaaatttgatcaaaccattcatacactgcattctaagggtatatatatatctaggcacaataattttatatatatgcggttgatcaggaaattaattaaaaaataataattcactgatgagttgattttgtgggcggtgatgatgcaggggttactacagatgcagcagctcaaagggatgtatggcgaggaagcaggtggagcgcagccgcagcgaccccaacatgctggtgatcacctacgcggcggagcacaaccacccatggccgatgcaacgtaatgtgctcgccggatatgcccgttctcatcacagtactcatgctactgcctccagcagccgccacaagcaacagcagcagcagcagaccaaccagctgcagcctgcactgatcacaagctcatggtcttcttcctcctccccattcaatctctacgccgacgtcgtgctcggtggccaacaggccaacatgatgatgacgacggagggcgccggcgctggacttggcatccaaccttcagcagctgataggtctttgcagagctggaggagttggagcctgataatcctactatgatcaatgcaaacatgcaggtgtactccaccaccagcaggccaggggtaagcagctatgatcatcagtggcacaagttctaataattaaaccatgcagtacctatatatatatatatcagaacttcaatattcgagagaggagatcagaggaaattgaattctagcacgtacaattaatacatcatgactatgcaaaatttacatatatatgatatgatggtcgcctgtgcgattattagtgaccaaattaaagattgtcagagatataggcgtgtacttacgcttatatgtatcacgctgaggtatactgtatttacaagaagataaataaaatatccatatccctctagatgcttttgattggtatcctgtatcgactgatccatatatatgtgcaatatattagctaatttatgtcattagtacatgcgtgctatattaagaagagatagatggcaaaaaggagtcacgtaccacatctttttctggatggcttaaaaattatcacattgataggataaaaggatctatattaatttgcatcatttggttgtcatgctaagtgggctggaaacactaaaaaatctatgttggagggggcaatagtgttagtttttttcttcaaaatttcctcgagctagctataaaattcaatgtaaaatttgaagacaaggggaggccgagttggccccttcgccgtctccgtctccgtctctaggtctagattagattataacgggatagatcgatcaagatagttatagatgtatacatgtaaacagatagagatgtatattaaatacagtacgttctacttttaaatctagttctttctgcacaaaatctcgcatgggaggttaattagttaaaaaaaaacgtgtacatatatttgtgctttcatgttcggatatttgaaatacctataccactttaaaagaaggcaatggtgcatggtggcaaccaccgcccctatcaatgacatgcaggttctcaaatgtactctacaataagaagactactagaaacagcttgattcaactagatagagaagtggatatattattgtatatcgtctatatatttttcccacgtgaatatgtaataccgtaccatatgattctctttttaatccgtaacaaaatacgggcatattctagctactaatatgtacatatatgaactgcatgcagtccccattagtagtacttaatttgggaggtagttatattccatctgctgcaagttttcatactttgcacatgagaaaaatgaatgaattagtctggtgaaaaataagatgaagaaaatgctttaatgtggtggtttaattttttgctttgcttggttttatggtggtttgtagtttctagggttggctcacactggtggagaacgggg

SEQ ID NO: 7202 - DNA, 18198 bp, Oryza sativa
ttgctaattgccatcacaaatcattgcataaactaagtttcattaaccaaatgcgagttaagtgaaagaatgtgggaaggaaggaaagaacccttccggggccttgttgatgaggaagacagcctcattggaggggcggatggtggcttcttcggccccattatttgccgcacccgaaccatcgggaagctgccggcgccgtggtcggcaaccgcctccgccgccgccgccttgtccttccgcttcttggcgggcgtgggagagcttgcctggccttcaccggacggtcgctcctgtgggggatccacgtcgccgagcttcctcttggtgggcgtgggcttccccgctcctcctgtgtcgcgtttggcttccttgttcttcttcgagggagtcgacataggcgcggacgcttgctgcttctcgcgcttgggctccttgctgctctccttcttcttcttcttcttcgtgggcgtgggcttctccccttcgccggaaacccggtgcggcttctcgctcttggcccccttgtgcttccgaggtttgggctccggcggctggcgcttcggcttcttggagggcgtccccgcatcggccttcttcttacggttggatcccccttgggggttgaggcgcttgttgttggcgggcggcggcggtggtgcctcctccttggggttggggtttttgcggggtttcggcgtggagcggtccttggaggtggcggtggatttcttaggggtggaagcggaggcggaggcggagggagaggcgggatttgttagggccttcttcttcccggccatgtcttctccggcaccggcaccggcagccgcgaggttcctctggaaggcggcggccggagtccggagagttcaaaattatttggtttgggggcgctgatgctgaaactcaactgattccagtctctgttgggtttttgactcatccggttcacgtatttgcaaatgtcatcctcctggatcatttccatctttttatcattgaagagaaggcttttcccaaatattggggttattgctcgtgtgtcattttttaaatctacggaagccacgtcaccgcagtatgtgtggataatggatcatgagaagcctgattgagaaatgtaaatgaatgaaaaactgagatgaaatgaggtactatctccgtcttaaaaatataagtatttttagctaggaaattatttccctaacccattagtcatgtcttgagtgtaaaattactcatttatcttttttctttctccctgccatacaaagaagaacccaactctcattggaataattaactatttaccactcttacgagtggtgataataaatttgtcaataaaatcgcatgtcatatcattaggttactattttattgatttgtatcatcgagcttgttttattctgtttcaattaaaatgtattgtagtagtaattatttacgtctccacgataaagataagaacgtgcattgcaggtattaaagattctaaccttttctcattaaagaacaaatcactgtatcacgacataattctttttctaacgttcgatcttctttcaacaacttcacttgagtctcaaatttttccagtgcgtactacccttttttttaataactaaacattattgcaatccagattattaagctggattataataagttataataaaataagttattagctgtttgtttctttggattattagagacatatattattggtttcgaaaggctgatgtctctaataccctaagctattgtggagtgggagaaggatgaaatggcggcgatgacgatacggcttggggaagggttcgcgcgcgactagggagagaggaagcggatgcatgcgcggctgggggaggcgccggattcgcctgcactgtggagagaggaagcggatgtactcaatctattgggttcgatggaagtggtgggtaatttgcatacaaattttaagattagtgggtctttagccacctactaatttgaaagaagcacgtttagaggagattatcatattatactaatctagcttatagattattataatgatctacatgattgtttcagattattgctaataattcagattataataattctaagctgaaataaatagggcctaaacaatgtcatataaataaaaaatgtagggagtagttaagttgttaagctagtaagaaaatacaggagtagattgtaagtgttactttagtttttccatatactccgtataaccaattgcatacttacaccaaaacaatacaatatgattcctccgtttcataatgtaagtcattttaacattgcccatattcatatactccctccgtttcatattataagactttctagcattgtccatattcatatagatgttaatgaatctaggcacatatatatatatgtcaataaatctagacatatgctaaaaagtcttactagtataatatgaaacggaggaagtagatgttattgaatccagacatatatatatatatcattaacatctatatgaatatgggcaatactagaatgatttatattatgaaacggagggagtatctattatagagaaggaacaaccacatataattaacatccacgttttatttttttctatatgaccacttgtaatccctggcttgaccaacaacatactacaacaacataggagtacataccaggtcagatttgaattgtcaacgaaacatggcgcgttgcaacgtgtgcgctgacgtgtcgctatcctactggaacacaccacgtcaatgcgaccgactcgtggcccccacatgtcagtgacacgcaggcaggcaggaaggcacgcagccaccggagacaccaatgcacgcagctttccgttgcgagtttgcgacccatctccatctccatccatccccttcccccttccgctgccaacatctcatcggcgattcgattcgggtcaattagggtttactcgagactcgagagaggagagctcgcccgctagggtttcgcgggagatggcgcaggcggtggaggagtggtaccggcagatgcccatcatcacgcgctcctacctcaccgccgccgtcgtcaccaccgtcggctgcaccctcgaggtctctctctctctctctctctctccgcccgcccctctttacatgattctactctctcctcgatctggtgcttgtttgagtgcctgcgctgatggcctaatgccctccttgcctcgcagatcatttcgccctaccacctgtatctgaaccccaagctggtggtgcagcactacgagatctggcgcctcgtcaccaacttcctctacttccgtaagatgggtatgcgcctcttacctttctcttacacttgcaagattgtcagtttacaaacagtatctacttatatttactatttgtgcggatcccaatcgtaatttcaccacgtttgcatagtagtaataagagttctcaatgataattctattattgtattctgagggtatcatttcagaggtgtgaagcatagggatgtgaagttagaacggaagtattgttctgcccatgactcattgatgaaggcttatgcgcctacgtgctacttagagaatgtacagtaaggtataaagcgctagtgccaagagtgctcatgatgaggtggaggagagaaggagctgcccctcatgcaagaggcggcctgtacatgtgctccatcaccaagagagggaataggaagataaccaatagattgatatcaaacaaataaaataaaattggtattgtcctaatcgatgagtagataatgtgggcaaaaatagaggcatcagttacctctactattaaactcgctctttagcgtccttgttggacagcttcaacctgtggtattgattagggataagtgcctttgggctgcattaggagtttaggtgggacctcgtcaaagaacttatcaagtggtatacaatttgcaactctttaattatgatcacaatgtatttcaaactcataatgtgtgaaagctccttatacccacccactcaaggtccttgtttgttttcattgaattaattgtgtctaccctgtattttgttcccctaattgtatgatcctgatgtatagcgcatttagaaaattatatctaacatcttaccacgtctccagttaccattataagttaacagcggatatagatttatgttatcgtgctaatttatgtgtcctcatgtgacaccatggaagtgcttgtatattattagttcgctacacgtgtgttgcgtatgtattgcattataagtagaacatgtaagcgctgttattctagcattattgaataatttttatgcataatttaatccctttactcttattcctgaatccatcttttgttgtttccagatttggactttctgttccacatgttttttcttgcacgatactgcaagcttcttgaggagaactcattcagaggaagaactgctgactttttctacatgctcttgtttggcgctactgtcctgactggcattgttctgattggtgggatgataccttatatttctgagacatttgccagaatcctgttcttgagcaattcattgacatttatgatggtacgagattagtacaagcattatacttggtttttggttttctacaccatcgttaggggtgcaggacaaatcttagggattttctgggctctgaaaatagtcttcttgggtgcatacttagaagttgagttttagtaattcctctcgtatggacctgcaggtttatgtatggagcaagcacaatcccttcattcatatgagcttcttgggtttgttcacctttactgctgcttatttaccttgggtaagtatttttagtttcctttccatgtaccacaacatgactacatgactaatgcacacttgattctcatcttaagttaacttcctagagcctcttcatataatcatttttttcatgcctgaatgttaaatcacacgatttgaaatctgtaattgatttcatatgttttatgcaatagaattatttaaaacctcttcaatttcaatatttttctttgtttgtagagcaaaatatatgtttgattttttcccctattagccaagagcccaaaagcaaaccattttttttcccaacagttgtccatttgtcctaagcattacccaacaaatgcttttctgttggtttgttttgtgatgaatgctctcactatttcacaacatgaagtagtagtaactttatgttttggtgcaagaatggtctatttagtgtgtaaaaacgtcacaggaacttggtgtaaaatgctagacctttcctttaccatggagccaatttgttgttccagtaggtctaggttcatcttaaaaatgaatgctccctccatttcaaattacttgtcgttctagctttgccactagtcaaacatttctatttttcaccatccatttttggaaattcgtgtaggttaacatgcaatatatattatggaagtatttctcatggtgaatctaaaaacataaaccttatgatgttaaactatatgaatttctacaagttgatgttcatataaacatttgatttaggacaaagctagaacggcaagcaatttgaaatgaggggagtacctcactagagtgggaataaatttctgtattcagtactgtgtgataaagtaaaatggggaattagcaaatgtaaatgtgctctctttacagaatgccttttggatttgctaagccttcaacataaactggctgtgacaatgtacgctgaaaaggttttgtcaaccaactcctggacatccttttgcatcgcgcacatatttcattgtcagaatgtattattacaaagtagagaaacagaaactctagtggctctgatcttgtttttgctttgtagtgatccttgattttactttttcacctgatatcacacagatgaaatttcactgaaattgttcaaagtttattcaactttatatcagagatgagaaacagctgcgtgaattgttctcttttaaattgcaggtccttctggggttctctattcttgtgggaagcagtacatgggttgatttgctggtatgtttcttatcgttatgatgaatatcataatagcactgtgattttttagtgtctgtgctgccaatgctgcagttaaagaatgccttgtagaattgcaagctcagtatggtcaacggttatttcttctatcatggttttgtatgaatattgtttgtttcgttttccatgagctacaagcctgtgactggtttttattggtcatcttgctgtccaacttttatttggcattgcttatttgcaagtgtgacataagcctgtgttaaaagcttgttccattgtttttgaatgcctgaacctgggctctattttgcattttctacccagcttgccaatagatgtttctgggttagtgagctataacctgatgtaggtttaactagctacattgagatggtactagctattttcaatggttaaccttggtgttgaagtatggaagctgaaaactttattttcaacatgttagcatatttttaacagaaataagctattggtctttttgctgtctatgtgtgacgatgctggtagacatagcagcatgtattaatggtaacttggtaatggagtgctggctggctcgtgtcttctctgactggtttgtatttgccaatatcatgaacttaaaatggatcttatttgcttgtttgtattaacagagactttttcctcagagataatttatgcctgtgtactctcctgaccatcattttcatgcatctgtatttttttaatgaattattagccatgtccttattcggtatgaatgcctgatgtattgactgaattaaaattgtcaatatgctgttttcttcttggaccatatctgtaattgacaaatattgtttctttcagggtatgattgctgggcatgtgtactacttcctggaagatgtatacccgcggatgactgggaggcgtcccctgaagactccttcgttcatcaaggcgctatttgctgatgacaatgttgttgtggcaaggccacccaatgctgggcttggcgctggagcaaggtttggtgctatgggtgcagacccccaggcccaatgatcaattgccattcgaaggcagttactgattcgagagttcttttttttttttcatctgttcaaattgcgaaattgtacaagcaatgttcccgtgtatttatacaggctatagatcagagaattattgtgcataagaaagcatttagtagtatctggggcagctaaatttcttaactggacacgaagggtgaaggaaatggtttacgagtttcaaccggctggacaatgccgccatccttggttgcagaaactgatcctttttgcgacgattgacatctgaccgggatacttttcaatgtggtagtctattggtaacgataactgtatcaatcgttgtgatgtttgtccttgcgatttatggtatcagaaatgttagaatgttttatatactgtttgggtttgaagaatattggtcgaagatgaccctcgaaatgtacagctatccgtcaaagtatttttttttaaaaaaaaaacatgagtggataaaataagttacgtgcaatgatattcataacaaaatattgcaagtacatgcgagtaatgattcttgcaaattacatagaaagctattaatgtaaaatatcacgtgtacatgataatattgattgctaggagatattagctgttggatatatattacaaaagacaaccactagttaccaaatcgtccccaaatacatttcaccgatttgacttgaatacaacagatcaattttacttgaatgcaacagatcaattcataagcgtgccacagagctgaagtacgataagcagcgcgggttacgcggcgcagtctcgcactgaaagaagtgtttgtgggtatatcatcaactaccccatttgatcaaatcctgtcttaaaacataaatcttgttctaaatataaaatgtttatagccagatggaataataaagagtgaattttacaaaactacatatacatgtacattgatcaaaatatataaaaaaaatacagatttaaaatattatattttaaaattatcacaaaactatatatgtagggcctcatatatttagatgcagtatcaggagatcggtcccttgtgcatcttccccgtcttgacttgctccggttcaattcaaatcacctcgctcgccgtccgtcttcgtggagctttcgaatacgaggcggcgatcgatgcattcccgccaccaacgcctcgcgtcgctgacgaagttgctcacttcccacgtcaacgtcggccgtcaccgggatgctctcgccttcttctcccgcatggtctccgacccctccctcccgccgctctccgacccctccttcgcctacgccttcccgctcgccctcaagtcctcctccgccctccgcctcccctccgccgccgccgccgccgactccctccacgccctcgccgccaagtgtggcttcctctccagtccattcttcgcctccgcgctcgtcgcctcctacggcgcctgcgcctcccccgccctcgcccgccgcctgttcgacgaattgccccaccgcaacgccatcgtctgtagcgccatgatctccgtccacatccgatcgggcgacctcgccggggcgctgcgtgagctcgatctcatggatgtggcgccgaccgcctcctgcttcaactctgtgatcgccgcggttgctgagtccggggaacatccggcccgggccatcgatctctaccgacggatgcagagaatgggcgttctcccgagcctcattactctgctggcgctcgtcccctcgtgcacggcgctgggtgcgttgagctcaatcaaggaggttcacggttttgctacgcggcacggcatgtttgcgagctgccacctaggaagctccctcattgaagcatacgggcgatgtggttctctggctggcgcacggaacgtgtttgaccaggtgcaggagcgcgatgtggttgtctggagctctattgtatcagcatatgcattccatggccacgcagatgttgcaatgtcgcttttcaggcatatggagctggacaatgtccggcctgatggcataatgttccttggcgtattaaaggcttgcggccatgctggtcacgcagatgatgcattgaagtatttcgatgttctaaccaaaatatttggggtcgaggcctgtggagatcactattcatgcttggttgatgtcttgggccgggcaggaagactacgccaagcttatgatgttatacagacaatgccagttaaggttactgcgaaagcctggggtgctcttcttgctgcttgcaggaaatatggggaggtggggttggcagaggttgcagggagagcattgtttgagattgaaccggagaatgcaggtaactttgtttcacttgcgaacatctattcaggcatgggtatgcatgacaaggcagaacaggtgagaagggagatggagcagcgaggtgtgcggagattgcctggaagcagttggatgatacattgcaagtcaaggtgctagcatcatttccaatgaattccttttgcaatgcccagttgcctatatgaccattacagctttattatcacccaaagcatgaattaactgactgttctgtttgctgcagtgaactgttctgaaaggggaaacacactttgagaactgcatcacagactcacaagaaaattttatcaagatattcaaatcgtttcgtatccatgaaaggtatctgagacatgccactatgtagaacacattttacttgggtcaggttcctaactctatttatcacaattgtgtcatatttaaatcaaaactaactgcaaaatagcaaaagtaacagaaacatagtgttgggtgaatgttaactgtacatccagcagaacatcaaatttccccatggtaatgttgggaagtcaggaatttgtgctgacagctatggttttgtttggaaaatatcatttgcattaacaaaggaaaaatcacacgccctttcctgtggccctgttctttaatttcacttgctttaagattgcgttacaattagtttacatgttctttacatttcagttaagccactcattaaaagatcactaaggttactgcttctatttttcctctaaattttttgtgcttgtttattgtgaagttagattgatatgatttggccagtttctggacttctgaactacctttttagccttttaagggcccttcccctagttatttcttttcctggttcatatgatgcttactttaatgcacctttacaaaaagcatgtctcattagaaaattgcactaagcaagatccttaatatctttcatgtattctttttctccatctcatctagtgatcaaaaaatattattttataaaggtgtcagcccctgttatgcttccattagatcagtcggtacagtgccttgggcttgaaaatatcaagtccttattttgcacgagtagtgtgagttcattaatactatgcattagagatgttattcctcagctaaacttcgtgcaaatctaaatatccattttcagtatgtctgtaataaacaatttcaccatatattattaccgcattttgttttggcggagggaaatcagttgtttccagtctctaccctgaaagcttgacaagagttagtatgatcaatcacttatagcaaaatgttttttgtctttttacataatcagacaaagtgaatacaaatattgaagagcatctagataaattgcaaagttccaatagttggaactgattaccgtcaggttacttcagttgaggcgtacaaatgatggatgagtacagctaagttttgcagttacattataaatatgaagtttatccatgattgtaattttgtagaatggattatgtactactcactgtgtcgtgtaacatttgggatctgacgcctgatttaccagaccatgactgatggtgagcagtacagttttcttgtgtgttctgtaataatatggaagagcacttacctaaagtcttaccggagaggtccctctcaaatagcttcgttgtagccttgtaggtgggttaggagcctagggtgcatcactattgctagtggtgctaggtcccagtacagtggcatattggctggatgatgtggaagtaattctataaacctaatttatccaacatgtattgttcaacttctgcactagagagcctaaaattgtgatgctgctaactgctaagggtatttagctacccacacgattatattatgtttccttcatgaattggagcagaatctgtaaatcatatatgtatctgctatagctacccacacaattttcttccaccgtacacattttctgtctgatactaatttcatagacctctcgatacatcgtgcttgttttgatcactaaatttgcttgttcccatcagtatctttttctgtaccaaattcctcgatctgcttctacaaacatgtggtgagtgtatgttccagattcgatatactaggccacgaaccattgaagaaaaaccaggaagcgagcccaccaatgtgcataacaatttttccgacaggatgtagtgcgatcattaaagttgtttatctctgttattatttatgcatgtgggaacctccaagtgggaaacaggtgaattggattgctcatgcagctcaactgatgccaaagttgaacctagctagctaacatattagtaactattggttgaattgaaaacatgcttgacacaccgttttggataggaaagactggacctaagaactagttgccttgtgctgatctatttgctaactacggatttatttatgattacaattcttttgctcccggcggtttgcttcttgtgtagaattgtaaagctgttgggtcattctaatgtgttgcagtgtcctattatgactgaaaaaaacttgttcatggcacttggtacaccatagagtgaagtttcccttatttaggctagcttccaggcttaatacagttatggtcagcagtcacattttttttgacatcacaagagcagccacattttcctgataagttgacatgtgtggcatccgtacacaagtgtggatttcgtccaggatactcaatctgttggcactttatctattgaaaagcatatagtattcaaaaggtgaatgatgaagaacacttagataaagtgatgcatgttcatctcctatgtgctcttgcatagtaggttcatgttgtatgtcaatctttttgagcccactttctgattcctctttactcggttaaagctgtaaactctgagtctcagtaattttttttccttagaaaatccgcatggagtgtttcattgccaacctgctgccctgctaggctgatatgtttttgtccttctgaagctgaaacatttcagtacatcagtaaatcatttcatcatcctttgcctaataaacatttgcttgtgaacatacctgtagtttttgtccgaagtgaaattcattaccttttctcccaccctataaagctatgtgttcatataatttaaacagcttctttttcttggaaaagacaggcagtgagatcagcatcaagcactaccagcgggcaccagcagatgcatgtgggccacagcactagccagtaccacggatggttccgtcttcctggccgtgcaagccagtccacttctcatcatcctctgtccgtgcaaggtgccctggctgcaagtataaatacccagtctccttaccttgcaagtctgggctcttaaccaaatgagcaggagccaactgatgcatatgtataagcttggagatctgacgcctgctccatccatgacgattccaatggcacattcctcaaggccaactctgggttttcccctagggacggcgctcctgatctttgttatcttctccctcagtggcatcttctcatgttgctaccactgggacaagctccgtgccttcctctggtctcggcatcctgatgtgatactccaagaaggccagcacaccgtcatctccattgcgtctccgagcaagacaacatctgatcacaaggtactacagtactaacgatccctattcatatcttactttgatcttaacctgaaatgatcgtttcttgtagacttacagaaatctaagaatgatccccatgtattgttgtttgcagaacgagaaagcagagaaagagtgtggtttgcccgttattatgcctggggacaggatccccaaattcttcgccaggccgtgcccgcatgagaagtgtttgcctgcagcagaggaggaggaagctgaggtgcaagtcaaatgttctgttccacaatctagttagtagctgtaaatgaagccatacagagtgggtgtatataagcttttattagaacctctaaaaaaaattccatttcctctttggtcctatgaaaatattcaatttcttcattgggtatctttatctttggagttagaaaagtaaggattatttcattctcgcaaactttatgaattcatggcatatattctgaccagacccaaatctatgagctcaagactaaaccagaaaaggtcgataaaataatggatggagaccatattctttctgggtcttatgaaaactgttgtcgatcttcaagcccatcccaggtgtggcactgatgcataccagctactggtggcatttggctattctgaagtatgaaccaggtaaacaaaaaaggctattatcactccattgttcaacgatgagaattggtgaaaacataagaggtctgaattataccatttactactagtatacataatttcagaattctgacgaacgtaacaggacattttcatatatattttttgcctggtcggccgatgagacgatcaatttcattaaagacattttcattttacgttctgatttttcttcccccatggaccatggtcgtcgttgtattatgtccggagaacgatttactttggtgtgattgatcataggaaattaagctgctgctattactcatgagctagagatgagttaacatgtaattaggtgatcttttgtttgtgtaattaacgcgtacgatgtgggccatattagcgatcgatggtgcgtatcgtgggtggaggcaatttggatggggttttgctgttgcaatgcgtgctgatggttgcccactttgctggactgcaatccgtgtgcagaccgtgtacgatgcatatggtattttgccgtgggttttgcatgcactttcttttgctagagccagtgccgtgcacataattaagtgggatatatataagtatgattgtatgcatggcacataattatggatgttgctggaaatctgaaacgagatcgcgatggcaaattggcagtgtcatacagtaaattaaacaatccaattaagactgtatctgtatatatgtgtagtatggtagctgattaattattttctcatcgtccatgaaaatgaaatagggcccaccctgaaattttaaattaacctgaaactaattcggctgcaagtttaatcacacgatcgaattttgcgtttagtgttgagaaacatccacgagtcttccggctagctccacgagatggtggactagatgacctggattcgaagcttcaccccttctacttatttgatattatatcattctctaatattcgtgtcttttttattttgcgtttagtgctaaaaaatcaatcagttgcaattggacggtatagacggggagggggacagcgacctaacattcttggttatctgcgcatgatcgattaatcgatcgatgttcgatggatatctatgtgcgcttgcttttcggctttgagggcatgaagatagaagtaggtaaagtgcaagtactacgtagtaggccaggccagcaaggtcgtgcgtgtatatatactcctatacatgacagccattgattaattcagcggcagtatgcatgcttgatggtgaaacgtacgctaatgcatcgtacgtacatgtacggcggcttagcagctggctatcgtcatttgcaagactctaattagcgatcgatcgggacgtgatcctttaacttactattctctgattttgagaggttaatatacggatccaatagttaatggattcacatatatcagagattcacgtcaaaaggcagtacacgagaggagctctttccgtatcgatctaggtggacatatgatcccataagctgataggcatgccaattaacgtttacgtataggcttggcattaatagccttggctatgcctatgctttgcataatagagtgagtacttactattacttgctacaggaacaccacggcacagtattatttttgggcctccagccctccaccgtgccaccgtggccgacggatgaaactccaattaggcccacaaacataggcccatttataataggctaatcagcccattaaaagtactttttcttacatgggccgaacctaacggcaaggaaggcccaggcccatctgagggcgagcggtgaggagagatgccgcgtcacctcccctcccgcccccgtcaccggcgacattattactactccggtcgaggccaacggcggcggcgccactgtccctctccctctagctccgccctccaatcccccgccacccaccgatgataccccgtctacaccgtgccattgcccgccgatcactgctaacctccaccgccctcctccccgccgtcgcccgccaccgcgatgcgccgctgccctccgcccccggcctcccccgtctgctccaccacgcgccgggggcgtccgatcaagcccggaaatcaggtaatcgccctcccgcgtgatccgatcccctaccgctccgcctcttcctgatcactctcactggcaaaagtgcctgtacagccgtagcatcttaagattttttcctcttttttttccccgtaagcaagctgccgatcattttatctgatggatgtaattccacatcacgctaccgttcgcgatccataatttcgttttttcgtctgaaatccaaccgcatatgtgacttttcttcttaattttggttttctcataccctttgtgttctatctgaaggtcctcttacgctctacagggatctggtgagccaagggaaactccaacatgacatctaccaggaaaatgtagcaactcagctggacaacttacttagacgacttgagcaatacgagatggaaatggaggattaccatgtaagctgcatgtgccttgtgttcactactactagttactagtagtacctttttcacatttttttcaataatattatttctgcataaagtgcaggcaagactctctatgtgggaaaatacccgggagaaacaaaggcgaaggcttcttgttcaagaagctgaggataaacagcgtgatggggtgtggatagatgagaaaagggggtttcttgacaagttagtgtcaaggtgatattttttcttctaactgaaatctacccattgttccccatgtggtattttcactaagtcattcttgaaattagatgaagttccactatcccttttatttatctatagacttctcttctgacttctgactaccaactccttcaataacagtagcactaaaatgacgataaacaagtatcatgtacaatacatgcactgaacttctgacttctgactaccaactccttcaataacactagcactaaaatgacgataaaacaagtatcatgtacaatacatgcactgaactttgcttgcgaaaccaagaacaatgtaactaaacagattgttcaacttgttgcatggtgttatttgacttttcgtttggtgattaattccaggaaaagaagaggaaatatagaacctggagttgggaaatgggtctcatatttgaaccgagaaaagaaactggataccttggttggccagaagcctgttgcacccattgctccgaaaggaatatatctttacggcaatgttggaagtggtaaactaatcaataacttcattataatagttttttgatcccatcattcttctaatatcctaacatggcctgcatatgaataactaattctttctcctggttcatatttttaatcaaacactcattatttatcatttatcgtgttaatgttgtccttttggcaacataggaaagacaatgctgatggacatgttctatggggccacagaaggtcttatcaagcacaggaggagattccactttcacgaggtaattagtttagaactatgcatggtagtgcctgttcattcattggaatgaacgcgcaactattatatttgaagaacaattgttaagaagaaaaatctgatctgttgttcatcgagcagtgtgcatgtccaactgaactcaagttcctagctgcactttgtgtgctaggtggctaggaatagcagaattctgtgaactaacttgttgaatggttaccaacatattcagttggtgttctgttgtttagcatttttctgaatagtgttgagttcctttttatgcaggctatgcttgaaatacatgatcatatgcatgatgtatggaagagacgtgatgaggacaagtctattgagtcgagtgctttcagttggatatcaagcctcccttttgatgggaaaattaaggagtggctaattggggaagagaagtacaaacaaaatacacaacaaaaccatatccttttagctgtcgctgacaaatttcttgttgatagacaagcaaataagagtggagcaagcattctatgctttgacgagatacaggtacatgaactttgatattttgaatattcaagtcattttcctgtatgttattatttctaaaaacgagaattggcattcctgccacagataggatcttgtttaccagattactcctaggttagcaatctgttgcaattacataaaaggagtaaagaataatcttgttgaatatttcttgtgaaatctaattttgcttatcttggctgtctcttcactaaatcttttactttacatagtgtatgttatatagcacgtgtgctatatagcatctacataatcacaagtatatggaaaaataattgatcgagtgtcagttattgttaatggtggtaaataagattgtctagtaaag

SEQ ID NO: 7203 - DNA, 5705 bp, Oryza sativa
tgtgacaggtacttgaataagtaactggaaactaaacagcccccttagcttcgcagatggtggagacaatgacagcaaagaaggagggggcagccttaccttaattaattcagcgagatttgacagcgatggtcacgggaagtaacgcccggggcccacatgtcattgtccgcatcgcacggtaaccaccttttcatttggctgattgattggcatttcgctttgttgtgtcagatgagatgagataagcagggaaaagtagttgcctcatcggaccacacagccccgccccgcgtaatgcatgtacgcatgcatcgtcgctcgccggccacactctactactctaccacagctcaaactactacccttattaatcaccctctattatagtaactgttttgacactttgttgtgagttttttcttacccagtgataacaatatttttacccccaagatcgaaacgccagtgggctccttcgagagaccatattggcaaaagttgaggttgacgaattagaagcttggacggggcgtgtattgagattaacgtaaccactatatatagcctataggcaaatcatcttgttatcgacgggtatcaaatacatgtacctttaaaagaactactccctccgtttcaaaatgtttgacaccattaactttttatacgtgtttgaccattcgtcttattaaaaaaaattaagtaattgtttattcttttcatatcatttgattcactgttaaatatactttcatatacacatatagttttacatattttattttttttaataagacgaacggtcaaacatgtgctaaaaagtcaacggtgtcaaacattttgaaacggagggagtattaaattttaaaagaattattaaatgtaaatacgagtaatcttcacttttaactctaatgtggtgggtagatttcaatacaagaaccttaccggttgaattagacttcaccaatagattacaatctcggtagatgtcaccacttacattgctccttaataacgaatgtagctacccctttgaatcgtagtaacaaaaaaaaacagaagaatagaaaaaacatataattctaacaggaatgtaagtgtaaaatagcgaattgctaagtacaggaaaaacacaacaatgatcgtttgattggatcacaggaaaaatacaataatcggatgagagagatagactcaaaggattttttttgctaagtttcctccaaaacctatcctatgcaataagccatcccataagaattttgtaggatttgaaaaaacttcaatcctttaaaccaagggctaaatagaaaaatttttgatagatttcaatcctataaaattccttcatagttcctttaattcaaagagatcctatactttcttcattctagaatatgagaatcttctatgaaatctagaagtaatcactttatctcaaaatacaccatataaggtctggtttagttggggaaaatttttggatttgatcgtcacatcagatatatagacacacatttgaagtattaaacgtagactaataataaaacaaattacagatttcgccagaaaattgtgagacgagtttattaagcctaattaatctatcattagcaagtgtttatggtagcaccatattgttaaatcatgacataattagacttaaaaagattcatctcgcaatttacacgttaactgtgtaattgtaaagaaggcctaagatcttattgggagaaaagtgattattactactactccttataatcacgacagataatcttgttcccaagccgacccatttaaagccgtgcacatggcccgaggttctccactcttctcagcccgcacgcacccaccactctctctctttctctagctagctcctcctcctcctcctagtagtcgagcacacactactacactacactagtaggagtagaacctagagaaaatggcggcggctgctccgccaccgccgacgccaccgccagcgtccagccccgcgccaccgcaggaccccgctaccggcggcgacgccctcgcctcctatctcggcctcagcttcgccttcttcctcgcctccctcccgggcggcacccccgccgcgcgccacctcgcctcgctccagtcccgcggccgcgtcctcgccacgcgcctcctcgccgccgaggaccagctccgccagctgcgcgcgcgccgccgcgacgacgcccgcgccaatgcccgcgccgccgagatcttcgccggccaccgcgcctcctggatggacaacgagcgccgcctcctcgcccgcgccaccgccgccaccgacgaggccgcctccctccgcgcgcgcctcgccgaggccgaggccgacgccgccgcgctgcgcgcccgcgtcgaccgcctcgagcgcgaggccgccgagcgcgacgatctcatcaacgcgctcctcgcggccacgcgcgccgccgatgccgacctacgctccaccgacgacgacccggagccgcgggacgcggagcagcaccaccaccaccagccggcggctgcggcgttggatttggatccggccgaaccgcgcggcgctgacgccgacgcggaagccctggctgcagccgcggctctctacgctcagcagcgccagcagcaggagggtttcggcagcgacgacttctacacggcggcggcggcggcggcggcctcgggaatgcagcagccatggatggagcgatcaaaagggtggcaggtgagacgacaaaaagctggaatccatcccctttctctcccattgaccccttccttgtttcttctcttctctactaacacgttgccttcccttactactactcctacactaccacttacttccaatgatcttactccatcgagcacttatattctactatcttcccaggaagtagtaaatctattggtggattgcttaatgcttatccttttaatggctgctactgctaatggatgattagctagggcgcatactacatttgggaaattttaatgttactgttagacttaaaatttttgtatgacttaaaattttcacggcacaagtttttggtgtgtctgtttttgccagaaaacagataacagtgcctatcaaattgattgcaagaaaagttcgcattcaactgcatacttaatcacacataactttgtacttgtctcagaaatgtccaaaccgcctcgatttactacattttcttgttccccttgtccaaaccgcctctgttagtttgggtttagtagcagtaggcttatgccctttatccattatctgtgaactgtaataaacaatcaaattttgatgtagttaatgctaagtcttaggtgtaacatcctgtaattgctctccgtgcacgatttcccagttgtgatagtgataccaccatgaaccttcatacaccatgtcatattgcagaacatagaacagacaaacgaccactttgatagctttctgcatccactggaatcctgatacaaaacctgtggggtaaaccatgcaagaaagctacctgtaccgtatctggctcatttggaacctgtgatgcgatcacaggattcctgttgttgctcatgctaacagtgccatagaagactagtactgcactgcaccgaaataatcagatagccttaagttactctgtaaaaaaccatcatcattttattattctaaacatctcgccttgttataatgtcatgtagtctcgtagccctgatggattgtgcttatttttcatgatgcatcatttgatatttattatagagcacacatttttctcgaactcacaggagagatgcacataattacactaagaagattttatagatcacacttgataatcagcaaagcttttgtgctttataactgaacaaatatgtacctctcgttagcataattgagtggttcacataaatccatctcacactagtaaaactaatccctaacctaacataccgcacatgcccactcagtttcttttgttcatattcgttaccacattgagtacacatttttcttttttgattcatatgattgcaacctgtattttctctcctttctttgattttctgtcttcagatctgtgttgcaggataatcaaagttaaagatgatagtttattgttaacctttatggcctgaaaaagcacaagaatttaaagaaaaaaaatcaagttttgcattaagtaggaatcagtttgaaggtcaggaaggttgatttcatgggttctatatgtacttcattctgtgtattctaaaatggaaacagttttaattaaaccattagaaactgttcggtttcaactaacaccattgtttagttgctcttttctaaaatgtataaatagcaaattcttggaagggtagggccctgttgggagcatcgcttattacttacagtgaagggaagcttagctgggtgggttagtggaagctacagccttgttcattagcccatggccatatgctcatcttctagtgagtagcaatataggattgatatgtgggagtccataataggtgatgttggtgctgattactgctcctgggtgtctggttactggcatctggcagcattgttatacgcagtaatttaagatctattagggttgctggagcctgcacgtccaacaagactgctgcatacaaacactcagacatgacgctcatatgttaattgtaatgatactatgaagtgcagttttcatgccttggtcgacttgaaacagctgtctttttggctcagtacagtgatacttaaaagacacattttgatttaagcaagaatctatgcttttgttattggcacttaagcgaccactaatttgcatatatgtattttttttctagatacacagtgttacataaattgaaatgttgtaatggtgttgccacttaatgcaatgattgatttgcattaatatatatttttttcaataccagtggtacgtaaatggtatatataatcttattatcattgttctacgtaattatgttcatgttatatatggacacaaatcctaggtatcaatgtttgattgttggtgtcagtctgagcattgttagactagtaccctttttaaatttttatgtttgtggttcaatttttaatgttcatcttgtaggacctgaagtatgaaacggctgagccgatgtataacacaaaacatgctgtaccacggtaggttggcacttttcaattgaggcacatggtttcctgaacttgcaaatgaataaacgctagttaatgtttactctctaaacatcttccattaacaggagagaatcaccttggaaggtggatgtggaatcgtcaggagttcctgcaaagcttcaactgcttgagcaggaattaattaacctggaaaagattggaaatggagacttatccaagataccattggtgatgagaaagcaagtgaaaagataccaaactcttgctgggaagattgatgatctttgcaaaagaatggtaagcatcatcttttgatactgtatctagtcttttacttggatttgctgatactactgcataacttattcatagtgtataactgaagatgtgatgaatacattaatgtagcatatggctgttatgctaataaatacatgcttgggaagatctgggaatttgggtgttttaaagatagcggcgactcctgtctgttaaactagtcattctcggttaatttgtaggg

SEQ ID NO: 7204 - DNA, 13936 bp, Oryza sativa
  unsure (1)..(13936): unsure at all n locations
atgcaacctcgagctaccatcagcaacattctaaggtagaatggctccccagcacttggatgaatatgccttaacctccctattttggttcctcttttacgttttgtccagacttttttgtcggagtcccagttaaacttggagggaaactcacagtatgtgagatccctggcaaagatgtgtcgttgattagcaacaaaccattcagtaagcatagttctggaagaatcagggtcttctataacctcttcaaggtcaacctcttcatggtatatcacaaactgcatattgggcatgtgcacaacaagccgctcaacagaaggagttcttccatgtatctcaaacccatataatctccagtatgattcacaagttgatagatatctagacttgatgtactgcataacctcatctatcccaccattgttggcgctgctagtgtctgcctcctctaaatccttctgcttgaaagcaaacgcagtacaatcacttcctttatttacatacttaaaaaggtacttgataaggtacgttttattgcaccattccacattgatatgaccttgaaatttcttgagaagagctagattataagggacaacccaccgattatccagcttaactccattctttaccacatagcgaccattgttgcgtcatcgatagataggatagccatcatcatctatggaagtcacatcacagaattgttttggatacccctttgagcacctaccatctttcatgcaaggagaatgtggattgtgctcaccacatgggccatgtatcatgaattcatcaacaagaccaaacccaaatttatcagtgcctatatctggtatctcagcacttataaggctatcaatgaatgcaggtgaaggatctccagattgacccatgagccatgttaatgtatgagaatgcggcaatccccttttttggaactcgacagtgtatacaactggaaaataaaacagcaagaaaaaagatatgaacagctagcagaagcaatacatgtggtggtaaagagatgtgtataaagactggatagctataatcaatgagatatggaacttaccagcttgtattggaccgaatgcctgtccattcttaatatatgtaatgtactcatctagcttcatatggtaaacacgtgtgaccatatcacttctatcatttggtttctggcctagctcaaaacgaatcgcctgagcaatttctggccatttaggattacatgtgaaagttgaaaatatgtgaggaggaccgtaggcaccgcacaacgccattgaatcatggtaattttgcaccatgtatcgccttcctccaatgaaacttgatggcagaattacctttataccaacatcttttccattagtgtctcccctaccaacagcatcagatataccttaatgtgtttcagagcgaaggttcttctggctcagagtatggaagttgaggcgagatgtctcgatacatgagaaagcattaacagcgagctgatcagaaagtctaccacaacaagtaaataggttgggctcatcctttcggtagtggcactcataccgataatattcaagcatggacgcctcatcacgactcgcaggcggctgatcatctacctctctaagcttaatgccagcacgaaaaccaacatcaccatatgggaagagaagtgggtactgcagtgacataagagctggatgaatgggagaaagctgactcaattcacctgaatgcttctgcacaacgacatcaaacttcgatatctcagaagatgtaccaggaacaatgagcgcagccaacttagaagcagtgggaaggcagtaacgatcaccctgagaatgacctgacccaatgagtttgatagcaatttcaggagcacttggagagagcagcttgtctcgagcaatccggaactgttgcacaagaggattgcattggtcaagcatagagataagctcttgtacaatagcagggtcagggacatctgcagcactgtcagcatggtcaaaaatattaagtctgttttgcagctcattggtggtgtcatatatgtatagctgtgcgtactccgggcgccgtccaggagcaggaagcaaagaacctattctatgatgcacgacaccattgatacggaagacataagggccatgaccagtgtttatgctcatgtcaatgttagctccaagttatgtgaatgcaaataatgaattatactgcctgatgagtcgcatgaaagagctggaacgggcgccgccatcaaaacgaagcaatgattgtaggataggagggaaaggcctatgcacaggtaaggagatcttcccaccacggcaacacaaattgtatgcaatcctcttagccctatgcgaactctggctaacgactctttcttggtaccaaaaaagcgcaccacaatgattgcattgataatcaggaccaccatagtaagaacgttctgggtacgtagctgcaagaatggggcaactcataagcaagggagcatggatatatttgtccaacggtagatatagagtccaaaaacagtgagaaaagtagagcgaaggaaggttggcactaagttatcacctttaagaatctccatgtagtcctttggtatagaatatgagaacctcactgacggtgaatacatgatagcctctgtgcaaacagaacaagaacggggcaacggaaatagcaaataagaaacaaagagaaaggaaagcaataagaggatccacctagttgaccgcaaagaagggtttagataagcaggtgaacaacctttgcgtacaatgacacatgctttcctagctgcccgccgtttttccnnnnnnnnnnnnnnnnnnnnnnntggtactattggacagaaatggtctcctatggacaacataaataggcatggcaatcaatagcaagaaagaaaaaggttataggtagccgaacaacaaaacaaatagcaacatggaactaactggcagagtgggtaggatgaatgagggaaggcccatgactccctgtggaacactcagatgaggaggcagaatgagaaaatggaaacaaaataaatttgtgctggcacgaatgaatgagcaaacacatgaacataagcatatgaatatatgctccgagcatacaacgtcgcaacgagagaacaattgtagtgaaatatgagagaacaaatatgcaatgggtgaggaatggaactatacaatgagatagcgatgatcacttcgagcgtacatacctattgagaacgatgaaccacctgtgaacattgggcgttcatcacaagcacaggatgaggatggttcatctatcgccgaacaaaattgtgaatcagcaaaaaagaacaatcaataaacatggtgatgagctcgctaactctgaggataccgagcatatgtacctatgggacatgatgagcttgccgcgagcactgatcgctcattggcagcataacatgaggacgactcatctattgacgttcaaaactatgaattagtgaacaacagggaaaatgtgcgctaatagcctcgctggctatgagaacaccacatgcaactataataagatcagcaagtaccatatgcacgcttccgcgggcagatgcatagggatctcgaccactccatgcggcagctgtacagcaagaaaagaagccaacaaaacacagacacattgcagatacatatgaatgggcatgcaatgtaaaaacaaatcataaacgagagaggcatgaaccaccacagaaacatggaacaaaacacagatacagataagtaatgtctaaatactggcatagagcacgatatatcccatggacacagggtgggaaaccatgaagaacaaatccaggaggcaggttcaaacatagatacacctaaagatgtgttaaaaacaaacacaaaagacgaaagacataatgacatcgagagtttgcccgaaacacaccatggcataaggtctgacagaggaagaagaccatggccgcaaaaccaaagaaccacggggcaacataagtgagcaaaaaacatcctaaatacagaagagcagcttatcaccaatggatgtgtattaagcaggcataaaaatttttatccgatttatgtacctaagaagtggttacaatacaaacaaactacattcccaagaaagctttggctcaagctgcaatataactggtcggtttttggccattcagctttcagtaacaggacaggcccaaatctttacaactaagcgtttcacatttttttctctaaactttggatggcataagtaaatgttatttgaccctcccaagggccaaggcttcttcctactttgtaggacctttactctacaggaatactgaaccatgctctaaaaaaggaaaacaaaggaggggggctatcacactccttcttcacgagtgcaagaacatctcttgtgattcctagtgcacaaagctaacttcttggcatgctttaccacaccattttccttggggattaattttcttttctcctagccacctttcaaatttattctcggtgctatgtatatgtgctaatgaattcagaatttgtcatacagaggtgggatgcaaagaagcacttcgcatgatctctctattgtcgaatctaaaggggaaaaaaagaaaccccacatatatggaatcaaccgaacaggcatcccagcgactgaacaaactgatctatagagatcagaaacgaaaggaaacagaggcaacctatgaaagaatgtaacttagcaggatgaaaaaaaacgaattaacacaaatatatgaaggaatcagcgaattaacataaatatgtgaaggaactgtttcctgttaattgaagggggcaaaataaggatcagaaatcaacaaagcagatatctcgccgataaaatcacctcatcgcatacacaccgaataaaaggtggtaaccagtgcacgagagagcacaaaatacctttgcgagcagtagacgagggaggcaactccctcccccaagtgaaaacgccaacagagaatccccaatccagcagtgcagcctagaaagcagaaaacccaaaaatcagtgggcacacgcatgatcgaaagaaccctcgaaccacaacggcgcaatctagagcaaggcgtaggaggaaaacaacatagcacaagggaggatacgatcaacgacgataccgtgcggagaaaaaaagatgagctgaggaagagcaagaaagaatagaactagcgctctctgtagaagaaagggagggaaatggacaaaccatcgcctggccatggtcatggggctctccgcgtagtggagcagtgagcagcagccaatcccgtcaccgctgtacgccatagcagtccaccatcatagctcgagagtcgagacaggggcggatagagagaggagcggcccagcgactctgagcgctagagcctcgccgatggccgacacgcggtggcaccgattcacgaccaaagcggaggagctgaggaagatagcggctcggccaatgctaaccgggcccagcatacaggaagcacacgcgtcgcgagctgaatggcagacccaccgacagatgagcgcacagggaaacgacgagcgcacaaggccggcaaaccggactggcgatgggcaggaacaggccgtgttgggctagagaggcatttgggccatacaaccactaacctgcctaaccaccagatcacctattaaaaatcaacgtgtgcacaccgtattggctgccgtctgtccaaatcgctgggaagccggcaaatctagcacctttaagaaatttagtatttagtatactgaaaaaaaaagattattagcaaatcacgtacgaatttggcatggcctatgacgtatgtacacggccggccaggatccatttcatctgagcaaaatacatatatattgtggctaaacttcgtcaaaccttcctttatgcctaacaatatatctatatttgtaaggtatatctaaaggaacgatattaaacagcaactatctccagcttttggctcaaagatgggcataaacgaacattcgatcgataaagatgaattaatccgtcgttagctagctagcttaattcatttgaacatataagtgaagcatgcattcgccagaatttgcagctagtgatatgtagattcctcttcctttatgatattatatatgcatatagtgattgtgagattgagcctatcaaatgaagtgtttgtgtgtatgcttgattcgcaagatgatatgctatctccaccaacccttaattttacaccgttcgtacatcttttatttgaccggtttcagataatatctataaattagagagaaaaattcatatatatcaaccaccacaacggaccgacagagttagtttgtggaccaaaatgcctttaggataagccatgttttttctggtcgagtattcttttagagtgtagaggttaacggagacaaataagtttgtacgagattgagtaacaacaacgtccattgcagtttcaacgagatttttgaaagaatctcatgcggtactattatctggcactgatcgatgatgaaatccttgtgattcgatttgtcttttttccctcctgcctcagtttttactccgatttgacatgaggagttaggagtgccactggtatgagtgatgaaatacagagcggctgaaaggctaagaaactttcctggcatgttcatgtgtcatcaagagaatagccgaacaaatacatgcagtcacacaagatgcaaatatacatacagttactttagttactctagttggaagctgacgagagatagtaacgatgatgcctttcgaaagaccataactagtggctatatattctcctgaggatcctgtggcacaaatgtactcctgtagtagtattagtttttttttctttttctaagtgggtagtagtattcgattagttttaggtcttgtttgggggagttctcctagctgcagcttgctagaagctcccccaaacagtccacagcttctgagaatctgtagttacagattctgaaaaatgaactaaggagccagaagctggagaagctgggtttcagagcttttccagattctcagaagctggctaccaaacagctgtttcttagaatctaaagctccctcaaacatgcccttattagtgtagcagcagctagctccatgagtcagtcagtcagtaccttaataattttctcaagaacccgatgagtcccaaattgagataccggccggcacagccctgcaattcttctggattttgtgaattttcatcagatttatagttatccaaccaggcgctgttttagtgggttccagggtgtagagaaacaaacttttatggacagtttggcttgatggtcttcgctttatggtcatgttattgccaatttcatattcaccgccagaatgaaatggatgccatttttttgtaatacaagtggtgaagaatcacatagtcacctgctgatgcaatagctttgatctttcaagtttcaactcttgcatgccccaggaccaggttcaattctgacggtcaagtgggactgtggaggatacgggcgaccaaaggatttctaaccagtgctcaatttcatatacacaattttacaatcatatcaattgatttataccattataatctagtaaaatatatagtgcaaacctgaaaattactcttggatctaaaaataaacatactgagaggaaaagttttactcagggtgatatggacaaatatcgttttcaaattcaacgataatttttaggtttacacaacattatgaggtttgcactatatattttctcatatatttccccttataatttaggtccaccatgatttagtggtcaaaatttctatcttttttcattaatgtatgtataagtttacaggtctctccttttctcatatactgatagatattcagtcatccaatccacggtaactacacggcatatgtaccacccaccaaagctagctgatgcttctaccttatgcccaccttgttttgtccacacaaatataacaaaagtgatagttccttttcaaccactctttaataatataagtacgataaggaagaagtatagaacatcatcaacaaccactctttagcttcttccttcttttgccttctgcccaccttgtcttgtccaaacaaatgtaacaaaaatgtggcaagctaattcaacgttttacaagctcccagaaggaaggaaagaacatcaaccgtatatctgaacaaggagcaaacaccaatgctcgaattctcgccaccaaaggcattttgttcaatcatatcatgtgcattagagaatatagtaaaagataatcggtgttcattgtcaatgccgtagcatcgccatgacaactccaatcatagggcagccaaaaatgaacaaagggcagtaggtattgaaattgttgcacccagaaagaatagttcccaagtacaagacaaccagtatgacaagggtgcttcttaagcaggagttgcctgcctcctagaagaggcaatcagatctcgtaattccacgtgctctccgctattagctttggcgctttgctttggtcagacagatcaaatgacgctgcgacctgaagagagaagcataacatggtcaagatgaaaaacatggtcggtagctataagagtacaacctctacaaacatctatagtgaaaatagcatagcaagttgctttcaatgttcggaaggagctagtcagacagcacaccagtgccttgttgcggatttaagcagggttgcatgggtacctttttgaacaaaaagtactattgacattctttgttaaatgaactcaaacaagcaggcaacaaatcaatataactagccaaatatttgttctttgccatcaatagcacaatatggtcacagaattacgatattgcattgtggcacatatcatggtctctctgtgtgagactgagatataggaagatagtcttctttagataagttagaataaagtcagcacccttctgtaccagtatcagttaaggcatgtcatgaaggctgactcttaagccggcccaaaacccatccatatcattaagggttgttgatgcatgagctaacacatacaatgcatttatctgttaaactctccaatatttagtagtatatttagtgggatccatccctaatcaccgtttattggctatacaatacagttcaatctccctctaattcgcgtgaagagtcgactctgcatgtaacaacggctcaaagaataaagctttgttgggtgcattaactctcttccacctcagctggagtccaatgtggctgaggccatgagtcagctgagctggagaattgtagatgcccttacgaaccaatctacttcagctctttcccagggtttaatatgagggtctaaaacttggaccagaactgacaaatgtgaatacaaaatgacctttcaataaaaaatggtatgtaatatctaagtcacttttctgcaatggaactgacaagactataaagctaaccattttaaagttatattcgcctatgaaaagccaaaaggccatcttgacaacacatttatattggaggacctaggagatgttagaataatatacgttgtataaagtgaaaacagacggtctagatatttagatctctattcacttgatgcataaataagcacatagtatagagagctaccacagttttatggccaaaaatcttccacatacatccctgtgagatcaacaactcaatgttctttcaagtcaactcacccattttgcttcctcatgtttcttcaggctctatccccatccttccaatctagatcctactagaattatccatcctaaagtgaccctatgatatttgagaactattgctcacaaggaactctaaagaacaacattggcagcttaataaacagacaggcacttgttctctatgcaacaaaagaaggttttcataaactgatcatagcaaatccttcagaaccaccaagataaatcagacagccattgcaaaaccatagaaagtactgtgtgaaacatatagtgaagtagcatactgaaatataagaaaagagtcacgatggaaagaaaagaaaacatatacaaacatactgaaacatctttccaatgaatttcttcactaaaagttatatttttatacactaacattttcctctcaagttcctcacacgaaaagaatcacgatttgtttggatgagtacagaaaggttttaaaaagaaataatcgtgatcatgccccaactttcaaccctaattgtgattttaccctcactttttagggtttgcatatttacccctgtttcttcaaaacgaaatcaccgtttgacccaactatggatggcagttaggtgggtcccacaatattggattaaaaaatagaaatgaaaaagaaaaattaattaagaaaatattagattaccaatctgcccctagtaatagtatcataacattacatgttctcctcacccccactgctcccatccccaaatcgtagatagatcacgtggcggtggcaccgatggcagctccggcgagccggcttggcgcgcgacggagacgaaggctcctcgatgcggtgacgcgagcagcagcaggcggcggtggctcctcggcgtggcgaggcgagcagtaggcggagaggatggctcctcgacgcagtgatgcaagcaccaggcggtggcggtggctcttggcgtggtgaggcgagcagcaggcggagacggcggctcctcacacaacgacgcgagcagcaggcgacggcggcggcgactacccctcaacgcgagcaccaggcggcggctcctcagcgtgctggcaagcaacaggcgatggtggttgtctagttttccaggtagcaatgatattgagtttagatggccatgatggagtgatttcacacacaaagaagttgaagttgcaagcacgggctgacgggctgttttcagtgctataggtaattctgatatgctatcagccatgttggcacactgatattcagtgctataggtaattcagtaattctgtattcagtgctatagatagcaacgatattgagtttagatggccgctatgttgacacactggatgctgtatcattactctatctgcagtttaacacttcgcgtgcaactcccattgtcgattgttccttcatgagttcatgcatgcttgatgtttgcacagttttgctatgaattaaacagcgtgataatggttgaggcgtgctgctcccagatttgtttgtaatataaatgttgtgatcctgttagtgatgaaactggtgtgcaaaattttgtttgatttcggtaaaagtttgtaaaaatcagttcagatttgaatcatttcatgaaatgtcagttcaaaacagttacaagtttcatacacaaactaggggtaacttcacaagtgttgtccaaaggtagagggaaatatacaataggaagcaagggcaaaaatgtagttttacactcaacttaacaccgttaaattgatcatccaaactaggggtaaagctttgcttcgtttcaataaaacaggggcaaaaacgcaaaccctaaaagtgagggcaaaatcacaattggacttcaaaatgagggtaagaatgcaatagccccaaaaaagaaaactagatttggcttccaaagggaagtgagcatgagatgcatacatttctagcaatgatagaggaggatgtattcaaactatctttctgcattccccaagtccccagtccccaacaatttcgcaccacccatggtccatggatagatacgcacagccacttcactagttgatgatgttcgtacttgtgcagttgcacatcatcgagtggggagcaaaatggttacagtagtaaaatgggaataagcctgtacttagcgcagatttggattagtcctagactgacaacaagatgttcagttccatacctagcagcgatcctttcaatttttgtaattctgattcaaaactaaggtattgaaattgaacattggcaatcgaaacagagataattgaagatggcatggataggcaagggaagtaaggataaaagggaggtgaccttgaaggaggcaccgatcttggagtccctggtccagtcgagggcgaggagcttggtggaggcttggtaggtggccttgatggcatcccctccttgaaacttgcgggtgacggcgaagtcccaggcgttgttagcggtgtcgaagcagggctcgatggtggtgaggcggtcttggccgtgcgcgtaggagtacttgacgcggcatccggaggagccgagcgtgtgggagaggctgagcttgttggccggatcgaaggtgagggagccgtcgagggcggtgcgggcgggcagcttggcggggcccggggagagggtggtggagtgcgtgtaggtgaggctgacgcggcggtcgagcagcagcgcggagttcatgaattggaagcgcacatcctgcaggaagaggaggaggaggaaatggggatcgattgattgattgatagcgcgcggcgagaggaagaagaagaagaaatagtagtagaaccgtaccttggagtggggcttgaggtcgaggaggaaggagccgggcttctcgagggtgaggatgaggccctcgagggagggcccgcgggcgaaggcggcatcggtggcggaggccttgaagcggaggtcggcggcggagggggtgaaggcgagggtggcggcggccgtggccttgtcgccctcgtacctgcccttcaccgtcgccttcatcctcgcgagctctgatcactttcgcccagtcgccgccgccgcctatcctccttgcgcttctcctctcgttggaatcgtcgccgccgccgtcgtcctcgtattttcttgggtttcccatccacctccaccaaccaaccctcgcccgctgcggctaggctgctagaggaatgtccatgggccaccgttacggcccagaaaaaaaaaacttcatcggccccatatcaaacacaaagcccattaggccccaaacatcaacatatcgcgctctcactttttctcgctcctttttccacggtggcagtagctgagctgtgcctcgtttcctttgccatggaatgcaaggaagaagatgagagcagaagcaatcggagaacagaagaggaagaagacaacataaatcgaaccaacaacaataagaaatatgaagcatcagcagcagctataagcaaaattagatagtcccatcgatacactctctattgcattgcaaacagctactagtacaaatttagactgacgacaacagcagcaaattgctgcatccatcagatcaacacacttgttcacagcaaagcctagcacggttgtgaactcaagtagtactactagctagtggagtagtaattattgttgggtttgcaagcgaggcggcacgaacacacgatcgaacacgatctcatcgattcctgattcatgattgataaattgctgttgcagctggagtaatctggatcaggcgagcgagggggcgatccagacaggctccgcggcgagcgagtggccgccggagatggccaacccatccgcctccccgtcggccagggagtagacgccgatggcgtgcggcgcgatcaactccacctccctccgcgccatgtacacgcagttccccctgatcccggacccctccgtggcccgcgccgccaccgacaccaccgaccccacgaacagcgcctcccccgccgccagctcctccaccgcctcccacttgcgctcctccgccgcgaaccgggacacctccacctccacctccaccgcgtcccgccgcacgctgtactccctctgcaccaccaccagcgaccccgacatgtccaccaccaggtacatacacacccgcccccgcacccgctgctgccc

SEQ ID NO: 7205 - DNA, 9052 bp, Oryza sativa
attcctgcagcccggtaatactggagtagcgttatagcacgattgactgatgtacagatgtgaatgttctggtgttctgaaatggtttggatgtctgcactgatgaaaagcattgctgagaagaattgcgcctggtcggatgctctgcacataaaaagggaaaaaaaaaagaagaaatctatgtctgcagcctatgcaacagctttttttttttacctctaataggacagtgtatgctggagaacaactatccggtataagataatcgatacatggtctgcaaccacctggatagacatgcgtaggtacaatggtttcatatataagaaacaacagaagtggtgattctatggcacaaatgtaagcagattgctcaggaaggaagtagtataagcggaatagatatagtactattaataagactatgtcttatcacttgcagtgatatttgttagaacgtgcatatattacagacaccaaacattgctgatactaattcatttatcatttggctagctattaggggtagtgagcccgtaacaggtaaaactaatatcgattggtctaatggcttgcgcaaaagaacatttctcttttctatgttggcactgcaaaatagattgaccaaagtattttagctttgcttcaatcagggagagaagtatgcgcgttgccatgccaggtgcaaaaggtcacttcgctctggggatatcacatgggaggctcaagtcctgaaacgaagaatgtaaagcagagtcacatttttgctataacaaatgaggaggcaagaaatacatagttgcttgagtatagttggtcacattttggcagctctggtggcagcttgtctacgaacagtgtgtgcacaacagaaggcttgcgacgatcatgttcatcaggagatgagctacaaatggaagttgtttgagtcatgaggaaaaagagaagaaatcaaagtaaaacatgaaattttccattggcactaaccctccatggccaagattctcatcagccatagaagatttacgttttttatctagatgtgctatagctatgacctgataaagtattaatggttaggaaggtctgacaaagacatatgcatataattgatgtgagtataaaatatattgctagcctgtggagtaggtggtgttgcctcatgctgatcaccatggctgtcccttgtgtcctatacaaaaaggatataatctaagaaattatggtaacttagatgtaacaggtcacatatccttataagacaacacaattagattatacctttgtatctggaagcacaaacggcgtagaaggtggcatagattgagtagaagacaaaacgatggcatgtggttcaactgcattagctgatgttgagccatgtccagaagagcccatgcaagtatcatggctgggtagacaaattgcatggcttggatctgggtggggtagcataagggaatccacctggtaggatacccgatttctttgcaatgagccacgtgacacactagttctaatgacatattgtctgccaaaaattgctttgatctctggtggtactatatctcgtgctccatgaacagatgcaaccaggttaagaacaggcctgccaatcaattgttcaccgatttctccaaagaaggtaaactcagcagctttggcttgatcgtttgccaaatccgatggatcgatacccatgataactactctgtacctattatagaaggcagttcagacagttctcaatacacatggattgaattgtagcatatagattggtttatcatgtaaaatacttgagaaaagctacatgtgtgcatatgataagagcaccttgtttctattgcatcagtgctgcatctcgggcatttatatgcgtttccttctctagctgtgcctctcttataggtgctgcatgctatataccaccaaggctcagcaggaaccaagtccctgatgattatattgacaacatagctattgccctggttgacatgcgaaaaatggaacaagtaaaggatggcgctaataacatatgatggaaataatgatcactagtagcgctgaggtaggttatattaccaaggcctcatggggattaaggtcacaaatatcagaaactttgacatttatagcttccttttgaccgaagttagcctctatcatcctgaccacctgtgggttaccgtgaaggcttcaaatgtgaaagaagttagtgctctggtttgtaggttagggaaaagcattgatctacatgacacataaggtagcgaaaaaatatgttgaataaagtagaaggatgtctatgtgtatgaaaagagcagagctaagtggcacctgcttatgagggagattgtttcctggattggtgcgttaggataccatctacagacagtgctaccctgtagggctagctggcctgtcaaagacgaaagaacacatcatgtgagttagaacagtgaaaatatgcaaatgagataggagggataatagaacaggaatttatttcttacggtctcgaaatttaacagttaaaccaacaaataacatgacaacatgtccattgtctgcttgctgctgcaagttttcagcgtggaattgtgtagcatggggaccccataacgccacgacgacagtttctctgcaagcacataaaagaactaagaagtggaaaataatgcagatgactttttaaccatccatatttgctactaatcaagatgccagagaatgttcgtctagaaaaaaaaggagaaacatatatgtttccaagaaatcgatgatgcacatgaaaaaagcaataatgatctatccgtgcataggttgctcattttggatggtagctttcactcacccagaacagaaatatgtttggaataggtaacgtatcgatacgcacataccttccattggttatatggtcattaagcacagctttcataacacctgcataagaaacagtctgcactggcccgatggctgtcattatgcctatagcatctacatgggaatatgagggaggaaaactgtatatgagtaaatgagggcagcaagctagaaatggagaagattaataagcaataatatagattgatctgggccaaggagacttacctgaaataatatctttcttgtaagcccgagctctgagttcatcaaaagaaagaattttgcaggcataagatgggaacgtggatggtggtccagtatcttctgtaacggttgtgtgagcagtgaactttgccatcaacagtcgatcaacaggcctatactgggggcgtgcctcggcgacttcgaagtatttgatgtaatacacagcgccttcctttagcaaaggcttgaattgaacaacgcggcgtcctgggatttgcgcatccatcatgtcgccctgttgatgtttcaatatgtaagagggtgcggaggcaaatagtgtgcagagaaagaaagcatgtactcggtgctatgcctgctcatcaagcaggactaaatcaaggcgcaaaatcttgtcaggctcattagctgtggtgaactccgagaagcgggttgcccgcactcgtacgcgccaacggtgtgattcctgtgtgacatcctttaggagactgtaatccatctgcagggcatagaaaacacatcatgcaggttagaggggaattatacaaacaatgttctgcatgatatgaaggcgcaaagctgtaattgctgaagggactatggtggagcatataagttttttagttttggagctgagaattattttcagtgcagggcattttaataaatcatgtctaaaagcagctgatagtaacaagagagaaatatggaaattaagaaagaagaatcgataagcacgcatgaaaggcactggaacaagcaagtgatcaaacaggaacaacacatatacgaacacaagctggcagtaaaggctaaacaaaagggaacaacaaaataggaaagctgcaccgacaaatgggatcacagaacaaagagcttcacaaaagagccatcacagtgctgcagagatagccacaataaaactaatctacagcaacgataatatttcgttgtagacgatgttcttggtggtggaacaaggatttccatcatcatcttctatcaataacttgagtccttcctttgatgtagctcgcgaaacagcaacatatagctatccatgtgtgaagatagggttcttgaggtatacaccaacatttcctaatgtctgcccttggcatttgtttattatcattgcataacatagtctgataggaaattgcctgcgctggagcgtgaaaggccacttcggactatttccacttaggacaatccgtggaatacagaccagctggccaatatttgtcccagtcatgattttgccctcaaaaataaaatcaccaagtcgagtaaccagtaatcttgtcccattgcaaaggccaagtgattggttgatgttgcgaagtaggacaactgctgaaccaattttcagggatatgtgatgttccgggaagttgtttatggatatcgagtttagaaattctatgggatacaacagatcaaaatccgcagctttctcaagtgtatttgcaatagtgtcgctgctaagatagtcctttgcttctccaggtactttggcaagcatcatatcattaacctcatcaacaactgcatttactagacagactattgcgcgctgagcaagatatgggatgcagtcatagttggtctgaaaatctgggtagacagcatcaattatagctgtaatcttgtcaccatgtggagtaagcaacaattcctcaggtatctgtatctatgtctgtcacaccccaaagttctttcccaagcctaaattgaagttataaatggtctcaagagaatacttgtgtaaagcaagagtaaaccttaataaattaatgcaaataataatcggaactgacatgtggaacttttgagttctacatgtcgaaattcgctaacaagatttttagtgaattttcagagccctagaaataattttaaccaattaaaattgagcaagcaatattttaattccagggaaaatccttttcttcctttttctttttctttttcccccttttcttttcgagtgggccgccggcccattctccttcctcctctcccctccgctgggccggccgcctacctcctcccacccgggacgccgacaggtgggccctacctgtcgggcccgtctcctacctcgcaaccgccatcgccgcacccactcctccgctttccccgcgccccacgccgcgtcgcccgtgcccacgccacgtcgccgccccctctccccgcgtcttccggccgcgcctgcgcacgagaggggcgggattcgattttgaatcgccccccaccttctctctctcctcccccacgtcgccggcgaaatcggggcgcctcccggccacgtccgcctccccctccacctataaaatgctccccatgcccttctctctcgttttccgctctcaccgctccatcccgtgccccctaccgagctcgcgccgccgccgcttgcgccgccgcccgccgccgcactccggccgtgtgctgccgccgctagagccgtcgccgcgctaagccaccgccacccctagcttcgccgccgcaagacctttcccggccgccgctttgcgtcgccggaatcccaccgaaaccccatctccctcgtgtcgccagttagttctctctcccctccgactccggccggcgtggatggtcgccgtgagggtttccctctgtcttaattcctcctctctttttccctaggtgtcgccgtcgcttgtccgcacctcggcatcgccggtcttcgccgcctccctcgttttccaccgccggccgttgccgcccctccggtgaggtctccctccccttcctttccttccctttttttcccgtgcgccgccgccctcttcgtgcgctcgccgtcgcgttcggtcgtcgccgctcgcgccgccgcctgccgtccgtgccgccgtttgccgtcgccggcggtcgcatgcgcgcgccgccgctttgccatggccggctggtcggcttgatgccgggcctggccggtacatcggcccgtggagctggggccgtggggcccgcttgccagccgtgccccccttgagccgctgccgagtggggcccgcgtgccggcgccccttttccctctctcccgagccgctgaccggtgggccccgcatgtcggcgcccccccttgatgacgtcagccctgggaattattgcgcaataaatgatttaaggactttttgttatagtaataaacacagtgaatcttctaaaattcataactaattcatccgagctccgtttaagcccattcaagtctcagtaaatcaagaaaaatgcgtagaatccactaaaaatggttttgttctctgtttcagtagtcttatagcctgtttgtattgtttgctttgtatgtcgcctagattccggttcttccgacgctccggtgtacttcgagatagtcgccgaggttcctccagctgcagagcaaggcaagtcatgcctgtcacttgaacatgttgatcctatattgcaaatgctctattgtttttcttcaaatactgcatcgttttataatgttactatgggatgtttacctattgttacagccatgctattttggtaccctgctcctttgttagctcgggttataacatgaatagacgttggactaggagttgcttagccatgcttagttcaactagcacacaatggggaaatctcatttaaaatatagactgtaggttcatatgataatgttggtttagtaccaccgctttggtgttggttaattaaaatgaatcacatggtgggctgtgggtgcatggttttgcttgtcgcacccatagcaattaaggaccggttcgcgggaaaccctggaagaatttatcgtgcttaccacaagccagcgtgggcaacggctgggcttgtagtgtagcttttctctagctgacgcatccaggcaagggtgggcgtgatggagtttggatgggccctgcgacggcctatgcggcttccggattcacctaggcacgagaggggactgcccatcgcccgctggggacgggggtgaaacctgaggtgtggtgtgcttggctagagggggttatgcgaagggtcctatcacggcctctttccggtatgtcgtggtggcatgtcggcgcacggaaacgtgtcgtggggctgtcttgtgggtacaattgtacacctctgatcagagtaaaactattcgaatagccgtgcccgcggttatgggcggtcaaccagattcaccgtgattagactcaccctagtttagtcttttgaaattagatagtataggtggatggttgggcctgtcgcaacgtggtatagcgttggacagtggatgattaatattgattaattattacgactgttttcttctttaaacttctgtttataaatactcgctttatgcaaatgaaccactctagctctcctttgataattccctgcatcatacccctattccggtatgacttgctgagtacagtgggtagtactcagtcttgctctatttttcccaaccccagagtatgagtatgtgtcagatggaggtttctccgaggagtaggcttcgtccgtgccgttgaggatgcctgtggagtggtgttcccgctgcagttctagtcaaggcttagctcctgttgtctttcgtttttccgctgcatttatgtaagacttttatgatgtttgtaagacgtggatctgaatgtcaacattgtcgtttgtgtaccccggccggtcctggacggggattttaatgcacattctgcttggaattctattcgggaatttctgggcgtgacaatgtcttttcaacctcaccctgtcgtctatccattggaacacgtccctcaccaatgtcaagaacccatttagcgaactctgctagctcatccttggcttgctgcgagagcgatggattatgtagcctcatgttaatggtgaggtgtaagacttcaacatggttccacaatgcagatttaaccaaggaagcaggcaccacatcagctcttgtaccttgctgaatcactggcaagacctgcctaaaatcaccaccaagcaaaattgctttacctccaaatggcttatgcgcattacttgcatcatcagtggactgaatatcccgaagagttctatccagcacctcgaagcatagcttgtttgtcataggcacctcatcccatataatcaatgatgccttcttaataagatctccaagtattgtacctctacgaacaccacacatggactgatcatgtatatctataggtattcgaaagcgtgaatgagctgtccttccaccaggcatgagcagagctgcgactccagaagaagcaactgcaagaacgatctcgcctcttgacctcagccttgccataatagcattccacaagaatgtcttttctgttccaccatgtctagatataaagaaaatacatttttccttatgagctagcctgtcaaagaccttgtcatatatcttcttctggtcatcattcaagctggcatacatggacatagactcttcatggaggctgtcttggttgaaactaagctcttctaaaataagcctatttcctgcactggtatccgaacattcagctggtgtcgggagatcgaatgatgagattaataagccattatttgagaaaatgccatccaattctttgagcaaggtgttctgtaacataacatccggaatagctctacgctgtactccaagagctttggttagcttgtaagcaaaatcatctgccatatacttccagtatttatcaaacaaaaccctaacatcacctacatcacaatgtgctagaacagtcatgaataggttcctgagttggtatgcagtagcccagataactgcctcttcaaagagatgaacccattcagcatcatcaccaataagaccacgtgcctggcaagcttcacgataggtgctatatgtcacaccttggtatgtcctgacatcttcaaaagtcatgcaacc

SEQ ID NO: 7206 - DNA, 37709 bp, Oryza sativa
agtaatagtaacaaattggcacggtcgacactcgacaagggcagcacgaacggagggatcggatctgatatcggaaagagagagctaaatactactactactagtatgatatgataatgttatacactaatagttttgagtttgattgagataagggcatgaggaatgaccttatcgacggcgtggtgagatcgctggtgtcccttcttaggctggttctggttggatggtcgaacttgcttgggctggtccggggcggcagcggtggcggaaggggggagatgggcgatggcggcgcgcttgcggcggaggtatccggagaggaagaggagggcgatggcggcgcctaagatggccgagaggaggggcagggacaccagactcgtcgccgccgccgccatgaactctctctctctctctctctctctctctctctcgggtttagggtaaaattgggtttggtttgtgtgctactctactgatgacgaaactctcagcggatgagtccgtactgctttacccttttgcttttgtactcactgccgccccggccccaccaacgcgtatgtaacatttagattaaatgtttcatgcaaaatgagatagaaataacatgtgattaattgagttttaattattacaaactcaaaaaatggattgatatgatattttagaacaagtttcatatagaaagtttttgcatgaaacacaccgtttagcagtttgaaaagcgtgtcatgagtatccaaaagtttatccaacttttgctggagaaaagaacagggccatgcatgtattagtgtactactctagaggagaaaaaaaataagaagaagaagaagaaaggagtaagttcatctcctgtctctcaatttcacatcgagtttgtataacatcctcgatttttaataccagaaatctccaccccttataactattttaaaccatgtaaagtaggtccaatgacattatagagagttattttttcttacgtggcaagttgatcgggcccactcactgggtcagtcaccattgatcagacccacatgtcatgggatacctctcttccttttacaatcctcatctcccctctactccaatcactcatcacctctccccactttcctatttctctccatgtcagcgccctacgtgggggaggggcggcagcggcgcctcaccttggtgcggctgacatagagaggagacgaccaacagtggtggtgaacggttgggacaaccttgtcacctggctgcacacaaaagtttgcaaccaccagtaccatcgacctcagcctcatcgacggcgacacttccacaggcccaattcactggttgctgttgtcgtgggcgagtgtgcgcagtgcagggattcttgtcgtgcatggagagtgcaccatgttggcggcaaatttgtgcacagcgaagggcgtgccaccctcacacaagctccaactcccaccgcccctactacatgccatactctccctgctcccctgcctcatctccccgcgccacatcctgtagccccccgcgctcctcctcgtgtccctctgtctcctactccatgaccacacggtcacactcatctcccgtgtctaccccttcgcgtccctcagggccgagatctcctcaaggccgccgcatggatggggaagatgatgatgggggcacagcaatggcgtcgaagacaacgagcactccatcatgggaggggtgaaaacgtgtgctaggggctatgggacgcgtcgatggtgatgtccgtcgagccaacgccagtgtctgccggtcaaacaagaagaagaggaaaatggttgatgctaccatcttgatgttgcattgatggtcggcagagaccacacggatgtggtgccaacgaggagaagataaggagtatttatttatttttactaactaggatgtcacatcagctaaaacaaccctctatactattatgtgatctagtttgtacgattttgaatatttaagggtaaaaatttctagtattggggattgaggatgttttgtaggccgtcgtaaagttcaggggcgttacctatttcaagaaaaagcacgggcagaaactaacttgttgttatgggccgcgtcgcgtcctcttgtgttaggcctgtcgctcgcttttcctttccttgtcaattcccgttgatcgaaaggtcttcaaattaaagcccagcccaaacgcatatgcagcactctctttcacaaatcttttatcgctccatccttctgtataaaaaagaatcaaggaataaacaaggtataaataagctatggattaaaaaaatagaacgcgaagaaatgaaaagaacgtaaactcaaatttaaaattaaattaagtttcggaattcaaacttttgctacggtcatggttgcatctctagcaaattttcctcggtataaacaaaagagaggaagattgatccgcgaacaagtgcaatggagaagagattggtctgcgagcaagtatggtagaagagattggtctttttcgacgctggattgaaaggcttaggccgcgtttgaatatcccattattaacttatactccatcattttttacgtgcacgcttcttaaactgctaaatgatatgtttctttttttaaaatgtttttatataaaagttgctttaaaaagtcatattggccgtttttttaagttctttcgctaatgctcaattaattatgtgctaatgagttaccttgtttttcatgcaggataaatgggttacaaaccaacacgttcgaacacaaccttaatggttttgctatgtttatttaggttctttgtgaaattgcacctctttttatacactttacaacaccaaagctaggcaaagccctagtagttttccaggtaaaaaacacacaccaaagattgttgctccaacccgattatgattttgacataggactttcacaaagaacccaaataaacatgagttcacataggacttttttacatttttttttcacttgagattaattaatttgactcctagagaaacaaacacctcctttgtttccaatatctgtcgttagtactaagtttagaaagcatgcatgcaaatttgatgagcatgattgtgcaataccatgtatgggtgccttttttgtattatggaaattaaaatatacaaatttgatgagtatgagagggtaataccattttacagcatttttttggggattggacaacaaagaggattcatgcatgatgggagcaatgaagatggggaaaatatctagaacaaactacatgtatatggtgtaaacttgaaaattaacgtcaaatagaaatggaacgtggaaaaatcttaggttttcctttttttttaaaaaaaaaagaaactatggtactttttaggtttgcactatatatttttccataaagataaatgttgtgactttctacttgcaatgcgtgatgaactcatttctagtactcataagtgatgaactacaaacaaatatcgggccatcgactggtttatgagttctacatttaacatatccatcgttgtcttattggctcgtgagagtaaaagaaaatttaagttttaaagctaaattttatagttgattttgatgttttctcgtcatggtttttgcagcattgtttttaaatcgcaaagaacaaaaacatatgtaaaagttatatccgtaaattagtttctgtatattgctttgttcaattttctggacttatcaggcgtggagaaaacgatggatggatgtgttagtttcctggctcacactgcaaggatgggacaaaggtttggttaaattaaattgattaatcatgctttgcatttctgcgcaagctaattaacaagcctcactgaatggaattgatccagcaggaggcagacatactgtagtgattgaaaagcagcaagcttattccagcaggagcaggtgataggctgctaagctagctagcaagcatatattcgattcgattcgaccgcccccgccccgcccattaatttcttcattctcatcagcatctcgatcgatccatcggcagctggccggcatcaagctcttaacttaattagctagctagtctctccctccctccaccgcatatccatcccccaccagttgtagcagtagctagctccaagagcttcttgtccatgaattgttgatctcgatcgatcgatctctgctgcctgctagctaatgaataaacaatagctaggctatatatatatatatatatatatatatatatatatatatatcgatcgaccatgtcgtcgtggatgcagcacaggcggcggtcgtggacggcgcggttgctgtcctccgcgtcgctcccgccggtgcgcctgctcgtcttcttcgccatcgtcatcttcttcctctccgtctcctcctacgtcgactacaaggccatcgagcgccgtgcggagatcggcctccgcgttttcgccgccccgctcgccgccgtcaccatcttcctcctctttctcgtcctccagcatcgacgccgctactggacgctgcgccgccaagtacaccaccaccatgcatatgctgatcaggccgaggctgcagggagcgggtcgccgtgggttgtggcgctgctgctgctgctgttgctgctcatgctctccttccaatcctctgtccattccatctggttcaggcctctctgggattctgctgattactagtagtaactagctacctacttctacggttctactccaccttgcagctataatttactcatctacctacctagcatatactatatattatctatctatacatacaggaattaatccatccatatgtaatacgctgtctcttatttgatctctagctcgtatatactccatctgttacacaatgtatgcatgtatgatacaacttatgttcccgtcttgatacaatagcaatatattactactagaaggattaattgcatctgtatactaccacgcgtcttcagttctgctctatttactggttcaaaagaaattgcactgcaaaactgttcatgagagacaatgtgctaaaaaagaacactttacacgtgtagcctaaatatgaatatgttatagtaaatgagaattcatttttacgtctttaatttatacagttatgaggtagtacactagttataacaagagtttactgtagttcgacttgaataattaatgtcaacggactatgtagccatgtccatattgttgtctttttcctagctcttacatgtttctaaattcgccaatcttctttttcgataccttggcgttagctagaaacctcttgggttttatttttcctttacacatggttcttggctacaatatcgggcaatatctgatataccgttacaaccaagtctgacaaacactactgctatggcttctttttataacaataatcattcaatgtacgcctaactagaacatataaataatattttaatctaaagttataacgactagaatagttagcattaacacgtatcattgtcctattgtagctgcttttcaattgacgtcatagaatctatggcattagacacatctttagtgtgcccgctaatatgtttaaactgtttttatttgtaaaatgagatttatatcatttttgtgaagaagtatacatcaattataaatactctcataataattgttctttttaaatttctatacataatatttggggatttgtcccacaccgtatatatttgagtatttagcagcaaaagcggctgttggctgtgtgctgcacaactctagataggggatgtaaataatttccgtaattgaaaaaatgctctcataatataaattcatgagagtagtataacacatgtaaaacaaacaggtaataactcaagtaagtagtacttagaagtaaacaacacggggagtatatatatatcatgaaaatgagaaaggaaacaaataaacaactagtggtattggaatgtattgatgtaaaataagaatacggagttgtagaggggggcagagtgaaaaagggggggcagcaagccgagcatcgcgtactttccccgcaaccccaaacaacaaggaaggaagacgctcctcccctcccatctcttaaaccccaaaaaaaccaaaataaaaatccttctcctccttcggctccgctttccttccctttcccgatagaaatacataccttccgccgccgccgccgccgccgttcctagggttccggcacctccccgaatccccccctcacttcgacccctgttcgcttcacccgccgccgccatggcggagaagctgagggatctgagccagcccatagacgtcccgctgctggacgccactgtcgccgcttctacggcaccggatctaaggaagaggtattctacttctccgcccgctcgctcgcccgcgccttgcgtgcttcttccccgccaccgccgccggacagcttccgagacttagggtttacgcgctttcttctcctatgcgttcccaaccctatccgctctcaccgcccgccaatgccctctcaaccttactctttttcatccttagggtttcgtatttactggagtatgcgtcaagctgggcgttgctgctgctattatagcaccgtttatgaccccccccttcacgctctgtgtttgctgttgctgccctgctgcatattcgtttatccttttattttaacctcctgccaatatacaatgtcattatcacctttaatgtgtttcttcctaccatttttttgattaagcaatgtcatgcatgcatccatattatccttatgtgccttttttcttctttcagaggaatgccgctgatcagatactacgggatctacagaataatccagatatgtggctgcaggtggtccacattctgcagaattctcacaacttgaacaccaagttctttgccctccaagtaagtttccgcacctcactagttagccatgttaggtttctttgcaactcaataaagatggctgccatttctcttaatgattagcattgtagtaagatattttttcatcccgtaatacctgcactttacattacacgtttgcttatatgattgtagtgtaactgtgttaggagaggttctcatagtcaccatatcctatatttgagcattcagattgttcaacagtgttgagtgttttatcacttatgtactaccacattatagagacgaatcaaccctaggagaaacacatgttgcttatttgccttcgcaggcctagcgcataggctagattgaatacatacataggccatgcttaaaaaatttaaatgcaggatggtagcatgaagtttgtacagaaccctgtttacagtaaaagtggatgcttccttttttacagaaatagatggagacctaagtttctaaatatcagtttgcagtttttgtgctatgcttattttttaacatgctggagaaacatggtttataatggcctctatttagagcagtgaaaggtgacatgttggttctattgtttcaccaacagaataaaaagagcttctcttttgccacttcagaatctctaatctctttcactattcaaataaggctcatctctttttttgccatgactccatcatcacccttctctttttggcagaaccacagaaattgtttaggggccatatggtatgatcatgcaacccatagttatgtgcatcagccataaataaaacctgggttttctgcatctacaagctagtttcaacatgatgctgatgcttgctccatgttcattttaaattaggagatcccaacctgggatgtctctgtgcatgcatgctagtgctacatcttcacttgtagctgcgaagttcattctgtgtcatttcctgattttgctacacattttaggtacttgaaagtgttataaagtataggtggaatgcattgccaactgaacaacgtgatggcatcaagaattacatatctgatgttattgtccaggtaaggaccaatacatttgacaaatcttttatttcatctggcccatgaaaacaaatctcattcgtgtatgccttttatgttctctttcgtcactctatcagctctccagtaatgaggcttcttttcggcaagagagactttatgttaataaactcaacattatactggtgcaggtaagctgtactgtttcagtcaccttttaagtcatagcactgcttgttattatctatttgttcatctggcaagtcaactgacttgtattattaattgttgcaatataataggttctgaagcatgagtggccagctaggtggtcatctttcgttcctgaccttgttgctgctgcaaagagtagtgaaaccatatgcgaaaattgcatggctatattgaaggcaagttgagttatcacctgtttctgtttaacaacatggaaccaactactgactctgcgatttgcagcttttaagcgaagaaatttttgatttttcaagaggtgaaatgacacaacagaagattaaagaactgaagtcatcacttaacaggttggttcttgttaccatctttgtccttttagggtgttctgtatctatatatattagaccacagtcaattattttgacatatactttattgcgactgccttttgaactgatgcaacattattttccttattgttgaacagtgaatttcgtcttattcatgagctatgtttatatgtcctatctgcaacacaaagacctgagctcatccgtgctacactggctacacttcatgctttcttatcatggataccagtgggcttcatatttgagtcacctttggtatgtagcttatttctaaacttatcaggaaagatcctacatagaatttatcaaatcatgtcttatttttcttcatatatgtttgttagctggagacattactgaagttctttcctatggctgcttatcggaaccttacactccagtgccttacagaggtaaattggtgatgtatttcctgctgtgtctaattagcaatgtttctaactgcgtatgttcctaatggagtaataaaaaatggaccatatccattagtttggttcagttttttttttctatatatcctttttgaatgggggcagtaaaccagccctattgcatttgagaaacatgtaaccttgttggtttaataccctatttatcttttgtatatatggatcttgcaggtcgctgctcttcagtttggtgatttttataatgtgcagtatgtgaagatgtatacgattttcatgatgcagttgcaggtaaagaatgtcttcaggaatctgttgcttccttctttctaaagtatcctcgccctttccccctccttttaaatatgtacttatgaacgacccttccataacatgtataggctattcttcctcctggaacaattcctgatgcttatgctaatggctccagtgaagaacaggtatggcagtgattacttcaataacagtcagtcataggagtctggttgatttctcattttttaaataccattgaggtactgtattaataaaatgtattttccttggtgcaggcattcatacaaaatctagctctttttttcacttctttcttcaaggtaggatttctcacattctctgtatgcctaactatcttattttttgagataataaaattgcacacttaaaatatatgaaactttctttgagatgctgtaactaattaacctactcttttgatgtcatattcccagttgtgacaaaaaaagctgatttgttcttgtattggccttgtcaatttatacactgaaaaaataacataaatgttagttacgccgtacgaaatcatgatttagtttcaatatgctctgatctctttatttggtgatacatttagaatcacatgcgcatattggaggcatctccagaaaatagagctgcattacttctgggccttgagtacctcattggaatttcatatgttgatgacacagaggtttttaaggtaagtaatttatagctagattcggtacatatatgaatggttcaagagagatgcatatcttataattttggccgatttgcaggtgtgtttggattactggaatgtgtttgttttagagctatttgaagcacacaatcaaatggagcctgcagcatctgtaaacatgatgggacttcaggtgttcctctatgaattttttacatgaattcaatggctttgatatattcacctttgcaattcatgcactttttgcaaacttttccttctatttcacttgttatttcttgttttgaagtgctgcactcttctacatcgtcgactcatcgcacatatgaataatctgtaggctcagatgctccctggagttgatggcaccatcacagctgttcagcagaggcgtcagctttactcaggcccactatcaaaattacgaatgttgatgatttgtcggatggcaaaaccagaggaggtactgattgtggaagatgaaaatgggaatattgtacgtgaaacaatgaaagacaacgatgttcttgtccagtataaggttagtaacagaatgtgtagctattttccacccctgtacacaaattgtgtcacatactctgtgcttcacctgtttaatttaattgtcaaacttatgtgttgcctcctttctttaattaattgttttggcagattatgagggaaacactgatctacttgtctcatcttgatcatgaggatacagagcagcaagtatgtcctgtctacagatattttcattaaaaaaacacatgctataaatattatgctttgttcatgctatgtgatatccattgaatttgttccatttctatgttgagatagcgcaagttgtggcttaaacctgacttcaaatgatgacaacacatggctttagtttgaaagtgcctactgtaatattagtagttagtaagctacttgttggtcaaagctcaattctgtgtaacctaggaaagttatgtgagcaagctcactatgtgtagcccaagagcaattaaaaatgtctactttttcgatataattgttgcacaatttctccatctggtttagtgctttgtacgaagttaaaccagaaaactacaaatttgttttgggatcccagatgctgaagaaattgagtaagcaattaaatggagaagactggagttggaataacctcaatactctctgctgggcaatcggatcaatatctggttctatggtggaggaacaggtttgaataatcatacactgttccattctttttgtctttggcaaacgttaaggaggactaatatttagctttgtgataattttgaccatttcatgcagtgctgaaattcttaatggtttctgtggatctttttcaggaaaataggttcttggtaatggttattcgcgatttattaaatctctgtgaaatcacaaaggggaaggataataaagctgtgattgccagtaacatcatgtaagcattcatctcaactacccatgtttatactaacaaaattaaggtttgactgatctgatgattgctttgttaggtatgttgttggtcagtacccaagatttctcagggctcattggaagttcttgaaaacggtggttaacaaactatttgagttcatgcatgagatgcatcctggagttcaggtcagtgtgcattcacatgtagtctgttgtgttggtgcagaatcactgttttgcagcccttgtagtgtggaacttagattggaactgcttgcagccatctttccttccatgatcttaataacaagttactcatgtatctgttgtttgatcatcacacacgctgtttgctgctatctccagtttgtgcaaatagtttaatgcctcaacacttctgttagtgttgtatgtaatgtatgccttgctctgctgattgcaggatatggcgtgtgatacttttctgaaaattgttcagaaatgcaagcgcaaatttgtcacacaacaggtaaattcaatcacattgcttgatatctcaaactcttatgtggatactttgctgctatttcattacaaattatgttttacttaaagcatgtgctgaatttaatttaagcacatgcatctaatttatgctaatatgcaccggtgacacaccaacttcatgtttctttgttatctaggtgggcgagaacgaaccatttgtttctgaactgttgtccagccttgccacgacaattggtgatcttgagccgcaccagattcatacgttttatgaatcggtatgcttaaaaaccaaataagtaaaacacaatttcaatcagaatagtttatcattaatattattttgtgctatctgattttgctgctcaggttggccacatgattcaagctgaatctgataacactaagagagatgaatacctcaaaagactgatgagcctccctaatcaggttccttattctacattcttagtatgcctttatactttttctggaaaatgtagttttgacaggttttcctatcattgaacagaaatgggccgagataattggacaggcaagccaaagcattgatatcctgaagaaccaggatgttattagatctgttcttaacatcctgcaggtaatttaatggagcctgagaatttcatttgtctattgttttgaaattcgctgtgtgaactgcggtattatttcctttctttcgttgtttttgttttttcttgatgttctttttatttatttattttataatttgtaaagcttcaaagttagatcgtccacctagtaggaactgaactgcgtagccaggtatatgctaagtcacgaactggtagggacatttttgttcattatagctcactgaaccaatttatagagcatgctttttcttgtgagattgtgcttgggaactttgaaaatatttagggtcaatttgctgtgtaaaactgtagatatcatacattctagaaaatatattgcaattgttgtttgtgtgttacctctaggtagttagccagcaattgcacttgcttgcttttggttcctctgtgtgcttcgctgtctgttgaattaaaacattttctttgtgtacaatgtgctgtttttagtgtaattttcagtttcatttacctttgcacaaccctccttggtcttagatactgttggttttttgttatttctcctggtgtaataaatgttgttatatgtgcttgcagacaaacacaagtgttgctagctcacttggaccacactttttcccgcaaatttccctaatctttcttgacatgttgacagtttacaggtattttgttcaccgcttactgtattttattgctgtattatgttaactcttagataatggtacagcattttcttggaagtacaaagctaatcaagtattacaaatctggggcactcggcggggtaaataaattgaagcaactgactaaaacaattgatggaaatcaaatctcgatacactatattgctaaatctcagtattgtactacataacaccttccgaagttagatcaaggtctcagatgaactgttctttgggattgtcctgcctggtgcctgcccatgtaaaacttggtctcttttgtatggcaatatgcaaacaaccacaactttctggggcctgcagaatttggcccagaaagcaagcgatcatgctaaatttgctccaatctactagttagaatttttttttttgccaatgggcctgccatggtctgattattcttgtggtcaaggttgatttcatcttgtaatgcctttaatacttcattagctaataccatcttttttgttcgtgcattgttttcacatcagaatgtacagtgagcttgtatcaagcaccattgctgaagggggaccttttgcctcaaggacctcctttgtaaatctccttaggtatgaattgttggtttactaaattatgctctatatgtgacagatctgtcaagagggaaacattgaaattgattgagacttttgtggacaaagctgaagatctaccacacattgggaaacagtttgttcctcctatgatggatcctattcttgctgactatgctagaaatgttcccgatgctagggaatctgaagttctgtccctgtttgcgacgatcataaacaagtatatgcctccaacctgataatgtctttgtttttgtagatgtaaattaaaatgtgtttttattatttcagttcgtaggaaatttcttccaactgtacatcttgttgcactgtctgttctgatattcctttccagtaatcatcattttaatgtttattgtagatacaaaggtgaaatgcttgaagacgtgcctcgcatatttgaggctgttttccagtgcactcttgaggtaggaatacctattaagcttcctttttcattctatccataggtaatatttttagattggattaataatttgttctgtcctgtcagatgatcactaaaaactttgaagattacccggagcatcgcctcaaatttttctctttgcttcgtgcgattggcacccattgcttccaagcattaattcagctttcaagtcaggttagtaccaactatttaaaacatcattcttccttgttgatttaaatttactattgagttcagatacatcaacatattatcttctattcttctgttttatctgattattggattgttatcttattcagcaattgaaacttgtgattgactctatcaactgggcatttagacatacagagagaaacatcgcagagactggtctcagtctattgctggaaattttaaagaactttcaggtagaaaatacaatccacaatttgctaccattgcataatattctgtttgcttatgttttttttacatgattcacttgcaggcctcaggattccaaaatcaattctacaaaacttattttttgaatattgaacaagagatctttgcagttctgacagacacattccacaagcctggtttcaagcttcatgttttggtgctgcagcacttattttgtgtggtatgtcaatattcatttttatctgttctcttttgtttgtatggatacacttaattattaattttcctaatttgtaggttgatggtctgacggagcctctctgggatgcatcctcagtaccataccaatatactgacaacgctatgtttgtccgagattacacaataaaacttttaggttcatcatttcccaacatgacacctactgaggtatgatccttcttttgcagctatcctgtgcttctgtggccatcatagacctaacaacttttcccgcacaggttacaaaatttgttgatgggcttcttagttcaaaacatgaccttccaagcttcaaaaaccatattagggatttcctggtgcaatcaaaggagttctcggctcaggtaatttgctcctaccccttgacactggcatggacctgatttttcacaattcaaaggaattagaggaaccaatacttcactataccagaaatagtaagaacatagtttatcagaaaccaacagttgctaattaccagagagtggatgttgccacgtggtagtatggtgccaacttgagaaaacgatagatatggaatcatgtgccaagtatagcgttaatgttagggcctttacaatgcataagtgcccattttttatttgttttcatgttacttgctattgaactcatctgatgagttgtttcatgttcatttgcttaggataataaggatttgcgattattttagggcctttacaatgcacaagtgcccattttttatttgttttcatgttacttgctgttgaactcgtctgatgagttgtttcatgttcgtttggttaggataataaggatttgtatgctgaagaggctgctgcacaaagagagagggagcgtcaacgaatgcttgccattccagggcttattgccccaagcgaattacaagatgagatggttgattcataattctgtgattcagccttgctaatccagttccatttcttgctttggcctccaaacctctggagccctcaacaccccattgcccaagttctcttccagggtggtgaaagaaggtgcctgctgtaattttattttcggtaacctccacttggtgctgattgcgagatttctgctagtcaataggaaaggccaactcaattttgtcgcaagagctgttttggactgccattggtttgcagtatgagctgtcaggttaatgtgatgacagcagctcttgtgctcctgtattttgctaacattgctgcgtgtgcggggccatcatatagtatgatcacggtacaacattgtatcatgatttttagtttagtttatagatcggccgcattctgtattgtggacaagattcaggatagaaacttatattcgtagtgtactattttgtgaaatatgttctttttacattgcccgcatatgtgctgtttggtttctttttgacgctcgtgatttgtcgagtctgtatcaaagtcggatcgcccgcgtgtattccgcacatgcatggagcgaatctttggcgtcgctttttttttctatattaccgcaagttctgagcgaattacgatttcatttatgttttcatattcaagcttgattcttcaggagcgtttgggctcaaataagtgtgtataggggcttgtttggggaagttttaaattgtaataagtagtccgtaagaactggaaaagtagtccgtgagaaccgaaagaagctgagaaacctagctttttcggcttgtagttcattttctggattctataattacagttacttagaatctgagtgaaaagttttgactgtttgaaggaacttttgattttgaaagaggctacaacttgtcggaaggaacccaaaacaagcactatgtgttagttgctagtggagtatggagatttttcgtttggatgatggttatatagatttttgatgcggttttcctcttcctcctgaacagtgcactgcaaacgggaagttggagaagtttctcactttgtatgaaatgtgtgaaaacgtgtcatgttatttgatgccagctactgcgacttttgttttacgacgcagtgtgttatgttagagatagaggtttgttacatagagttgttacgtgagataacaacgcatgagatgataagataggaagagattttgttttctgttttgtaaccaatcttcaccattgtatgcgccactttgggggcttttcccaaacatatattaacacgtacagcggcctctaacgaggttagaacgcttctgccaacttatatggtatcagagccaatcatccacgcgagagatcgcatctaccaaaaatggcgagttcctccaattccgccaccaatccactctccggccaagttgtcccagagaagctcacaaggaataatttccttctatggaagacacagatccttcccatcattcgcggtgcccgcatggaggggtacctcaccggcgcgactcgcgctccgtcggcagcgatcgacgtcaaggaaggcgacaaggtcgtcaccaagatcaatccagcctatgaggaatgggttgtcgtcgatcaacaggtgcttggatttctccttgcatctgtatcaaagacatactcacccaagtcgtcaatcttgaaacggcggctgcgacatggagagtgatcacaacgatgctctcctcgcaatcccgtgcgcgtgctctgaacacgcggcttgcactgtcgacgacccgcaagggcgatctcagtgtcacggagtacatcggcaagatgaagacgctggctgacgagatgtcatccgccggcaagcccctcgatgacgaggagatgatgtcgtacatcctccccggactcgacgacgattatgagcccgtcgtctccactcttgtcggcaaggcggaggctgtaccagtcgccgaaatctacacccagctcctgagttttgagagccgagccaagctgcgacagcaggctaatggttcctccgtcaacagcgcacgacgaggaggcaagggaggcggcggcggcttcagcaacaacgtcaacaccggcaacaccggcgcgtttcgcggccgtggcggtggtcgcggcgatcgcggaggccgggggcgaggaaacggtggcggcgcgcgcttctccaacaaaccgcgctccacctgtcagctatgtggcaagattggacatgtggtggcagactgctggtataggtatgatgaaaatttcattccagattcaaaaacagcagctgcggcttcctatggtgtagatacaaattggtacatggacaccggagccaccgaccacatcacaggagaactggacaagctgacaacccatgagaagtacaacggcaaagaacagattcacacggcaagcggtgcaggtatggacattaagcatgttggtcattctattattcatacccccatatgcaatattcagttgaaaaatatccttcatgttcttaaagctgaaaagaaccttatctctgctcatcgtttagccgttgataatcatgcctttgttgaagttcatcctcgtttctttgccattaaggatcaggtcacgaagaatcttcttcttagaggaccgtgccgcaatggactgtacccgttgccaacatcttcattggccacatccaagcaagttcttggtgccatcaagcccacaatgtcaaggtggcatagccgtctaggtcatccttctctagctattgttcagaaagttgttagtagcaataatctcccatgtttaggagatgtcaatgagtcaggagtctgtaatgcctgccaacaggccaagagtcaccagctaccctatccaaaatcctttagtgtgtcaaataatcctctagaacttgtgttttcagatgtgtggggacctgctcctacttctgttgggggcagaaagtactatgtcagttttatagatgatttcagtaaatttacttggatctatttgcttaagagtaaagctgaagtttttcttaagtttcaagaatttcaacaacgagttgagcgccttttcaatcgcaaaatcatctctatgcaaactgactgggggggagagtatgaaaaattgcactctttcttcactaagattggtatctcacatcatgtttcatgtccctatgcacatcaacagaatggttctgcagaacgcaaacatagacacatagtagaggttgggttggctctcctttctcatgcttcaatgcctctgaaattttgggatgaggcgttcctagctgctgcctatctcataaatcgcacacctagtaaggtcattcagtatactactcctttagagcgcctccttgatcaaaagcctaactattctgctcttagaacctttggttgcgcttgttggcccaatctccgtccttacaacaaacacaaacttcagtttcgctccaaacaatgcgcttttcttgggtatagcaatatccacaaaggttttaagtgtcttgatatatcaactggcagagtttacatctctagagatgttgtatttgatgaaaatatttttccctttgaaaggttacatgcaaacgctggagcaaggctgagatccgaaattcttttgcttccttcctccttatatcaaaatattgcaactaatggggttgaatataatgaccgcatgcctaatgttcctgagcaatctaatgtgcctgttgagcatgtgacagatcaggagatacaattcggagaaggttcagaaaatacagcacaaaatgatcacagttctgcagcaaatattgaaggagatgcaccggatctagatgccgcagcgatcccgagggaggatttcagccctcacctgtgcacacgcctgcactgtcttttcccgacgatgaagaaatcggcgaaaccggtggcttgacgtctctgcagcagggggagcagtcgcatgcagccacgtcgccaagcagccatcatgatggggggagcgacagccctctgaccggcggatcgtctgcacccgacacagccgtggtcgagcccgcacggccggtcactcatctccagcgaggtataagaaaacagaaggtttatactgatggtactgtaaggtatggcatgctgacaactacaggagaacctcaaaacctagatgaagctttgactgataaaaactggaaagatgctatggatgctgagtttactgctttattagaaaataaaacttggcacctaattccacctagtcatggtaaaaatgttatagactgcaagtgggtctacaaaattaagagaaagtctgatggtagtctggatagatataaagctcgtctagtagccaaggggtttaaacaacgctatggtattgattatgaggacactttcagtcctgtggttaaagcagctactatcagaactgtcttgtctattgctgtttccaggggatggtgccttcgccaactagatgtgcaaaatgcttttctgcatggataccttgaagaagaggtatatatgaggcaacctcttggttatgaaaataagagtaagcccaattacatttgcaagttagacaaagcactttatgggttgaagcaagctcctcgagcttggtattcaaggttaagtactaagttgattagccttggcttccaagcttccaaagctgatacatcattgttcttttataacaaaggaggtgttacaattttcgtacttatctatgttgatgatataattgtggctagttctagatagaaggcagtatctgctttgctggcagatttgagtcaagaatttgcactcaaagatttgggggatctgcattacttccttggaatagaggtcagtacggcaggtgatggtattttactgaaacaagaaaaatatgcctctgatttgttgaaaagagcaagtatgctagattgtaaacctgttagtactcctctgtctgtatcagaaaaactgtcagctcatagtggaactgctctaggagaaacagatgcaactagatacagaagtatagttggagctcttcagtatctgactttgactaggcctgatatttcatttgcagtaaataaggtctgtcagtttttacatagtccaactatagatcattggatggcagtgaagaggatattaagatatgtgaaattctcagttgatcttggtcttaagataagtcgttcatcatccactcttgttagtgcttttttagatgctgattgggcaggatcaattgatgacagaagatcaactggaggttttgctgtgtttctggggtctaatttggtttcctggagtgcaagaaaacaggctacagtatcaagatcaagtacagaagctgaatacaaagctgttgcaaatgcaacggcagaggtaatgtgggttcaggctctacttaaagagctaggaataaattcacctgaaactgcatgtatgtggtgtgataatctgggagctacttacttggctgttaatcctgtgtttcatgcacgaactaaacatattgagatagactatcattttgtcagagagagggttgccagaaagcaattagaaatcaagtttatatcttcaggtgatcaagttgcagatgggtttactaaacctctcggtgctccacaacttaggaatttcagatacaatcttaacttaaataagttatgattgagggggagtgttagagatagaggtttgttacatagagttgttatgtgagataccaacgcatgagatgataagataggaagagattttgttttctgttttgtaaccaatcttcaccattgtatgcgccactttgggggcttttcccaaacatatattaacacgtacagcggcctctaacgaggttagaacgcttctgccaacttatatgttagagcgaggatgtattgatcagttcgtagctcattagaagcacaaccagctgaaaggtgttttttttttcatgtgtgaaagaaaggtatggttttgagtatgatatgtactagcttgtttaggcaggtggtgaatgggccatgctttccccattctgctgtgtcggatggtcaactctgggaaattaagcactaccgcgacaaattgagagattattacccgacaaggaaaaggacgcgcgcatgggccgcaaaatcgaattgggcagctgcttttgcttcctcgctatctagagagcttgagctagctaagttagcgtcaagctactccgcggattcaacaaattaatcgcattcctacatgtaacaatgagtatgcattgcttaattttctagtggtcagttgagcaatatgtgatgccgattaattcatgaggatgcatatgcatgattgctgcaggacgcaagtcgtagccaggtacatatgatatgataatagggtagctactgaaatatcaacacctaattaagatagcctgtagaaacaaaaataggcaaatcaaatactccaatttaaggtaattagaggccttaaggtcattctgaacaaatatattatcactcatgcatgtctgttgcctattattgatcatctgacttggacgtatggaaagcagctgccaaatagttaaaagattttcacttggtgtgtaggcgcctgtttctgtctactactagtatacttgtgactagtcacgttgcatcatgggataaatatgtatgcacacagaattgaattgaattatgagataaacgacggagctagtcaagatgattaggtagaaagggatactagtctagtttttattttaggaggattattatacatatgcctgaattccaaattgaactcaacagcaattgactttacctccctatattaattactggctattatctggacagtccaaacatgtccagacaattcttatccaacatttagtttacatggacagccaaacagaaagatagcatgcatggtccctgtctatattcctatccatccactagcagtagcatggggctcttctcttgtgtgaagagatgaggtcctctcatttttggtccagaaagaggagatgagaggagagggcttcctggaaggagactgagactctgagtgagtgagagagagagagagagagagagagagagagtagtccacatgcatcgattttactccaattaattaattgtcattttcggtcttgatcagaattcaggggaaactcactggaaaaacatctcctagctagctagtagtccacaggagaggagaagagaagagaaatgctgttgccacttgccagaatgccagtgttgtttgtttgttactcgatggacaaaacgacgatgactagctagtgttgtcactacggttggcttttttttgtttgtcacctcacctcgtttggtcggtcgatcgatcgatcggttggtgtctcacctcctcttccttccttccttccttccgtccttgttggtaaaagttgccgatatactccaattgcgcctctctctctctctatctctccacgtgtgagatcgatggaggacctgtcgtgttgcaaagaggacacgggaaggaagttgattgattggtaatttgctatgtatgcaccccaaagtagtattagtaagtataatcctactcaaaatattacaacatagtattagtaagtactcttttcatcctctgacccaaaatataccaacatagtattagattagacacaatttattaccaggctattcatatttttagtaacaggttatttggactattcgtgatactagattttgtataattcagtactaggttaatatatcttaaagcggagaaagcagaaacctagtacttgattagtcatgaggtggtgccctaaacgagtattagattgctctattttaattttgcagttttcctttaaaagaagaagaagaagaagaagaagaagaagaagaagaagaagaagaagaaaagaattgctgcttcccaatcacagggcttcctcccttggatagttggatcggtctgcttcctctagtacctagtctaggtccttaccctttctacgagtaatagagatcgatgacaacaaaacaacgtgtgtactagtaaatgatgagagaacaaattaatactcccaactcaatcaactcataataacactccatagaggaaaattaactagcttctagtacaggaaaactaactagggccgcctgcctcttcgatgtagctaggattaattgaagttacaagtaattgatgatgtatacaatatagtacgatcgagtatatatacatatatatagggaattaatatatggaagaaataattagcagcaagattatatgagaagaaacaagataagtaataatgaagtggatcgagtagctagctagctagctagcgtgccatgtcgggcttgggggagtagatgcttccggcgtgctgctccgatacggtggacatctcccaggtgagcttcagggcggtggcgtcgtgcggcggcggcacgtattcctcgagcttgcagagcacgtcggaagcggtgggtgcggcgacaatgatgcggcgggcgggcggcgagacgaagccttcgtggacggccttgtcgatgaaggcgagcagggagtcgtagtagccgtcgacgttgaggaggccgacgggcttgtggtggatgcggagctgagcccaggtgatgacctcgaggagctcctccagcgtgccgtagccgccggggagggcgatgaaggcgtccgactcccgcgccatctccgccttccgctggtgcatgcttcccaccgccctcacctcccccagggtctcgccgatcagctcgcgtggcagcacgccattgggcaccacgcccaccacgtgcccgccgcctccgtggacggcgcgggacaccagccccatcagcccaacgctgccgccgccgtacaccaggtcgatgccgcgctccaccagctgctgccccagctgcacggcggccacctggtacgacgccttcttcccggggctgctgccgcagaacacgcacacacgccggaaccgcgacgccgtcttcttcttcttcttcttcttgctattgttgttcgccggcgacgactccggctgctgctccctgctattctccatcatcatatatacggccgacgaccttaattattggctgctgctggtctgcacccaattcgatggaggtcggaaggcagagaggctcccaacgatagaaagaaacctccggtcggcctctagtttcccacttactaatagtgtttttttctgaatgacccgcacaagacaacacaagaagattcatattgatatagcatgaaaaaaattatgtatagaattacaacagaagaaggtcataattagggaaaaaaaaaagactactccaccacatgctacaggctccaaacacacacccgttgtacgtgaccgataattgctagccctacaaggaggtcgcagacgctctcgcttcaaaccaatttcaccaagaatgtcgacgacagactcccggccaccctcacaggaggtttgaggatgaggatgagagagagagagagggggaaagatctgctcattcttacaccaacctagagacgaaactaaccgaacgcagaaggccaaactaggaagaaggcaatgaatgcgagggaacatgaccttcgaggcggtgcctccatggaggctatccaccttggactaggttttcacccgaaaagtcatatcgggtggagagagctgacaactcagcaacattctcaagagcaagtacaacaccgaggcgtcatcgttgtcaacccgaaaacatcgagctaggatttcgcccacagcaccagctcccacccaaccattgccattccaaagctgtagcgcccgttccgtcgtggcgcctagcgggaaaattatctcttaaaaaccctaattgcgaaatttgtttctttgcttgttgtctagtgtccgtgccatctcagatctcaaattcctccgcaaaagtctattttgcctccccctgggttcgatgggccgaatctctctcgggccatctccccctccctccccggctatctctctctctctctctctctctccccctccgctccgctccgcccgcgcgccgcgcgcgcgtgcgcgtgagccgctcgcgccgaacgcccctcctccgctccctccgctctgcccgcgcgtgcgtgagccgcccgcgccgagccgagccctcctcttcgctccctcgctgccgctccccgcgcgtcgttcgcgcgcgcgcgcccgcgtggtcgtcgctcgcatcatgcctgcgctgtctgcgctgtctgcgccgcccggccccgctgccctgccacgcctgcagccgctcggccccgcagccagcgcgcgtgcccgagccgcgccactccatccgccgcgcctcccgttgcaagccgcgcgcgagtgccgagtggccgaccgcctggtcgccgccgtcgtcagcgcctgctcgcgcctgtcgcccgtgtcgccgctccgctccacaccgccccgccgtcatcatcgcctcggccccgccactccgcgcgctagcctccaaggggcggaggcagagtccctcctccctctgccgcgtcgccccgctcccccctccttttcccgaagaggcaagggacaagccccctttctctccccccttttcttcctttttccctctcgccggcgtcacctcctgtcgccgttttggccgctagccggagcgccagctcgtcggcttgaccgtccaatgtcggttcccctctcccaaactgacattgccgcccctataaacctaagcttccccctttcctttcctctcccgttcgcctccacgccattgccgccgcctcccgtgctctgttcgccgtcgcctttcgtcgttgcgcgtgtcggaggagccggcacgagcaaggacgcggaaggggactccgggcgcgccctctccttcctcttccccggcccgaggccggagagattactcccgcgccgtcggcctctcgtcactgcgccccgcccgcacggtagtgcatccctccgttctccctcctcgctccatctcctccccttagactcgggtagtagcacgagtagcctccccgtagctagccggcgccgccccgaccgttgccgccgctcgccatgtgctcgccgctgtcgctgcccgagctcggaagcgcctctcgtcgccggcctccctcgatgcgtttcctcctaatccaacgctagcatcggattcccgtagccgcgtagatgctctcgccgccaggaatcggccccttgtgacctcgtcgccgttttcccctcctcccgccgccggttgccgccgccgcgattcgccgccgtcaagctccctccggcgaatccgagccgttggctcgtctcccctcgtctcgtgcaaccacccggtgtgctcgctttcgcctatatcgccgtggttcgctccgccgctcgccgctgtcgtccgccgttcgttccggccggcgtcgtcgtctacctcccgccggcccgcgtggcagccacgtaggcgccacgtcggcgcaagctcggccaaggccgggtcgaattgaccccggtcagcccctccccgtgcgcgcgttccaccgcgagccgtgaggctgcgcgtgggcccgccgcatccgttccaccgcgaaccgcgcgcgtgcaccgcatccctcccccgcccacgcgcgtgcgccgcgtgctccctccgcacggtgagccgagccgctgacaagcgggtcccactcgggaccacgcgaggtgagcccggtccaccggcgccccctccctcccctcccccgcgcgcgctttgggccgcctttcgggccggccggcccagttagctcggccgagccgcctcctttctctcgggccgcgccctcgccgcccgagggaagtctaattttccccctccttcttttcttttcttttccaaaaaggatttaattaaatcatttttcctttagaccaaaaatccaataatattagaaattcaatatcttcccaaccgtaaatccgtttgactccgttcaacttccaaaattcctcaaatctcgagatctatctaatggcacgcttagaggtcattaatagggctttattttcgccgtttgttgagttgtcccgttttgcgtgtagtttcggagcccgaagacccgcagtgcgaggatttcgaggatcaagctctagatctcgagcaaggcaagccacctttgaacatcttgagcctataattgaaatttaattatgttgcttgaaaaatattatgtattgataggatcgcacttaatctgttgtcccgtctgcaaggcagattggcggacctacctaatttgttgcatttgatccttcctttgataattgttatatcgtgtccccttgtaaccatctagttgcgtctcgatattcgtgcaccctgtgcgagtatcgacggacgccttcaaacttaaaattctgaaaaacttcttgggtaaaacttgggttttacaaaagacttggaaaacccgacacctgggtcggtgcttgcgaactaaatgaatttccaaaaccgcggaccggggaacgtaccgggtgtacggtttcccgctcttgcacctaaggaccgtttccttggaatttcatccgaacataagacaagtacgaccacatgggtggaatgggacacccctggctgagtaactagcttatcaggggagccttgatgccgagagacatgtggattcgccggggtggtgtcggggaggacccctgggcttcctggcacagtatggtctgggacctaaccagttgttggtctgggacccctctcgtcggcatatggtaaacctgtgtcggctttggaaatgccttgtcatgaaagcttggaggtctcccgacgtggcggatccccatgggctgggagatccgggttagtaatgtcgtgtgggtaaagtgtaccccctctgcagaggttaacaagctgttcgaatagccgtgcccacggtcatgggcggatgtgaggtgattcctagcgtagttttgtttgactactgcttgtgaaattgctgttgtggaaaggggttcgatgattgaaaaatctgcagctgatgggatcagctaggcccgggtggccgtttgaaagttgttggcccgggtggccgtttgaaaagctgttggccgggtgccaaccttgaatcaattctaaagactgatacattacacatactccgaccggacgagacgcactgtctcatccgtgtcgtttgagaagcactcacttagttgtttttagaaaagagttcaaataaaatcaactgcaaaaacaacagccttccttgaagcctgcattaaacacttatttcccatggcttgctgagtacccccgtactcacccttgctctatataaataatccccccagttgctgaagaagatgaagcggatcctgctgatgaggagttcttccaggagcaagccggcttcgatgagttttagggtttcggcctagttcccaagtcgcgcctgtgttgtttggtccaagtcctggcttccgtttcccccttttgtaatgcagttgtgagctcgggatctgtccgcagcccaacatgactgtacctctactctataataaagagacctctgttgctgtgataatccgtcttcctgcgataccagcactgtttcctgggactggtatcgattaacaggttaatttggagcgtcacgggctagttccggtcggtactagttcggggcgtgacaaaagccctgccacccgaacgacctcgtccagcatgtaggctcgccgcaccggcacccctccaccggccagcacccctgcaccagctcgatggcactcaaccatcctccatgcaccacaacaccatggaggtccggtcatgtgtggtcatcaccgcctctccccaagccaaggagcagctgccgcatccccgcaggcgaccgtccggacccacgcctcagcctccacggccatatccaccgccgcctcgcgctgctgacccgtagtttcgcctcctccgctttcccgtggcctcgccgccgtggctagacccctacctccacggcagcaggcaatcgtctctgagctatagtgcctcctcgcaccgttctcctgccacgagcctagacaggaggcgccgaattcggccgcgggggtgacggatccgactgtagagacgttggatttagccaccgatgccccacaccctatgggagaggcctaactgccgtcttcattgccaacgctccattccgcagcattgctcctcgccggatccggcctggatttgaggggtggtgcctctatctccttgggtcgccacggctccctagccactgtggtgtccttgtgagagaggagagccctatctactcctttctccgtttcatattataaaagacgtttttatctttttactaaattaaagttgtttaagataaaaaattgtagaaaaacatagcaatatttttaacaccaaacaacacatgctatcaaaatatattcaatattagatttaatgaaactaatttgatatcgtaaaagttgctgcatttttataaaattaatcaaacttatagaaatttaacttaaaaaaattcaaaagtgttttgtaactttgaacggagggaatagtagtatctagctattgaggagaagagcagagcagtagtaacattcagtggatacaggaagcaggagtatataggctatgttcggaagtagccgttcccaacaagcacagtgcccatgaaaaacggagtgatctattagcatgcaattaattagtattagccatttttttaaaaatagattaatatgattttgtataattttttttaaaattacttttatatagaagctttttgtaaaaaaaacataccgtttcgcagtttgaaaagcgtgcgcgtggaacgagaagggagaggggttggaaacctgagcaaataacacagccaccatacaccacgagaggcagtaggttgggtgattatttctactgtacatatggcgagcgcgcgacaggggatcggaggtcacgctctgttcttggatctccattctccaacctctctaactcagccttgccactttgccagtagtatacaactacaagacactgcagatcgacactcttgctagtaataagcagtgcagcgcgcggccaattaaccccaagatatatatttttcctttacctcttctttcttaaatcggtacacggtacatatatagtcccagtgtaggcgatgttacgtttgtgccgaatcctgacctgtttgctactccctccgtcccaaaatataagcatttttagctataaatctaaacacaatatttttagctataaatctagatacatatgtaagctaaaaatacttacattttaggacggagggagtatacaccttgtcccatcaccatctactcctccgtttactatgcatatatacgtacacaaggatctatacaaatacatagctaaagatagggatagtatctattttgagatagggatagtatctatttttgaaatttgacaatgtcaaaatttggtaaggttttttttggcatcaaagtgaataggccctttatgccattttcaaccttaccaaattttggtaaaattacttaaaaaaaagtggctacatttagtttgctgccaaattttggtaactatataaaaaatcctaccaaaattttagcaagttgccaaaattttaataatatgccaaaattttaataactatgccaaaattttgatcatgctaaaatttggtaaggttttttttgtcaacaaagtgaacaggccctaaaccccaaaattccattccatctgtgatgatctataggtagatagtcggatagagcgacacgtggcgaccactattacgtacgtaagctgtgaggtcactcgatcagtttgactactggattaattatcggctgggccgcagactaaactctggcaacgcggttttgctagctcccaatacgagtatattattactccatgacgatcatcttaattaatctgtcctacttaatcggatgcatatactccctattactcgtaaagaaaatcgtttaggacatcaacacgatctccaaaacacaacttttagttcttgtttctataaaaatatttattgaaaagtgatatatatatatatatatatatacacttttatgaaagtatttttcaagacaaatctattcatataattttttacattttcaaactcaacaacttaagtgttattcatgatttatattcctaagatttgacttaaatattatcctaaacgacttcctttacgagtacagaggaactacgtatatatatgtagtctgttggatatttgtcgacacacattattctccatgcaggttaagcgaccgtgtgaatcacatcgttgcttaattatatttagggctctttaaagcaaacaaattataaggaattttaaagcattaaattcctatggaaagaactcaattgcaaatttgcggtatgatccatttgatgaagacatcagtcctttagatacacaaagtactcttacttctcaagttgttaagtaaggtccaataactaaaactcgcgtctgataattgaatttacatgtgagcttgttattgagtacttctttatgtaattttgaggatagattactacctattaatttaattacgattagtaactatggagagaatgatgtagcacttggagagaggctagaagatggaaaaggtcgtcatggacgttcaagccaagatgaaggtccgccttatatcgaatttgagtccacctcgtgctccaggagcaatcgacactaaaatcattactcagattgcattcggactccgattttgacgttctatatgtatggaaagctaacgagactatctttccaatgggtgtggtcacacgtcaaaattccttccgagttaatggaaatcatcgaaagaagaaggcgttcagaatctgaccaggtgttgtgtcaccatctttgggcccgttgggccttgtatcatgtcggagtccgatgaggacgcgtccaggggttcgaggtcgatcctagaacctatatattcagtagctatcattgaattagggttgggtttttcttagattatttctgccatcgcagtttcgtcgctagttcggtttgtggaatcccaactttcagttcgtgattaatcattcatctgcaattgagttgttgtctttcttgttcttgattttgttctccggttcgcacgtagggattagccttctcggcgaggttaaacgggttttgacacggttaataactagagaagacgtggtgctacgacggattgtgttgattgaaagcatgatcgtgtgtgtcaagtttccaccatcaagagtaatcgatcttcacctgacggaagatcagacatcccgtttccatcaccattagaactaataaatggctctcctgaatttcgttgaaattcgttaggattgtcttaaactataggaatttgaaagatttttaacatgaggttcatccaaacagcaactccttattgattttaaaccgttgaaaatttactttgtgcctgcgcatgcaaaagcataagaaaataaaggaacgactagcttagtgtggtccttgttggtagatgggagacgatcgatcgagctgtaacttaattaatttcccttaattttgttttctggatgtatgcatgcataatccttgattgatcttttatatgcacgctagctacctagtagcagtactgttttgtctttgctaatacatgccaaatatatagctagctctcgtcaaagattctctagctagcttgtccttaatttgttaatcgtcataattagtagttgggaattcgttagcttcggttgtgacctatgcaatccaacaatgttgctcgcggaaaaaaaatcgtatacagtacacccatcatttttaatataagcaattgaacattttgaattttgacgagcgagaaaataaaaaatattagtcatgtaagatgatattgctatatttatcattaaacaaaactatcatgatgtgaaactcttctatttaaaacaactcattttatataaatattattagtaaaagtaaaatctcatagactcttgtcaaaatccgaaaatgcgtatattttaggaaggggagtataatagttgttcaattaccatgaaattctggtgttgtggattaacaatgcatatatattggttaggatttcgctattcaataattgttttgttcgggagttagcttagtcctattgacttaaaaatcaaaaagcttattttagtatgaacatttatgttttatgctggtctctttggcttatccggaatgatattgtgtttgacaaagctccaataaatcttatatgcaagtactttaattttggtccaattcattagttgtggttttaaatcaaggtacaaaggtgtaacgaggaaaaagaaatcatacttgcatgccaaggtttggagacgatggtttggtatatcgttgtcaactttggatagagattttacatccaaccgttgaatgaagagaactaatggctgaagggtgttttgtgcaagttttggcgggcatatccttaagaaaaaatatgaagtcttccttagtgtgtgtgtatatctctctctctctctctcacacacacccctagatgaacattgcttgaagttgccatgtagcgaagatagcttgtaatgtactccctccgtttcaaaatgtttgacaccgttgactttttagtacgtatttgatcattcgtcttattcaaaaaatttaagtaattatttatttttttcatatcgtttgatttattgttaaatatactttcatgtacacatatagttttacatatttcataaaattttttgaataagacgaatggtcaaacatgtgctaaaaagtcaacggtgtcaaacatttcgaaacggatggagtatttattgtaactttataaagaaaagggaaaaaaatatactgcggtcgtagaaactgttaatcgggcgaaagcctttgaaaatgtttattatccatacaccccataggtggtgcatgtgtcggagagcaattaaacgtcataggtatgtttaggtcacttggttgaaactaaaaaagtggggttaagaaagggaccaaagacccataaaataaataagcgattgtaaaaataaacggaaaaacgaaggtacggggttgaattgatgaagcaagaaaagaatgaagtagcccacagacaggaggcgaggcgaataagaggcaggcccacaggaaaacaagaaagatgggccccggcccaactaattaacgcaaagaagaaattaagatccccaccccaatgaggggaggtgatgagatccccatcatcggagaaggagaagatggagtccaccaccggcggcaaggaggaggagaaggagaagctgtgccggcggtgcaaggcgacgtacgcgccgtcgggcaacacgcggctctcctgcaggttccacccgtcgtatttcgtgtgccggcgccacgacgaccagaagaggtactaccagcttcgcgacggcgacccaccctacgccgccaagttctacgactgctgcggcgccgaggaccccgacgccgccggctgcaccaccgatttccacctctcctacgacgacgccgatgcctagccgctcacccctacctacctaccttgtacgtataccgtataccaccaccgcctgtattcctctttctttctcatgtatgctactactccagttcactaataacgccacgcctacaaacaaattactgtaatactaatcaccaatcatttcaataaattcagtcatatgagatgagatggctccttaatttctactgctatgtagtaatacttaatttccgatatgaatgaatgacatggatctgaatcccaaatactactccagttcaagttaaaggatcaggataattgcgaacaacagtaatgatgatgcattatcaactcatcaacatcaagcacatgcatgtatgtatgtttgtatgtactccacttccatttgaattcaatgattgcgactcacacaaactagaagtaattcacacagctgcatcactagcttagctagctagtagtggactactactccgcaattccgcatgcgcacccgcatggccaccaatgctctttcttgtgtcaaaacaagattcatactcctaggctagtggggatgatcttcacgttgatgattgggaaaaagaaaagggcaatatataatactccatatgtagtgggcggactggccctcattgatccatttgtatttttatcactactattttctttctcttccccttttcaaatgaatgagcagcagcctgagttttgtttttatttgaacgcaggatttccttttaaaaaaatagaattcgattgctttgtcatctcaaatcctatggatgaaaaaacacaagaaaactccaggaattacagtttgaatgtaacacaacaaaaacacatgaatcgaaagagagaaagatagacacaaaggaattttttctagcggtagaatctcatgttgacaatccttcaaaattcctatgatttgagacagtcctaaagactttcaaaggaatttggagaagccattcctttgttccaaatgcctgtaatggaattttttttcatagtaatccaatcctctaaaattactttgttccaaaggagccctgaaattatttcagtactctggccggcaagcaaggttgaattggtgggatgatgaaagcaaaggtccctgaatcaatgaatctggctatcttggccacacaagggaatcgtctgcactagtgcagtgtcacaagttgctgtatgataggatgagcacgtgataggtccccagatcctgaccttcaacagttatttgctactactgttgtcttcatcctaaaatgtaaagaattttacctacatatacttgatccatttcatacaacttattttagtatttaaattttatatcaaaatacttatcacttttattacaaagtagttttaatttaaaaagatcttccttccctatcttttattgatgcagtcatacattaatacaatctcaagtcttattgactcatttgcttttttaaaaaaataggatgtattgaatgagggtaaccatgtaatctaccacatcttttggtttgtactactataatgtttgttagaacaagtaatttgaaatagagagatttaaaacagaggaagtagtaggttactcccttcatcattttaaaatatagcaatacagtatgagatgagatttaacttagtactccctccatcccatattacatattagagggcgtcaattttttatgacagaaggcgtgatgtgttttctggttcaaatcttccaagagtgcgcttctgtgtttggtcttcatgtatgcgtgtgacgcttttggcatacagatccacccaatgactgcttgagcatgcagatgcagtcagagcaacgggattaattctacattgatgctctttattagagcaagttcaatagtatagccaactactggctctaatttatttatagctaatctaatagctcattcatacaatagttacatactacactattaatatctagtcccacctgtcatagacacactgcgtcttggagtccgtgctacagcgggctacaaatctgtagctcgctactcttctctctcctgatttatcttcttaaaatatatttgcagttggcttatagcctgctattgtacctgctcttaggggcctgtttg

SEQ ID NO: 7207 - DNA, 26986 bp, Oryza sativa
tgtcaccaaagaatggaatccggagtaactagtctccaataagtattgaaggtagcaaatgaaagcagtaagtatcgtgatggtggattgtgcgaagtaagaaataacttcccaaagcagctaaagcaatagtggagggatccttgtgtattttgagtagagtaggaagaaagaggaatgggggggggggggggggggacctacgtaggtgttgagctgcctgacgaaggaggagaagttgctgtgcttgaagtacttggggaggaggtcgcgcgcgaactcgggggtgttccacacaacgaagctgttgttcccggggccccatgagacgacggcatcggtggccgggtcgtccaccatctcgtacgtcttcatcaggaacggcggcggcgcggtcgccaccccgttgctgaccgccgcgccgggcggaggcgcgaccgccgtcgtcaccgccccggcggccgcagccgcagcagcaacggcggcctccatgaggcgatccgtatggggaggcgtggtgagggtcaggggcgcgacagcgtgagcatgggtagggttagggggaggcgtgggatcggggcccgtgggtagggggggatttgagggtggggaatttgggatttgggttgcgggcggcgctaggttttttgggggctcgtcgtcggctgctagtgggaaggagacgagacgagagagagagacggcaggccgcagagaagaaaccaacccatccacaagaacaacaggggatgggccttttcttttcttttttctccgacgagggtgtttctgtaattttgctcttctttgctttgccgctgccgctgcggctgcgactgcgacctacctaacggcgctgccccgtcgccgtcctccactccgccgtaaacatatctgtatcaatccttccgtttgtttgttcgcacgcccatgaaaattatccctccaaataatctgatttttatcttaagaataactttttattgttttccttgcggtcaccttttcttaataaaaaaaaactttttttataacaaacaactattgtagaaaccaacctataatacaaacatgtatgacacctacacctagctagacatatgtcatacgattgatacattgcatatacgcatgaaagcgaacttcaggcaggcaggggtcatctcgccactatcctacttactcatagccttatcctacgtattctctccgttcccaaaaaaaataaataaatcttaacacaaacatgttcgtttcgttgtaaattgtaatatgatatatcaagggcatttttagatccatttgaaatagcaaatagcaaatagcaaaagttttggtggcaaaagttttggcattgcaaaagtactagttggtgtttagatgcatcctaaacttttgccattctagcactttttagtggagagagagaggtcccaaagcactttttggcacaatttgctactatggcctagcaaatggtaaatggcaaatcgccaacttttgctactagtgtttagatccaaaatagcaaaaagtgctccaaaatggcaaaaggatctgaacagggcctcacatttatgcgtaggtttgtttttgaaattgatgaagtacttactccctttatcaaaataaactaacctcgtccaagacatgaaacattctaatacaacgaatctggacagtatgtctagatgtgttcagattcgctatagtagagtgtgttacatcatgtacgacattattttttttatagagagaggacaaccttagcttaactatacagagagataggactagacatgtgatgtgtctgtcccgagaagatatgtcagtggacttcatctaccaaaagcatcctccttttgagattgtgaatttggattcgtctttctttaatcgaaacacgtttagattcatccaaccctatctgatcccactcaaaaaaattgctattgtgctatcttcaaacatgggttttgccacatatgccattctgcattttagcttcgttaaattgccactttcaaatagatgttacatgctatagtgtccttgccatatgaatggacggaaatgccccttgtcctctttttctctttcaaggcttggaccgttgtcatcgcgtgctgctggagagggacatagacatgtgcattgtatctagccagcccgctgttggcaccccattgtcgagccgcgcgtcgcccggctacacagccatggttcttctaatctttatcgctcctcctgcatcagcgcgacggcgaaggccgttgaagaaggacacggacgaggacgaatgtacgacaacggtggttgtagttaggtggcatgacagaggtttggcgggggaggggggatgaaagtggcggtacattaagttggtgacagtggagcgtaggccgacgtcggtgagccgggatggtgagcatgacgtttggtggccgctggcaagcacctccaacatatgttaaagggaagggagaagaagtctaagatcatgttcttttctccaataagagctggatgaagattaagattttcatggcaaacttttcaaactgctaaacggtgcgttttgtacgaaaactttctatatgaaagttgctctaaaatatcatattaatcaatctcttaagtttgtaataattaaaactcaataaatcatacgttaataccacatcgttttgcgtaaaaaaacttaatctccatgtttatctttgagagaaaagaaaaacacctaagggcattatcgtctgcgatgatattctagcgcaacacctaaggagtagtagatatcaattgacagtggcaatttagcaatttactcgatcgccaacttcatcatcgtcttccttggccgccgccacattctcttcttcactttaccaatttccttgggatcaatcaagggtcagtgagcagatagatgggcatggctcacgtcctcagcctcctcgtcgtcatcctcgtcgcaatcccctcttctcgctcgcacgccttgccgtcctcctcatcccccttcgacgccgcgctcgccacgctccagaaccagatcgcctaccgcttccatgccccggacctcctgcgccgcgccatgacgcacgcctcctactcccgcgagaacggacgcgcgctcgccgtcctcggcctcgccgcctcgcagtccgccgccgcgctccgcgccctcgcggccgaccacgacgcctccgcctccgccgtctcccgccgcgcccgcgacgcgtccggggaggccgcctgcgtcgcggccgcggcccgcgtcggcatcccctcgatcgtgcgcgtcgccgccgggaccaaaccgaccgccccacccgtcgtttgcggcgccctccgcgccctcatcggcgccgtcgccgtcgacgccaacagcacccacgccgccgaggaggtcttctggaagctgcacgtgctcaccgccgcatcagccaaagccgcaatgtgattcacaaatcagactgatcgttaatttaaattagtgctaatgctgctgcctgctgcaatatcatcacactagatcgttaaatgtactcctactacttagtactatcaactagtagtatgaactgtatcagttgcttctaatttccagtttgaactggagtatattagattatgtaagttggtattatgcatcctaatatccagtccacgaatgtgcatctgcttacatactcgagttattatctggaatatatgagatgaatcatggaacaagacttcatttttatcagcacctgtaagcgcttcagcatcggttttacagtggatgttccaagtttgcatttagcagcacttatacacaaaatggtacgtacctaacatcaaataatttgacaatttaactggaatgctgtagaaagctcatgtccaagcatattgatgctctcacaggggacaactggacaaggttggcacatatgcagcaaccaaagctaaaatgcaaatatttcaatcaaaagcagaatgaatgatatcagtgcacgatgttacagggaaaaaacaacattaatgtcagtatacatgagcgcaaactttaatttaagtaatacagtactacgaatttgtatcagccttgcatttcaagatcactcttgcatggggtttaacaatgtcaggagctcattttgtccaaaatctgactcaacccccttgtacaaagacaggatgacaatcttcaagttaaggatggttacttctttgcttttttgctccgatgtgtattttcaggagtttgagcatccaacttgcgtttcttggctagttgctttgccttccttgctgcaacagcagggcgcttggctttttgagaactagcatcatgtcctgtctcactagtcctgccttgctgcttcccctggtaacttggacgctggctcaccttcgccttcttcaccacaccagatttgcttgccctaaggccttggtatgacaaagttgacgccttccgtttggtcttgtcactgccttcatgggatttgctgcttggtgttaaagctgtcttgtgtttcgatccaccctttgttttgccagcatccgtcgtcttctttggtgttgcatcagctgattttgcatgtgcaagcctcagaaggcgatctctaatcttgaaatcctgttttcttacgacagtgtttgcagcctcctgcatggcagatattaaaatggtcagcataaaagtgtatgattgagtcgtcaactggctatcttggttctgaatacataattcagcaaggaagtctttctgttatcgtcttcctccagtactagcatttaattgtatggcatggttaatgctaccatcttcaataaatgatgttcaaaatcacgtagtacatagtaaagccatttatcgacaaacatattatacatcaaatggacttctgggttttgacttatttagtgggtcacactgcaccagatgaaataggaaggtaaaagattgtacccttgtcttgaacaaaacataggcgataccctttcctagacttgtatctggatctcgaacaacacgtatagcttcaacatcaccttctgaaccactggaaccacagaacttttggtacacctcttcatcctgacatgccagtaaaaaaaataaatctgaccttttcttcaaaagaattacacagaccatatacaatactgaccacatgatactcacctttatatcaaacggaagattaccaacaaaaactgtccgctttctgtcataaagaggtccttcgcctttaagtttcttacgaggtggacatgccatatcgacacggacatgattgccatcaaactagaaagtatcaaaatcaagaaaaactatcttatcaggcacaacatagaagtttttgaattatataccagatatataaactaatcatgttttcagttctaagaaagccaactcaccagggccatattatgagataaagcagcacgtgcaccctgctcatctttgaacacaatataggcatgtacactgcaaagggtgaaaaggtacagacaaaatgagtctgagaaacattaggcaaacaatacatttgacatatgcagctgctcagcacaatcaattacattttacaatcaatatatagtccttgtgcattgatgggcgtctaataactgggatatatattgaatatcagagttgatggcatcagatcatgaaaaatacgaaatatcaacaaaatgctcttaaaggaactatacgaagcacgcgcctttttggtcttagtacaccattatatatttgggtaatcatgtcacttatctcctcctttgcttcaaacagcacagaaggtagaaaccaaaatgacaaagtaaagggctgtggtgattttagttgatcgaggaaagtattccatgcacgcagaaataattacataggcacatcagtaaaaaaacaaagcacgcgctattagaaacaaactgcagaatattgactcctaagctacaccaaagttgtttgttatatcactaaataaaagttgtgccacaatcaacactgttgagattcagaagtttcctatactacattcaactagcaatccaaataggacagataacttgtatatatcaagacagtagttaaaggaaaacactttaaggtgaaatgtggtaaaaaaagagagtgaaaaaacagggcatttaaccatgtataacaaatggtagagaacttaataaatgttcagggcatagaagcgaattgtaaagctataactaatggggaggagataggataggaaaagaaagaagtgtgagcaagcccatttcaatcggtgtttcaatgctaatgtcctaattgcaaccagctgtaatctgttcatatgtaatccatttgaaattgcaagcataaaggataggggaaaaaatgcatttcgtagctatctctgccatctatttaagcaatggcataaacaatcgtagttgatactagacaggcaagaatgcactcacttgtcgacagaatcattgatttttccttttatgacggctcctttccttggaatcttggtctgcagcaaagcacaaatcagcacagataagcatgaggaggacgaagatgaagacgaagcacagggcaatggtgctcacgtcggtgagtggcacggagcgtatcctgacggactcgatctcgccgaacgccgcaaactccttggtgagcgccttcctcttggtcttgagcggcaggttccccacgaagaccgtcctcagcagcttgctctcgtcgtcgaacgcctcctcctcctcttgccctgcccccgccgccgcagccacctcttcgggcaccttcctcttctccccgacgaccggaagaggaggcgcgggtgcgccgccgagcctccgccgctcgtggccggcctcgacctcgtcccgcttcctcttgcgccggggctcatccctgcgcgacttcgcggacggctcagcgacctcgggttcggggtgcttgcctcggggcgccgcggcggtgggcgccggtggagcgggctggtcgtcggagggcttgcggcggaaggggttgtctgcggagaagagggtgcggatggccgcggcgtcgtcggacgcgggctccttgttcttcttcgccattctcgccgccggtgcgaggcgacggcgagacggtttgcggcggcggcggtggggttgggattcggaggcggagggggaaactcttttgttgcggggtttcgcctagttggaactcgccccagaataggggacaggctggggcgatctcgaccgttggattcagatcgaacggctaggatttgtctgtatccttggcacgagccgcggtggcatggtagaacaaggggaggacaggaggaggagggggttttctagggtttctggagttcgacgaccgccgccgccgtcacgctggttcccatcgccgaaggagagaggatggaggagagccgcgcggacgggcggaacccgaaccagctccgccccttctcctgcacacgcaaccctctcgaccgcgcccatggctccgcgcggtgggctcagggggacaccatcgtgctcgccgccgtgtacgggccaaagccgggaaccaggaagggggagaatcccgagaaggcatccattgaggtcgtctggaagcccatgaccggccagattggtaactactctcctctccacgcttgctatcgctgctcgcccaattgaatcgctcaaatggtgtgctatttttattttttattttttatttgcagggaagcaagagaaggagtatgagatgacgctcaagaggacattgcagagcatttgcctgctcactgttcatccaaacaccaccacctctgtcattcttcaggtataagatctactcccttcccatgctgctatggctattgctttgcatttgttttgttctacctatacttattgacaaattgtgttagaatcattgctcttgtgttgtgccacgcaagttgactgtctgtactctcttgtccctgctttaaggacgctgattgctacaaaatcttcattgagtttgcttactgattcaagcttgctatattattgctgacttattgtcaaacttcattttcttagcgtgccatatcaagcgtactttaggtttagtgcatcatgccactgccttatatcgttttgcctttaatttagttatccttttgtttgcaggttgtgggcaatgatggttctgtatccttttgccgtaatgtactacttagtattgtttctgggtgccttttggattatgaacattgtacttgatataggaatgatttcagatttttggctactagctgcagtagattggcatttgaatttaatttcctgtatctctgtgaatctcataagctaactgctaatttcagctggttgtctacagttaggataagtggttcgttgttttattcctgaattctttgcctcgcaaaatgtttgttttggccggctaatataactgacttgtgatgagaaaatgccaagtattgatggaagtccctggttccatgctttttctgagtagtcttccaatcaacatactgtatacagcgtgctttatatgaatgggcatggcctgctatagcagatatcaacatgtagtatgttctttgtaatattcacagattcttagtatttcggtcttcaagatttcaatcaagcacaatccttgactaagtctagcttcttccatgtgcaattaatgcttgctgcgcagcccttgtttttgctggcatccccttgaaacatcttgcaggtaagttagtaatctttgtatgctcattgatgaaatatatctcataagcttttgtgatgcagttgcaattggttgtggagtactggaggatggtgaagtgattttggacacaaacaaagcagaagagcaggtagaaatttctcgttttgattaagtcctctgcactaggaaaggaaagaacgaatttttatctcgtttcttccctaaaaaacatcttagaactattggttcataattcgctctttaaacttgtggacaacaagtacatttttaatccctctactctgtggaaagttatcatattggtttctaggtgggtctagttgtcaggtatcatcttctgaaatgttatgttgattgtgtatagtcttaactgttgaaaatctaaataagttaatgctgagaacatctttaggagtgcatatgcattaatgttactgtttgctgtcatctgcagcaattgaaatcatttgctcatttggtgttccccaattcacgcaagtctgctagttcaaaagaaccaaaccagaaagaggaggattctgagagaggattgataacttccattacccatggagtgatgtccggtatggttatatcttgtgcctcagcttgatgtgttcttctggacattatagatatagggatgcatatattgtggctctaaacatgtcccctttctgtctcatgtaaagaggaagattatttcagctgcatagagaggggccttgctgcatcgtcacggatctcggattttatgaggacaacattgcagaagcaggcacctggagatgtctgagaggaggcaatcatgcgatagaaaacgcctcaacattgcagaagcacaaggttgtagcagctcatgttttgaatatgaaacgcgtggggactcttggtgcattattgatgtttgaaattggctcatagatgtgcatggatggtggagcgatccggcaggaaatatgtagcgccttgttcgcattttttgtgaatgttgagctgctttggtagtgactagtgagttcgtttgtagtactagtagcgagggaactgtcgtttgtttagatgagcaaggaagaaatgcctttttgtaactcaggaagaagtcaaagcagttgtgtaacaaaccactttgccatgttgctgcacatttttggtcgccctgtttatgatgaaggtgagcaatacatgagaggaagaattcatcgcttttagttgattcaaatcacagttttataatggaatatgtttaggattaggaaagaaacaagtgtgtgagaatatgattattattccacggtattcacagtgctgaatcctagtactactacatctgtcctaaaatgttgctacacacatcctaggataacgaatctggatagacctcccatcctctgtccagattcgttgttttaagatgggtaggtagcaacattttgggacggaaggagtagctggtaggagcagtgatagtagtgatgagttggaaggtgcatggttgatgagagagagacgggtagagaggcaaaggacgaaagcagaagagtgaagtttggtagcgggtcttggaatcgcaccgactgggatctatgatgaggcggcacggcaggtcatccatccattcatccaggttagttgttgatgcctcgtccaaggcagctagcaggagtacgacattatcatgaatgaatacctaaaaatagcgtgaggctgtgtgttgcacagtgcatatgtgctggctggcttgtttttactgtgcttcatttttagcgaggggcggtgaatggaggcaaataataattaaggtggtggtggtcaaaaaaagtaaagggggaaacgctcgcgaggagggtcagggagggagactaggagtcagcctggcgttgctagtgttgaaggccagccagggaagaagaaaccattgataatttgacattcacaaagaagggaaggaaggaaggttccttcggcttggttgcctttgcctgacggtgaattgggttgggttgcgtcgcgttgcgcgcacggtcgtcggctcgcgctccgcctaattggttgacgttgctctcctcgctggtggtattgtatatagcgagccctacctactccacaaaaagagtcctctcctctcctctcctctcccttgccaccaccaaactgcaattaattgtttgtttcgcaaaacaagcatcctcgcctcggcgtcccagatctctgctgctgggctgggctgcctgcctgacaagagaggcagcagccatggcgttcgacgccttcaccgacaagaacgccgtcttccgccgcctcaaggccaagcccgagaacaaggtaacttcctcctctcagatcttcttcttcttcttcttcgcctcaagagtcagatctcatgtactagtattgtcgtgtgcttgttaatttcccagatgtgcttcgactgcagcgccaagaaccccacctgggcctccgtcacctacggcatcttcctctgcctcgactgctccgccgtccaccgcagcctcggcgtccacatcaccttcgtcaggtttctttctacccccccttcccatcccgatccacgccccctcccctcacaagatctgcaatccgcccacgccatcacatccgattcctttcctcatctttccatcaccaaccaactctaagcccatcacgactcctaggaactagcgcagaccagctcaacgatctcaataatacttccctttttcttctttaccccccaaaaaagggatatggtacagcgcataggtgcctgtggttgctgggtttggtggatctggccgagcctttcatcaaaaagaaaaaaaaaaggtcctatttttggtacagcccatctggtggggaatgcagccggagatctaggttcttgggccatcaacgtcaatacctgctttacaccttcatcccatcggcatttgcattcacaagttacacattttggtctaacagatccatatgcgcattcacagtaaatcacctactacttcgttatatttttctgcaatgaacatattgaacttcattgctggctgctatatctatgatcactactatggctatgctacattgctacccatctcatgatgctgcacgtttgtcttattgtgttgtttctaccacacaaaaaaaaaaatcataaaatgccttgctttgatactccgcaaaagtactagtattgtgcctgccaaatgtcaaaactgtacccattttattttcactttctcttatacaatccgtatgtattttctataggtcaacaaacctagattcatggactccagatcaactgaagatgatggcttttggaggcaacaatcgtgcccatgctttctttaaacagcacgggtggacagatggtggcaaggtcgacgcaaagtacacgtcaagggctgctgagctgtacaggcagatactgcaaaaggaagttgccaagagttctgctgataacgtcttgccatcgtcgccagttgcagcgtctcaaccacaaaatccatccgatgacttccctgagttcaagctaccagaggcaccagcagagaataccaatgggaagcaggaacctgatgtcaccaattcgcaaaaagcacctacgcagacaccaaaagcccctactcatcccacttttgccacttctgtaaagaagtccattggtgcgaagaagattggaggcaagactggagggcttggtgttaaaaagctcaccacaaaggtaacactgtggatcattagcgctatgtatgcatgtgtttggttccttcccacagttaatatttaatatacctcctctcttctatctatatgatgtgaacattaaggactgacctttgcctttatgttgcagccaagtgaaagcctgtatgatcagaaacctgaagagccaaaacctgctgccccagtaatgactacttccaccacaaaaagtggcccgtccttgcattcacgttttgaatatgtggagaatgagccagcagttgattcaagaaatggaggaactcaaatgactggccacgtagcaccaccaaaatcatcaaacttctttcaagagtacggaatggataatgggttccaaaagaaaacaagcacagctgccacaaagacccaggtaaatattgaaccaatgtttgtgctatgtcaataagtaaataataaatagattgacttttctgatcaatacataagtttgcaaagtttactttctatgataatgtaaacactgcactagattttgctgcatccactagcttgacttgttttgatttcatgatgtcatttccccttcctttatttgctgcatgcttgcattctgctgtttaatcatcagtgaacatctacaaatttcacagaataattaccttttgaactttggaaaagtcagttctctctatgcaagctgttgttattgctagcatgttcttattatatcaaatagttttccgcttgtagatttttgttatgttaataagtactgacactggacgtgaatacctttcagattcaggagactgacgaagcaaggaaaaaattctctaatgcaaaggcaatttcatcatctcagttttttggcaatcaaagcagagaagagaaagacgctcaaatgtcccttcaaaagtttgcggtgcgtattagtttagcatctctttgtccgaggaccattacattgcatctccttcgaacttgtcgaagcattcttaacttcattccagacttgaaatttcttgtctattgtttatgtttgtgctagtacttcatttgaatattctgtagaagtttgcatcttttttttcccttacggttctccttttttttccccctttaattcagggttcttcgtccatttcaagtgctgatctttttggccgccgcgacatggatgactcgaatctggatttaagtgctgcggatctcatcaacagaatatcattccaggtagttattctgtaaataattgccagccttttgtcacctcttgcatatttagtttttaagcaaccgagcatgcaaatcattactacactgagttactactgaattattcagtacaaagattgatccttgaaacgcacaaatatcttacctgctgggattgttgtgcaggcatctcaagatctgtcttccctcaagaatatggctggagaaactggaaagaagctgacatctatagcctccaattttatcagcgacctcgacagaatcctttgagtggttgatggggcgagatcattagcattttttgttttggcaaacctgcacagaataccgtattgagtttaaaatgtggtgcagctcagagaagcatttgttgcacagctatgtagatgaaagtagaggattggcaattatgcgtctgtattcttttttccttttttactattgttggaaccctgtccgcatgaagatatttttattcgtttcttgacaagattgaaacatacgatggtattcattccagttagtggtatagctgggaagaaaaggtatactttgatgtgcctgtgctaaatggaaccagtcatgttatttcttatttctcacagtgatctgtgccactgccagttagagttcatcttcctattataagcagataagctattgcaaactggctggttgttccttttactgacgtctctgtcgatagcttaaatgttacaggtttattataatgcaatcttgcagggtggaaaaaaactgttaatttgtgaaggcaagattcagctaaccgtgtatggaaactgaccaaatactggcagtcgagtatgatagattcagcttatcgtgggaaaaatggtactttgcgaacagccgtctgtcgacatcatattatatattgcaatggcttgttttgctgtgattttgagccaccaatgataaacacaatgcaagttgctgtcttgccgggtgtatcgttgtagcagagccgttcaaagtgacgtggactccaggcggtgccacgcaagactgttattttgtctcctctcttttctccactttttcgtcgtcaaaaatgctggaacgtcaaggcccgcccgttgtgcaaatggttgacagtgacactgacagtaacagattcttgatgtaatcgcattagaagaatcttgcacaaagcaaattctctttgttcttgtgttgtgtttgtggcttgttattctaagcgagtgacgggagcatctgtgctgcctttgccaatttgcaatccacgcaaggctcgtctttagattcattcgttcattttatttccgagtcaactaagatatcgtgtattgtctgaacgattcaaggcagctgtaattaattaagatgacagaaaattcagagcagagcaggttatcttgaacacatcaattattgtgaccagaaaattatggttttgaatttgcgtcccctacaaccaaattcaggatggttgtgttatctttgggttgaagaagagtttttgtcctcaacattttccagctaggagccggcataccacagtaaaagttgaagccttgatcgagataactgatgaacaggcggccggcaaatttcacagccaatgatcagtgagtctaatggaaaatcattctattttattacaggaagatggctgattttacccccacacaaacggatgtgatactacagatcacgcgatcagcgatagcctgatatggcgatctggtaggttaggtagcacgcgtgatcatccattcatcacaagagattgtcacatggcccatgcacgctatcgcacaaataggaggagtgattgcaaagagaagaaaaatagattaagaaaagaaaagagattaattgatgggttctacgatgactgcgatgagacgaacacccgaatctgctccaggaaggtgagctgctgcggccgatccttgcggcggatgtagccgtcggcgacggccggcgagtactccgggtaccccttcttgccgctgcgcgcccacaggtcgtcggcgtagccgcggtgcgcgtagtaggcgacggcgtcgacctgggcgccctcggcgaggaggacggagatggggaggcgctcgtagtgcgcgcgggagacgccctccagctcgtcgaggcggtcgagcccgcgcggcgtgacggcgtagagctcgccggagacgcggtgtccggcgccggggaggttgaggaggaaggggacgcggtagggcccgcagacgagcgggaggcgcggcgcggtggtggcggcgcccacgaaggaggcgtcgccgtcccgggccaggtcctggaggaggccgtggttggagaagcccctcttcagcgtgccgtacgtgaacaccagcgtccgtggagccgccgccctcttcgcctccggcgccgccggtggctgctccgccgcgtcgcccgccgccgtgcccatgcgcgattcaatcgcggcgagctcgagtcgagcttttctttctttggttggttggttggtgttttgaggcttgggtcggcttatttatcgagagaggtgggcccgcttcgtcgatgtcgcgtgggcccagcctctcacatttgtcgcattagccttccagcccattaacaatatgggctgcacggagctcgactcaccttgcggcccaacaaacagggccttgatgcatgggcctcgttctacttccattggagaaggcaagcctctcctccctctccgaaccagccgccgccgccgccgccgccgactgctcggcgatcatggtcggcgaccgaaagcgcccggctcccttcgccggattctccccgttcgctcgctccctcctcttctccgcctcctcctctaaaccactacctccccccgaggatccacccgccgccgccgccgacgaaatcccttcaggtacgcgtgcttacacttaattggcaacgccgtcgccggggcctcgctacctccttctcacgcctcgccgctctccaggaatcgccggctccagtcgcgatatgccgccgcccaagcgcgccaagcgggccgagccttccagcgacgaggagcgctacagcagtgacgacgagagctacagcagcgactccgacgacagcgacgacgcgtcggaggaggtgagtgcctacctctaccttggttctagcctctctggagttcctactcatcgattgatgcgagttgctcttcggattggtgctcctagctcgatacggtgcaagcggacttcgccttctacgaccccaagcccggcgacttccatggcgtcaagctgctgctcaagacctacctcgactccaagccgtgggatctcactggcttcgtcgacctcatccttgagcagaccacggtgggtacggttgtcaagattgctgacgatgaagaggatggtgaaggaaatggtgctgatggaagcagcactggtggcaatgacgatctgtttggtctcattagcgtgcttaatcttggaagatacagtgtatgttcaacctactcactgcttcatccacaagatacataggtcttgctgcactggtggcttctgattaatcaacttgctggtgttgtcttgtaggagcaccgctgtatgaaggatcttaaggattacctgcttgctgtttgtggtgacaaggataccaagaagaagctcaagcaaatgctgggggacaaagcacctgatgtgggtctgcttgtgtgccgccgttttgtgaatttcccatatgaacttgtgcccaagatgtatgaatcgttatttgacgaagtttcatgggccacagaagacgaggtttgtcaagcaccttcttttatgaacgtcgagctcagatagtgtgaaacacattcttttctctactttcttataacgtgttttcaactgtcctcgcatatctgaagccaacacaagaactccgggactccttccggttcaagcagtacctaatggttgtcagagtacttgaggtgagcaatgcaatttgtttccatgtttgttttgcccattgatattcaaagcgacttgttttgttgctcagtatttccgtgtaagatgttgtatagatcatttttcaagtgtaattgtgctctgtatatgaaagttcctgtcttgttgtaactgcttcagctgtatgaataacacgtctttgccatctggtgtagaggaaaactccagcaaagcaaaaggcaaagaacagtacagaagaggatgagcctattatctatcctaagttagaagacgaaatttttcgcgaggtatcaagcaggacatgctactgacaatctgagattaatttttctttgtgcagttctgtttgatgtggtaacaaaactttcttcctcagctttcttcatggtcgttcactttcccaatacgttctgaacaatcggctcagcaagaggttagttgtgtataagtacttcaggctttattatgctgttcttttattcatattttcatagttactttcagcatctggaactggttcacttgtggcactggcactacaaatttcctttggtacctggattgatattgttatcttttggacatctgtttgactattcgttttaataaatatgtaagtatcatttattttgttttataattaaaaatactttaagcacgagtttttacatatttgcataatttttttgataaaacaaatagtcaaacatatgtccaaaaaatcaacaaacgctgtatatttaggaacagaggtagtagtagccaaatgaccaaatcccaatcatgtgaagtaggaacattcgttcctttgtgttatgctttcgttatatctttcttcttctgatgatcattagctcaccatttcaagcagaatctgaacatgcatcattctaagtttgatgttgtgtacacctaaattgaatggactccctgtctaccctttcagatgaagaattacaaggagatgggcttagtgatggccgtcaaagctgaagcaattccgaagttccgaaagaagttggaggatctactatctgaatagttctctccacgcattgtaggtcgtgtggaattttgctgctgtccacatgatattggaacctccatatcttctcttgctattgcttgttagtgtccctagtaagcgcggacgctaagtttgtgagtgcaaagccctaattgaattgctagcattgccatagtagaagagaaattcatgtgtaagaggaaatcaattatgaacttcccttatactgatatcaagagattttgaaggacttttttggttgctcgaagacatggtctttctcagcccatacgcaccacattttagctgggagtttgtttgatcgatatacatcacactgtggtcaaagtcaactgtctatgattgtttttgccatgaggtagaaacgtgtgacgaaactgtgccctgtgcataacaaccgcatctcttctgaaggcataggcatctgcgtccttaaggtcagaggacattagtcatgccttgcaaagtctctgaaaacatggatagctgaacaaaaacaaccagcgaccaatcgctcggtgttccagatgaaatttgaacaatggttgcaaatatatcatatctctaagccaaaacaagagcatcacgtaattaaactgccaagcacacacgggcgtgtagcattgcaacatcataaacaacagaatgttgggaggtgtcctaagcaaaagtcaccgctacttattaagaacagtcagcacgccatctcagtgtcttaactaaaatcgtagtatgacaccagcatttactgatttccacatggatttaaaggaacgctaataacatagtatactacttcttctggaagtattagcagggaggtatcacaataaaaatgtaaactgccaacaaatgatcatgaacgcgagtgcagccatgaggtcattgggcaaccttcaatcacaagttcttgaatgcagactcattagggtgcttgggagtaagcctcgccaacaaagccttgttcgggaagtgctcggcatcaacaaaatagaagttcccttcagccctaaaagtgacaaaaggtctgttggtctctggaggcctgacatcagcaaacttgattgtccttgtgaggggtgtagccagccatgacataatctctgcttcaaagctatctgaacctggtcgccacctgagcttgtgaatgtacgggctcacaaaccagtgtaaggctgccgttgtggtagcactgaggaaaatgacagtggatgcaacagcgcccttgaggattacattcatatctggggatgtcatgaatgttatcacagggccaagcgacacagagagacagcaggtggacagagaaagaagcttcacttttcttatggtcgatgatataggtccctggtaaactagcctgtcatctttgtcatcttccttgatctgcttggattttggcccaatgcttatcttgctgccactattttcagtttctttaacagcagcagcttgagaagcccatcttgcctgactgtacaaacaagtgactgaaccaaggccatcaagttttggaagaggattaggcttgaatgttgagaaatgcttccatgcaatacatccaggagcctgaagatctgataatgtaaaggacagttagctgactttaatcggatttttgacacctataaaaaaaataagaatgcaaatctatatacttcggctatccaagataatggttcagaaaccattaagttagcaaaggagcatgttgctttcagaaaggaagatcattacgctattaagcattttgaggtaacatacagtggtaaattggacttcaaccatgcgccctgttgaattactataacacatcttcctaacaaatgcacctcaatacagtacaattagacacatgtaactggcaaaactaaatcatgtgaaaccgaaagaggtattgggggctcacgagagtaatatgtagagaatagcagataataaatcatgaaattcaaggtagaagcttgaatccacagattatgttggattgtgggtggagttagaaaaaatcatccctgaaatagatgtggaggactgtcatttaaactaccttttcattgacacatgcactctcaccgaagtctaaccaccaactacaatctaacttggaaattccgagattactcacaacatagaagaacatatagctagtcagtcagataacattagcactacatagagggcacagcacctccaggagcccaggacctaatcaaactagaaccgaacttgtgcaccatggaatcgtatgcccgttctcacaacaatttcgcagctcatagctgggcactaccacgcggatcagatttaactatggagagaaccacggggggagagattcgaagcatgaggcgaacctgagacgcgggagaaaacttgcggcggcgaggtggttcccacggagcagtggcggaggaggaccccgcggagggaggaggcggatcggagcctcgccgtcgccatggtctccttccgatcgaggcggggatttgctagggtttttccgaagggatggaggagaggccaagaggagacgaagcggagcgggcctaaacttacaccacatgggccgatatgggccaggccttagctgggaggcggtttcttattggatccggatccagaaacctcttcgccttcctcccatctttctctctctttgcacgcggatctccacactccgcaccgccggaaccctagccgccgcccgtcgccgccggtgagattcccttcttctcttacctgattattacctcactactcgaacccaaggttttttctaggcacaaaccctaatagagttccccaaactaggcagattttttttacccctggtcgccgctccgtcgtggcgagcgggcgggatgagcagccaccggaagaacttccgccgccgcacggacgacgccgaggacgcctacggggacgactcgagcaactccaagcccacagccaccaagacccaaacccctcccgttcccaagcccaggtcgccgagacgtcagggcgcgagccgcctcagcttcgtcgaggacgaggacgacgatgacgccgaggagggacctttgtcgcagcgccgccgcccggctgctacggtccggcaggcccgcacggcatcgccagctgcggcgactctccaccgcctcacgcccgccagggaccgcctcaagagctctacggccgtggcagcggcggttcccgcgccgaagccgtccaacttccagtcgcatgctggagagtacacgccggagcgcctccgtgagctccagaagaacgcccgcccactccctgggagcctcatgcgtgcaccgccgccccctccccctccaaccgctgaagccccacgacagcgtttgcctggagctgccgccagtcctgctcctgctacaaacaccactgctgctgctgtagagcccgtggtgattctcaaaggtctggtaaaacctatgtcacaagctagcattggaccaaggaatccatcgcagaacgaggacaaagacgaagatgagtcagaggaagaggaggaggaggaagaaggaccagtcatacctgaccgcgcaacaattgaagctatccgagcaaagcggcagcagcttcaacagccgaggcatgcagcaccggattacatctcccttgatggaggtggtgtgcttagcagtcgtgaagctgctggtggatccagcgacgaggatgatgatgagacacgcggccgtattgcaatgtacgctgagaagtcagatagccagaggagcacgaaaggtgtatttggcgtgatcaataatagaggtcctgctgccagtttgggggttatcaatgatggtttcagggaggttgaggatgaaaaggatgacgatgaggatgaggaagagaggaaatgggaggaggagcagttcaggaaggggcttggtaggagggtggatgatgcttctgctcagagagcagcgaatggtggaccagctcctgtgcaggtccagccgcaaccatccggatactcaatcgatccccgttaccagccttcctttagcggggttttgcctgggacttctatttttgcatctgggagtgcagagttcctgtcaatcgctcaacaagctgatgtagcaagcaaagccctgcaggagaacatcaggaagcttaaggagacccataagacaacagtggatgctttagtcaagactgacacacatcttactgaagctctttcagagatatctagccttgagagtggtttacaagatgcagaaaggaagtttgtgtacatgcaggagctccgaaattacatttctgtcatgtgtgatttcttgaatgataaggcattctatatagaggaattggaggagcacatgcagaagctgcatgagaatcgagtgactgctgtctcagagaggagggcagctgatctagctgatgaatcaagtgttatcgaagctgccgtcaatgcagcagtatctgtccttagcaaaggatcaagctcagcttatctatctgctgcatctaatgctgcacaagcggcggcagctgctgctagggaaagttcaaacctaccacctgagctggatgaattcggcagagatatcaatatgcagaagcgaatggatcttaagcgtagggaagaagacaggaggcgaagaaaaattcgatcagaatctaaaaggttgtcatctgaagggaggagtgcaaataatgaacatatcgaaggggaactaagcactgatgagagtgatagtgagagcagtgcctatctgtccagccgtgatgagttgctcaagactgctgatcttgtattcagtgatgctgccgaggaatactcaagccttagaattgttaaggacaagtttgaaggatggaaaactcagtatcctctggcttaccgagatgctcatgtagctctgagtgcgccatctgtgttcaccccttatgtcagactggagcttttgaagtgggatcctctccatgaaacaactgatttctttggcatggagtggcacaagattctttttgattatggtgagcaaaacagtgaaagtggcactgaccctaacaatgtggacaaggacctcattccagtattagtagagaaggtggctcttcctattttgcaccaccgtattatgcactgttgggatattttaagcacccaaagaaccaaaaacgctgtggatgcaattaatatggtcattagctatttaccaacctcaagcaaggcattgcatcaactattggccgctgtcaatagtcgtctgactgaggccattgctgacatttcagtgccagcttggggatcaatggtgacaaggactgttccaggtgcttcgcagtatgctgctcatagatttggagttgcgatacgtcttcttaaaaatgtgtgtttgtggaaggatatttttgcaaaacctgttttagagaagcttgctctggaagaattgttgaaggggaaaattcttcctcatatgaagagtatcattttggatgcccatgatgcaattgctagggctgagcggatatctgcattacttaaaggagtgtggtcttcaccaagccaaaagttgcagcctttcatagatctcgtggtagaactaggaaacaagttggagaggcgacacatgtcaggcataagtgaggaagagacacgtgggctggctcgtcgtttgaaagacatattggtagaactgaatgaatatgataaagctagagctattttgaagacttttcagatcagagaagccctttagctcttattcggcataccacaagaattccagttttgactgtgatacaggttcttaatccttctgctttaggaaatgttgtaacttcatcaggttttctgtacattaaatgatcatgagttcctcgttcaatcctgcatgatgttatccatacaaattttatgggggcttctcaattcagaaattatggtcatttttaattaccatttaccaatgctaattaactgtctgcaaatatatatctttctagcacttttctgtgttatagacatattgtatgacagtttgagcgtgtctgtatggttaattttactatattttgaggccttgagcagaatgtctttgctgtttgcatcagcaaaccattttttacatttagctaactgacaatgtattttttgaaagatgcaaggtgtctaaatattgcatgaacgcttctatttaagattatgtttgatatctataacttacactaccagttaagcttctcagctttgtttgtattcgtgtctactctgttttcttcatgtgcgctttccctattcttccttccattattcttcacgaagggtgacaacataattgaataactgggattattgtatttttttaagtgataccagtacatccaggtctatggaattatacaaaatataatattgtctttctgtcattctgtcctggatttatgtccaatggaaattgtaaacatcttaggcctttcttacgtatgtcttgtggaccattcttccaatgcaaaatgtttctgtttgaccgacctgaaacttttcatgccagtttccatcaatcaatcccataatccagcacttttttgctagttgtttctattattcatgatgttaggcttttatagctgatgcacacattgactgtcctagcgtactgtatattacctggagcagggaagaaagtgaatagcttagttctaaatagtgatgaaaaagtaaattaccaagaaaacaatgcaaatctgcagcctctgtgtataaaaagaaaaactctgaatctgagcatctgttctgtgttgcaccaagattctacagctacattatgtcctcttctctgtttagattagtgttcattgttaattatcttttttgttcctaagaaacactttgtcacaaacagtattgataggaagcaagtttttttttgtcaaccattaatatgctaaacgaatgcccttagaatatacatattgtctcagagattatctgtcgcctgctgaggatttcgaaacatgttgaatatcaatacataatgtttcagttttagccgagagtttgtgctccaaatatatgactgccaatattttgtgccccataagcgaactccaaaaccattgagattcctgaaggcaatgaataaggatatgtgttttgtggtttggaaggtactgttggcatttcaaataaatagggagtttttttttttagtacaacctgcaagcatgtctgatgtttgttttgcacggatgactgccttacctcaactattatactgtaaataatgtttgcagttggatcaggtaacatgtagttggagccagtcacatttggtgcagattccattctgtgtattcagatgctgctgtttatatcacataatatatgacttgccacaaccctacgctgggaattatgtagaatccttgttggtgttggttcagtctcagattcaccaagcactgatgcagaaacatgattcctgcaaacccttgctgcgtatgaagtccaggtgctcttgaattgtgtgattctgagaggaacttccagtaatgtgggttcttgttttttctttctgaaggcttcaacattattccactagatcttcatgttggttcccgatctgtatctgcaaaatacttacctactactagttggcttggatggtgctcatgtagtgataaatgaggtactgtgatcttgctacattgaacatggcactgtaggtgataaatgacccttgctgacttcactgacatatgagaccagcaggatcttccaatcaaaggtacaatgcctcgtgcatgaatgatagcaactatgaaaacttgtgaatgcaaagtgattttgatacagctgccattgtgcatgttattagcatatgtctggattttctgcatcttataatgttgaatagggtcattcatgtccctgatcaattcagattttgcacattatagctcttccttttcgtttgtgcatcatgtaaggctggtgtgtgtgtgctagctgtgggctggtcatggtggcgatgcaggggggccagccgcagccagtggagggtacagactacagactacagagcgggcaggcagcgtaatatgcaaaggacaaagcgtcatcaagagccgttggctgtgtttgtctatctgtagtagcacaggcagcaacagtaatttggtttcagcttagcacgactgcacgagtctactcatctgctctttctttgtttggtgatctgatctgttgtttagcttaaggggtgtttagacgggactaaaaactttttagcccatgtcaca

SEQ ID NO: 7208 - DNA, 38150 bp, Oryza sativa
cctgcagcccagttcgtatcttcgatctccactctgcactctttcttgataacagcaattagtgcatgtgcggcactttcttccgcatcacatggccttatagctgggatgccatgtgcacgaacaagaaatggctcttcacctcctcttacaccataaacagatgcctcagcagagccaacatacccatcagtgacagcatgacaattataacgtgcctcattagcgcctatgcttctaaggatctcagacaacaacattttcgacctgatgtgcacaaggtggcgttgttctgttataccataacaaaaacagagtcaataagaatagcagcatcataggtccatcccctttcctttccccttattcctaaaatttccctacacaggtacatataaatataaccatctctttttaccagatcaccaaatgaaataacaggcattcaaatccctaccacatcaatcatctgtatttttttaaaagagacatgacctattctagagagctcaaatagattgaggtcatcgttcaattaacagcctacacagccaccttgcaaactgtaaaatactattggccattctataggcttccaagccaagacagattaacttaaaaataatcgtgccactaaaaaaacacccatccccatttccattatatcgagcagattaaagaccgagccaaactatcaccacaaattagtaaagagcacacctcaatccacagggttaatcgctgtatatgcatacataccttgcacaggttcgtccatgctagctaaatgtcctttggctaaaccgctaagatcagcagcgccgccgccgcatcgattcagcgttaaaaaaacagccagcactcctacatatataccagccccaacaaaacatatgcaatgacagcacaacacgttgccctaggacatccatccttagctaaaaaaggccttgcatcctgaagcccaccagcagcccactatttatactcttgcacacctttaagagcccaacgtcaaacataagcacaaaagcctatagctccttgatatgttagcccgatcagcccacgataacaacagagagatccaatgcttactgctgcacgacctaaatagccaactaaatacgacctaaacagccaacttaaaaagccgttttccatcaattgttacatcggtactgatcaaataacacgaatcggttataaaccgcgcggcgcagcgcgcgaacccgctctagtatatatagcaatgcaacatataatagcactgacatcgagttggagatgaagatgaacatttttataaaaaaaactcaacacatgacgattgatttagctagttagcactctaattttaatgcctctgcattgcaagttttgttggaaccatttcttttcatgtgtaaacagtgtactatcaagaagggatgaattggcgtggtgaaaaataaagaaattaacttcaatccggctcgttatttactgatgagagttttgcggacaaatatgcgcgctcttctcttaagtctgaacgtttctgtttaaaaggagaggcgaaaattacaaacaaacgaatggattattaacactttatagggtccctttgaaatgaaggattgccatagaaattttggaggattcagttttctatgaaatttttaagtatggaatcatttaattcataggaaatggtaagaaatgtttcggaggatggtgtgtgtgtgtatcttaattaatttcatatatataaataagaagacgtcatatctgttggaaacttttctcttcttccttttgttttctgtgatgctatcggaaggctccccttctctctcttatctttttcgtttatgtaggattaggataagagaaacatgccgttccaattaatttctatgtttttttttatttttgtgttttcatatacaacatttcaaagagcgttaagtttatcaaaacatgcttcggtagagatcgaatgctacataattcacataagtagtcatctagtctgattcatcactatactagcttagatagctgttgaaaattaaagagcatatatagaagagaatggcgctattcctagtaggtaggtagctgtgctgtctagtgatatagagtacttcatccgttccataaaaaatcaacctagtattagatgtaacatattatagttagtattagatgtaacatattatagtactacgaatctgaatataactttgtccagaataatgtatcatatctaattctatatttgtttttttatgaaaggagtatgtatttgcttcatttcttgatttgtatttttttcgttccaaaatagtttaatctaggattgttatccatgcacaatgaagttggataaattttcatatagattcgttatattaaaataggtcatatcatattctacattgagttatacaggaacggaaaaagtactgtcatatggtagccgctaacgaagatatattttcgttggtatctgacttaagccggctgtcatagtgactggacccagcgaaaacatattttggcccaaaaaaacccatttccgttccttgttgtgtgcccggccagcctctcgatgcgatgcatacatagttttattttcttctctttgtttattaaccgagcgtacccctcacattattggatctccaacaataattggtactactgacattcatatatatgctaatatataaagctatttgcatttaatttaattatatgactagctagtgctacgacattctgattcatgaatacataactgcaattagcgcagacaaatttaggtaattaatatatcctaattggatatatctaagctataaaaacagccggccatcccgtccatgcaacactgactactgactagctatagcagcagcactactgttcttcataattccaaggtaattaagctagcaagcaagcaacagagatcgatcgatcgatcgatcaatggcggcgtcgtggagcgagagtgaaaacgcgaggttcgagcaggcgctggcgacgtacgacagcgacaatcccaaccggtgggagctcatcgccacggcggtcggcggcggcaagacggccgacgacgtcaggcgccactacgaccacctccaacacgacgtcaccaccatcgacgacgaccactcccacgccgccggcgaagccctccccaacggcaacaacaacaataatactaacaagtaccgatacatacctcacttccttccttccttccttcttaattctatttattcattcaaatatatatactcctgtatagagtaatttcctagctaattattattaacatatatgcatatacgtagattgatttattaattatcgatggattatatatgtttgcagaggaaaccgaaaccaggcatgatcgatcgatcgacgacggccggtgatggtgcacgcaattgcttaagctttcatggttaaatattttttttcacataaaagtaaaaaaaaaaacatgatcgatcgatgcggaccttatattgatccatgcatattggcctaaatatatatgtatgagccaatgttgcatctggccacgtacctgcgccaatattggagtatttggtatttatacggtacgtatgacaactttgtgcttgcatctccatcaatatattattactagtggagaataaatttatgtgtattcagagggtgtgtttggataataggaaatagggggtgggattgagattgggaaatgaatgaagcattaggattaaataaaagagtgagaatgaatggttaggattgaaagatgccttttggtgggttggaaatcatttccatttcctattagccaaacattgctagagtgtgatgcatgctttaccacctaaacattatatgcagctaacgggcgattgatcgctgccagcgatcgtttttttttccttttcctcttttagtaagtttatacacctaaagtttgtagatcgaatgtttataagtcaaatgtttatatacccgattcaaattcaaattcaaattcaaatattttatatttttatcttttagtaaatttatacacctaaagtttacacatctaaagtttatccacctaaagtttgtagagcgaatatttataaatcaaaagtttatatacccgattcaaattcaaattcggattcaaatattttatatataaaatatttctatacacaaagtttatgcgtgcaaagtttacggtataaagtttatgcatatgaataagagtattagatttttttcgaattttcttttactatttttttaaaaaaaatataatgtaatataaaagtaaaaaagagatatgaaagaagagtattaggggcaaaggacgggtgatcgctaggaggagagggaagcgatcacccgcccactagcaataccctcatctttattctcacttcccctcgaccaatatatctccatgcaaatgagtagatctaatgggcgagtgttcacatagcttgggtgcgccaaacatgttcggtctagcccacatgggtccaacccatcacgagacattatcccaaaagtttatgcatagaaattttattcatttcagaactttgtttgaattcaccggattcactatgattggcctataaatgcagccatagaagcaagttgtcgataagctcattattattaatagaaatctgtaagatttcatccccaagtttcattcgaatgccatataacaatcccgttattattagtagaaattttaggccataaaacatgttatgttactctcaggctcccactaagtcaaccagaaataaacttatcgactaataaaaataacatagacgaggtgaaggactggaagtggcccccacaagcacgtctagtagaagctaatgtggatggtgaaaacagagcaaagagcaaattgtttatggaccgatccgctccgagtttgactaaagtaaagatatggtaagcgttagcatccgaccacagatctaggatttaccaagggctgtgagtgtaaacggggtgtgtccgggtgtgcagtgtgctcgggagcgaaaaggaacatgatcgtgtatacaggtttgagcctttcgaaggataatacttactcatgttcttggtcggtatcaaagaagtttgtataaattaccaggtgccctcaggctagtctaggaagccggatgtttttgccaatgacatatggcatattaccaaaatcccacggtcgaatatccgatttcttatgtgggtcattcaagaaagggctatttggaagaaaagatgtaccatcacccgatacatgtatcatcatgttccattcaaatggcttatctattatttttaacttgaagactctatcgtgagtttgggagcctatctgtcggcttctttttgttctatattgtttatgtgagcaattcaactgtgtaaatttttaatacctcatggtaccttctcaagaaacataaaattgctctgtttatgtatgtatgttttatacgataattttgatccattcttaagccgtatctgttttgactctgtatcatttccgtcatccgcattgataccaaaattgaacccgctaaaagattgttgtgtaggatatcatatgagctctttatgtccgaatccactttatttgcataattgcatcgcgtcactggatctaggagcttcggcaagaagatgtcatgattatacggaaaacggctcaaaaaatacatccgtcctaaaaaaaattaatttttcatcaatgccaaaaaaaccaatataaaacaaaaagattaaaacaccctcactttatgaaatcctaatactattatcagatttgctagacaactgcatttatccactacttttaccaacttcaatcatttgcaacttgttttgagagacaaacaggagagacaaaaatgatcttattcattcagagaccataaagcagtaagagatgatttataagataaggattaagagaagttagggagtgcatttttaagacggattcgtccgacgtttatgtgagggtgaccagctagctgatagctgagtcaatttgtgtgacttaatttgcgaccacgtagcagtatatgtatagtattagtatagccccgaagttagttgaagacctcttggagtagagatcgaggaagaagaaataatcaatggagtgttgggagaagaagccaaggaatctgggtggctcgctgccggtgcccaacgtgcaagacctcgccgcccgcccggaccacctcacgcccaccctcctccgccgctatcttcgcccgcaccacctgtccctgcccgccgacgaccaccatgccatggctatgatacctgtcgttgactttgccaggctcatcgatcaccatgaggaggccgccaagctgaggcacgcctgcgaggagtggggtttcttccaggtgatcaaccacggaatcgccgacgagacggtggaggagatgaagcgcgacgtcatggccttcttcaacctcccgctggccgacaaggcggcgttcgcgcagcagccggaatggatcgagggctacggccaggcgttcgtcacgtcggaggaccagacgctggactggtccgacctctacttcctcaccacgcagccgcccagctaccgcgatctccgcttctggccaccggagacatcctccaccttccgccgctccatggaccgctactccctcgagacgcagcgggtggccaccgagctcctccgagccatggcgcgcaacctgggcctgcgcgacgccgacaagatgacaaggctcgccgcggcgcagtccatgcggatgaactactacccgccatgcccggccaaggagagggacagggtcctgggcgtgtcgccgcactcggacgccgtggggctgacgctgctgctgcaggtgagcccggtgaaggggctgcagatcaggaggggcgacgactggatccccgtcgaccccatccccggcgcactggtggcgaacgtcggcgacgtggtcgagatggtgacgaacggcaggtacaagagcatcgagcaccgggtggtggtggacgcggcgcaggagcgggtgtccgtggcggcgttccacaacgccacgttcgggtcgacgtacggaccactggaggagatggtgggaggcggcgaggcgcgctaccggagcatcagcgtggaggactacgtcaggctcgtcgtctccagcaagctccagggcaagaacatcttggacgctgtcaagattattactacgacttaatttctcatcttatcatgcctgctgattaatcaatcaatcaatctccctggttggttggttgctgccgagtaaactattcatgccacttcaattattagtaggtaaaaaggatctatcatgcatactactttccgtttttattggagtaaggtttatataggagtacctttgaataaacaaacaaatctcgtctactttgatgtaaaggtttgttgtatatgaggtttgcttcattgtacgctacagttgcctgagtatacggctaatgtacatgtgtcttgctacataaacaattagtaattacaaggtacacaagctttagcaaagatgtgtgtaaatcatatcatgcgtgctcatccatcgatcaaacaatccctccatatatcactggccgggtgccgggtaaattttccatgccacttcaattaggtagaaaggatctatcatactttctgtttgtactgaactgggtccctactttgaataaacaaaaaacctcgatcgtgtactttgatgtaataaagatattgatgggccgggttgctatgggagtatctatatatctttcaaaagatttttatgatcgtatcatacagatttttaatctttagagtaaaagacaaaaagtaactaaaaaacatcataatggacattaatattaccatatctttaaagaaaaagaccaaatccattataaatttcaaaacttacatgtaaagattcaaaaattacactgtaacatacaaaagttacaatataagttttataaattacactgtaacttacaagaaaatacactgtaaatttaagtgagaaaatcgagtgagagataagaaagaaatctttcgagtgatatatagcaaaatcacgctacagttcattttttcttttacaccagattacgctacagtttgccaaacgtttagggagaatagccaatatgttccctaaagttttgctcttggatcattttagttcttaatattttatagtgttcaaacaagtcatatcacgtggtttaacatagcacttggtgccaccaaaatcaccacatagacatgccatatcaccctcaatttacctatataatagaaacataaacataaggaaatgaaaacattgagttggactacaggaagcaaatctctactattataaaaattgaagatgtttttgccggtattttggtatgtcattcgtgtatgagtcggttttaagtttgtttgcttttggaaatatatatccgtatttgagtcggtttttaagattgttcacttttggtaatacagaaggaatcatataagaattctatttaaaaaactcaaatgctaagctgagatgatcggactcctaactgcaactcatgattttctaaaaaaaatatatatccaagggaactccaatagtgaatttcatcttaactaaaccatataataataataagattaaaataaacttcacccgttgtaacgcacgggcattttttcttatatgattaaaaaattaaaaattatataactctaaatttgccattactttatatagcaatacgtcatattctatcttcatggtattctcagactagaaactttcggcccgtcattctcatattttcgaagaatttctcttttcaattgaatcgaaaatgttctctagcaaattatcaaattttaaaagtgtttttcagccgtgatatgtttttgtgatgtttatcattttagcaaaattttccttgtttttaggttgaccatctgttttatgataagaattaccaaattttggtacatgaatatgtttagtttgtaaccaatgtttagcaacatcaaaatttaataggattggcgaagtgggcatagctcaacccattaagttactaatggtggaacaaacccatccaagttcgaattctatacggacatgggtactcgtatttacgattatttatttatcacatatatagtagacgacgtacccgtcgacaacgatacgctcatggtagcttcatcaatcttaagaaataccgagacgttcgtggtggcttagccaatcttaagatatgtcattacagtttcttggaggtgatcatagaggtaggatgtgtgtttgtgcgttcttagatatgagtgtgcgcgtgttatgagcatatatgtttgtaacgtgttttaaaaacttttaataggattaaaagtggtaataaagcaaactgaacatactcgtatatcgaactgtcataacttctaaaattagcttgtacctcgtaattgtcgttgtttacaccataaaattcccaagagaaaagtgaatctacacaatatgtttacaccataagtttggaaaaaaaatcaacgcaagtcattttttcatcttcagtccgaaagtataagcggatatttttgcagatattttgttagacagacagacgaagaagggaaaagagacaaagcgcgcgtgaaaaaaagaaaagaaaaggagagaaaatgttttaagctgagaaaacaaacccaatccaaagcgataggcaaatcacatccatccatccattgccattgccacccatggcgccactccccgccgccgccgccgcgccggccttcctcttcctctcccctcccggcaaactgcccggcggcaaacccaggctgaaaccctcctgtgccgcctccacctcgtcttcgtcgtcgtcgtcaccctcgctcgccgagcagctggagcccctgtcccgcaggctcctccacgggaagcccacgcccacccagcacgcgccggagccaacctgggtgaacccctccaagcccaagcccaccgtcctctccctccgccgccaccgccgccgctccccttcctcccacccctcctccgcccctctccagccgctcctccgcgccatccgcgccctccccgacgctgccgacctcgcccccaccctccacgacttcttccccccggcctcgccgccctccacctccgacgcgctcctcctcctcaactacctccacccctcctggcgcaagtccctctccctcctctgctggctccgcgccctccccgatggcgccttcccacttgacaccatcgtcttcaatgtcgccctcaagtccctccgcgccgcccgccagtggccccaggccgagcgcctcgccctcgacatgctcgcctccggtgtccccctcgacaacatcacctactccaccctcatcaccgccgcccgccgctgccgccagttcgacaaggccgtcgagtggttcgagcgcatgtacgcctccgacggcgtcctccccgacgaggtcacctactccgccatcctcgacgtctacgcgcagctcggcatgaaggaggaggtcctcgcgctcttcgaccgcgcgcgcggcagcggctggaagcccgaccatgtcgctttcgccgtcctcgccaagatgttcggcgaggccggcgactacgacggcatccagttcgtcttcaaggagatgcgcgaggtaggcatcaagcccaacatcttcgtctacaacgcgctgctggaggcgctgggcaagaccggcaagccaggcctggcacgcaacctgttcgaggaaatgacggccgagggcgtcgagcccaacgcgcgcacgctcacggcgctcgcaaagatctacgggagggcgcgctgggggcgcgacgcgctgcagctctgggagcagatgcgggagaagaagctgcccgccgacaacatcctctgcaacacgcttctgagcatgtgtgccgacgtggggctggtgggcgaggccgagcagctcttcagcgagatgaaggacccggacctgggcgacgtgccgaagccagacaagtggagctacacggccatgatcaacatctatgggagcagcggggatgcggaccgcgcactccagctgtttgcggaaatggtggagagcggaatcgagcccaacatcatgagctataccattgtgatccagtgcctgggaaaggcagggaggatacaggaggcggtggacgtgctagaggctgggatggccaagggcctcaagcccgatgaccgactctgcgggtgcctgctctccgtggtcgcgctgagcagcggggacgagacggaggtgattctggcttgcctggagaaggtgaggagtaatctggtgaagctgatcaggatgctcggggatgcccgggtgggagtggaggacctgagggtggagctgaagggcatactgaacagcgcggcccctgaggtgcggcggccctactgcaactgcctgatcgacatatgccgcaaccatgggtaccctagtgagagggcagtggagctgttccgcctcgcccggcactatggcctgtactcgaagatccatacgaggaaggaggaggagtggtcgctggacctgcggtcgctgtcggtaggcgcggccaagacggcgttcgacgactggatgaagaccatccgggaacacgaggaggaggaggctctgccacagacgtttagcgtgtacaccggctccagcacccacaaattcgcgcaggggctggcgaccgcggtggcctctcatcttgagcaggtgggggcgccgttccgtgccagcgactcccagcttgggagcttcatcagcagcagggatgatctgctctcctggttgcacaccaccatgtcatcgccggatgttgccgtatgatcgccggttggttgcatcatgcagtcttgcagacaggacaggagggacgacggccgtgccgtcacattaaaatgctcgtcattgtttggttttggttggctgcaaattaaaatgctcccaaagaataggattgcgaggaggatggatggatggtgctgtacatgcgcaaacactccggataattgtcatttctctgccttttttatactagtccagtttgtaggaagctggacaagtgataagcagataagctagtactagtgtggttttctcacctcttttatttatactcctactagattactcacagttgttagggatgaggtgagggcactctgaagatgagagagagctcacagtttatggtttttgtacgacgaaattattattacatatctgggtctgggtgccagccgcccgcttctcaaattgtacttggttgattttcatgtgtggatccatggggatggtcatagatagggcgccataggaaggagttttgcaagaaaagaaaaaacaaaaacaccttgaatttatgggctgtcgaaatgtaaaaaggccgagtccacatgcagcccatcagagacggcccatcaagaatcttttcttacagatgcatgatgtcccatgcagccccaaccactcctcctcctcatcggaggggttcttcttccgaaatccgaatcgatcaatcgagcaagggacgggacagggacgaatcgtcgccggagaagaggagagggagagagagagagaacagaggggcagaaggcgagacaagatgatactagcggtgctcttctccaactccgacggcaacatcctcatcgagcggtacttacctcccccatcttcttcttctcccctccaagaaagccctttttctcgggggatctcgcctcctgaggcagatctgcccatctcttccacgctcccccgctacctatggccaacaaattccacctcaaccatttccctccaaaactaatccatctctactccccgtacttaccgctgatagaaactgatttatcacttgcgggttggtaaacgtttgcagcttccatggtgttcccgcggaggaaaggctgcactggcgttctttcctcgtcaagcttggcgccgacaacctcaagggggccaagaacgaggagctcctcgttgcctctcacaagtatctacttttcccctttagctcactgattgattgattgattattctactctagcttaagttctccagtaagttggtaccaccaaatggatcttcaagatttaccaattgttcaggcccttttttttattcgatccctggttaacatcaatattacctggttcatgtcttttggccataactgcccagtagcaatattgtgttaagatcgctccctgatgtgccaatgttaatcttattcctatcccgtacaaatctattttcggaaaattcattcattcattcatctcctaaattcgctctccagtttgccaccattctgagcatcaacttgatgctcctctgtttttttttaaaaaaaaaaatcttctgaatgaaacagcaggactgctatttggttacattggtgaggaaataaacgttccaaaattacaacaaaaatgcccaggggccaaaagaaaaggagagacaacttaccagttatagtagataatgaacctggaactgcaggtcgtgatgctgaatgtgtagaattaacctccttcagtcatccttaagcttgaccatgtgttatacagtaagtgtagtagagcatatccactgatcattaatcagatcccatggttgccttgagttttgtttttactgtatgctgtccttctgaatcatgcttgtcatctcctacaaatcctttgctcatctgaaatagaacatttccctctatcgctgctatttactattgggttttttttcaggtccgtctctattgtttatacaatgattggggatgtctgcctgtacattgttggcaaggatgaatatgatgagcttgctcgtgagtgtcgtcaagcttatgaattatgatattcctttccttatgtaaaagttactaatctagtttgaacgccttctacttccacatcaattgtactcatggttggtgattattgtctgtagtggccgaggtgatatttgcaatcacatcggcagtgaaggatgtatgtgggaaaccgcctacggagaggctcttccttgacaaatacgggaggatctgcttgtgccttgatgagattgtttggaaggtacagcttggggttgatcttctagtgtgtgaagttgtttcccccattttctgtgatctactctagtacctgagagcttgatgatatatatattgcacgttgttgatgcagggtctgctggagaacacggagaaggacagagtccggaggttgatcaggctaaagccgcccgttgagccatgattttttgatcactttggaatatgtgtgtatccttctcgtcgtgtaatcatatctctcgcagtttatttgctggcagttgtttttttattccctttgggatggatgattctgtatgtgtacaatcctaatacattttgccactgatgatttgtactgttacactactctccgtgtccatggatggaaggattgcagtttggcaatatgctgcattgctgctgcgcttttggtttcggtcattgctacggtatgctctgctttaagtgaatttgaatatttgatgaagcaaaaaatgagtaatcaccatgattattacatacatcgttgaatttgatgaaatggcaaggcaacctgtgcctttgagggaaaaaaagcaatggcgaccacgtcgcctgagctccttccaaagcaagcaccacatctataataagacattaattatattatattatgaaaatataaaacttggagatgttttcattaaattttttttacgttatccgtgtttaagttgattgtacgtccccaacccctccttctcctaacccaatctaaccagcctacaccatcacgccctcctctccaatcacctctatttcatcacaattggtaaagtttttatgaatcacaaaaattgtcttcacctcatgtaacccaaaggcatttttgctagttaataagaaaaaaaagaagaaagggtcaaaagcaagcgtgaggggggtgaatctcactataaaaagaaatttccattcgtagcacaaaacttaaccaaatttaaaaacagggcaataaataaaatttcagggcgcgaagaaaataccatatatatgtatctaaaccttccatctcaaaattatttatattctttaaaatcaaaatagatactattaggtggtgtttggatgcagggacttaactttagtccctatatttagatactaatttagagtattaaatatagactacttacaaaactaattacataaaagaaagctaattcacgagataaattttttaagtctaattaatccataattagagaatgtttactgtagcatcacataggttaatcatggattaattaggctcaatagattcgtctcgcgaatcagtggatgtgttttattaatagtctacgtttaatatttataattagtgtccaaacatctgatgtgatatggacttaaaagttttagtcacatctaaacagggtcttagtaaagagaaattcctcttgtgtggtgtgtagtaaatccctccctttgtttttttgggttaattagatccatgccattaaaaatatactagttttgaaatataccactagtattcaagtatttggtaccatgccattataattttacacatatttgagacatgtcactatttaccccttagatatattttaagaaaagattggacaaaattgcccttcttcttctttcctcctcttcttctcccttctcttcctgttcgatgcagcggggagcggtggagcggcggcggcggagtgagcggcgagaggcggcagcagctgctactgcgcggcggcgcggcagtagcagcagcggcgcgcaagtgtggcggcgcggcggcggagcaagattcttgtggccgctgctgaagataggagagagaggtatggcctgttcactttgatgccaaaaaaaaccttaccaaattttggcattaccaaaatttttgccaaaattttggcaggatttcttatatagttaccaaaatttggcagcaaactaaatatagtcactttttggtaactttatcaaaatttggtaatgttaaaaataacatcaaagtgaacaggcccgtaaaagatagatgagagatagagagaggtagaagatgagggtatttttatccaatacatataaaatacgcatcttagtggcatctttaagattgtaaacaaatagtatagtagtggcatcgttacaaatacacaaatagtaatggtatatttcaaagcatatacctaattaacccttttttttagaaaattggaaccatgccattataattttgcaaaatttgagatatgccatcctgacccacatgtcatttactcatgtgggtcctacatgtcattgagatactgatggcatatgtcaaactttgcaaaattataatggcatggttccaatttaccttcttctttttttttagaagttccagtgttgcagccaagtcggaagtcgccattcgtcttctctctctctctctccgcgccggcaaagcggccggtggcggcgccgacgagtcagcaagcggcagcgcggaagtcgacggccgcgagagtgggaggcggccggtcggtgatcgagtgcggaagtcttggtgaaggcccaccgcgtcgcgtccgtgtcctcctcgagccgcgtcgtcgtcgacctccttcaattccctcatggctcgcaacaaggtaacctcgctcgctcgttcgcacctcctcgtcctccatgatttgcactccaactccaacgccacccttcctaaaccctatctataccctcctcctccgtccccttcaaataaaataaaggttttatccccccattcctagggtttttgggacagtaataatttacttcgcattcgattgttgtgatttagtatctatttacatccatcttcacattaacctatctgcattcctctccttccgctgcaccatgcacttgttgttaggaagtatcctgattttacattttcgacttgcacaccgtgataccaaaatctaatgaaaaaaaaaataaaaaccagaaatcaaacccatgatactgatcccccccccccgtccctgtgattctgcgtgtttgacaaaaataaaaagagaagaaaaaaccaatatgcaagaccatttctggtagcactttttattgccaatcaattatattttttttaatgtaggaagcattggttttgctattggatgttggcccatccatgcatggcgttctgcaagaagttgagaatatctgctccacccttgtgcataagaaggcaagcacacactatttccattttaacttcccagatgcaaatgctactacctggccacctgcaattcatcataacttgtaaccaatcagcctcaagctaacccccctgccttttcccccctctctgcagctagtttataataggagtgatgagatcggtgttgtcctttttggaactaaaggtattgttgcaagcaaatgtttaactaaaattttgtttgcacttcaaatgttctgtgttgttttttattagcttcattgaacaagcatatatgattcacaatggaaaaggataaagacatagttatattaaacaagtatgtgattaacaacagtgaaggatcagacaagttaatgtttcttctctcacacatctagtctagttaaacacttcttctcaagttgctatgaacgatagatctacttagacaccaacgtttgcattgttttgctgcaaatttgagaaccatgcatgaacattgtttgggtcacatatttcttgcttcaaaagttccttgggctgcttgatttatgtttatatgtgcagaaacaagcaacgaactcgccaaggagcttgggggctataagcatgtggtggttgctcgtgatattaaagttgttgatgaagaaacaacaaatgctctgcaaaaccttccaaggggaacttcccctggtgactgtatccacaagtagcactgtatgctgatgtttggtttatagttattgttaactagacatccgttactagatttgccataactactactatcagcacacgacacctatttgatctttcattttatgaggcattttttttgtcttgccctgctgcctgcatttgcatgttgctagatcatatctatggtgtaggagctcaaattagtatttctcagtccattatccttaagtgtttgcattttgggggacttctttgttgtgatactgccatccatattcagcatccggctcttcatatagtagctcctgcttatggatttgtgcttgtttcatcttcttttttttccctgtctttaagtcatatagtttctttgttttacatcataatagcgttgtttgaacttgctctgtactcttctcgagtttgatcggaatcagatactggaattccttgactaaggcaagttttggatgctattgttgttggtttggatatgctgataagaaaatttggaaatatcaaaggaaaacagcgtatgtgtctagtcactgatgcacaacatccattaagagatccaccccaagggacaaaaaaggatcaggtggacactattgcagaccagatgaaaagacacgaaatcaagatggactgcattattttcagagaatctggagttcgtcacaatgctgtaatggatgaaaacgaccaattattataccacttcagagagaggtcagtaacaaaggtagttcatgttgacagcccaacgtcactcttaggtgctctcaggactagaaatgtacttccagttactgtcttcaggggagacttggaagtgagctctagctttaaaataaaggtggggtgttgttttcttaaattcatgtaatgttttttttttcagttagagaaatttatattaattctggttcagtttgcaatttggtctgacgtctttgtgaacaggtgtgggtctataagaaaacatctgaggagaaattccccactttgaagaagtattctgataaggctcctgcaagtgataaatttgcatctcatgaagtcaaagtggattatgagtacaaaagtgttctagaaccagacacagtcgttccaccagatcaaagaattaaaggatatctttatggtccacaagttgttcctatatcatccgctgaatgggaagctgtcaagttcaaacctgagaaaggtgtgaagcttctaggttttacagatagatccagcatatctcggtaacccatatccttcaaccttttatttggaataagattatgttctttggaccttgtggtcttgtattcactgatgccatttctacatttaatttcatgattatttcaagttgtttgaggtaacttgtttgaagacatagcaaaccaatccatgtgaacattcaagcatgaatagttagtttatgtactttatatcattggagattgagctgatactatgaaacaaaacattataaaataaattcttgctctagctgattacctgatccttgcaattatgcctaatataaatgtttaaagagtacatgtttcgtgttatgtggtgttgcatttgagtttaagctgtaggttatcatttatcatgttataaaaccccttgggatgaatatgttgcaagctggaattggtgaatggtttatgcatgaaaacaatacatgaatgcagtgctctgattcgatcaatcaatcataaatccttgcacgtaaagtttatgtttttatgtatagattacagaactcagatctgtactgggtcaaacttctgtttatccctaaggactgccagggggttcagcttatacaaaagctaatataaaatttcttttctgaaagtatctcatttccaaaatttgtaaagataaattgctgtaaacatgtttataagtttaatattaaatgtctttactatattgcagttttaagaccagatgttagtaacggtgacacagtccaccttttttactttaacaggcactattttatgaaagatgtgttctcctttgttccggaaccaggaaacacaaaagcagttgctgccgtttctgccttagctagagcaatgagtgaaatgaacaaggttgcaattttacgatgcgtgtggaggcaaggtcaagggaatgttgctttgggtgtattgacaccaaacatatcatcagcaaaaaatgttgtatgtactttatttactcacaccttatacctgtaggattcgtctgatgattgcatatgttcaagcaattctttttttttccttttccctgcagctggattccttttacttcaatatacttccatttgctgaggacatcagagagtttcagtttcggtccttcagcagcctgccatcatcatctcagcctaccaaggaacagcaggaagctgcagataacctggtaaagatgttagatcttgcaccacctggaagggaagagatccttaagcctgatttcactccgaatcccatgttggaggtgctattcttccttcagaatattgctatttatcaaaaccaatttagatattctgatatttttttctcatattatataccttaagctatttttcctcttcttttcactttttcattggagtatgctctgcaaaggttcttgtatgtatttgttttgcttctaagtttactaataggttctagatcacttgacatttttcttttaatgctccttttgtgcatattctttattctgttgactaaggttcacttgccacttccccctttagagattctacaggtaccttgatctcaagtcaaagcagccggatgcaaatgtcccacccctcgacaaatgtctaaagaagataactgaacctgatcctgatgtcattgattatcaagcaccgctaataaaaaaattaggcaatgtatttgagctgaaggagaaccccaaggttagaaatattgctaacgtatttgtgttattgacttgatactgtaattttggggaaccataaatctgtttggactgatcacagaaaaagaaagcacggacacaggacagattgacttatactggcgcagacgatcaggctaaattattagaagaaccttctgcagagaaggttggggtttcggaagctttatatcctccaaaaaagaaggctggggagattggcgatcataatcctgttcaagattttgaagccatgctgacacagagatctagctcaacgtgggttcagacggcaattgaagagatgcagaagtacataaccgctttaatacaggattcctgtgatcgggataatcaccaaaaggcactggagtgccttgttgctttacggaaggcctgcattattgaacaggtaatctctcctatggttattttcatttgattgcatggtagttagatgtaatccatgccccttattttgctgcgagacctcatgtatagtttaaacatgcttgctcagttgtaacttaggtgttgttttccattataggaaccaaacgaatacaatggattcgtaacaaagctctgtcagaaatttaggccggctggtgataaaatttttttgcagcttctttcgtccaagaaagcttcgcttataagcaaagaagaagcacctgataggtaagggaacctccatatgtgctgtagaaaattctatgtgcattgttttctctcagtttttgccatttaattaccctattctatatgcatgtagcgatgtgacggaagagatggcgagaaacttctgtctgaaacccgagccgtcctctcagtagccgagactgcaggcatggatgtggatggctttgagttctgaaggcctggaagctaggtaaaagaggaactggaagacatcgaacggccctagtactaatttctaacgtacgcctggttaaaatgttatgtagctcggtttttggaaagctctgtgtcatgtgagtgatgagcaacacgagctactattgttttcgaatggatatgtatgttgggatggaaaaatcccagatgaaatgtaaaagacttgcagtttgagatgtcccaagctccaagacttcaattcctcacctccagaagctctgaacttaaaattcagcgtttctgcggccgatatcagcattctttgcgtgacatagggaacacactctggcgatcagcctcagggtcagggaaagaacacttactcattcccagcctttattcaaaatctgtgaaacaaacaaaacacgcacaaatccctgcagagactcactagattcaacaagagattcatcggcattcatagcctgtaaactacaatttgtattttgtagtagtacaacaaactgagctttggcaacagctaattaggcgtccttctctgccacaagcttgtcgataagcacagcagcatcctccactgtctgaatcacttgcgcactcgattcgtccacggtaatctgaaatgcctcctcaaggcccatcacaatttcaacctaaaaccaatcaaaacacacataaagagtaatcagaggcatcatggctgcaggcagcaaatactaaattcctgagattttcataagaaagaaaaaggcgccacattcctgggataaaagagaataataagctagatcctgggaaaagagagcacaaagctagatatggaattgattcttcattccactatgaacggagaataaattcatttatacaatgactaaatataaaaaggtgtacaattgccgcatctgcgaaaaatgtattgttgagagcaacaacaacatgccaggagagatgttgactagaataatttttaatactaatctgagccgtgacaaatatcagagatcactgtggactttcaacaagaaagtatgaggttgccaagaaaagggctagttgagaggagtcttacagtcccctttaaaaaaaatcaataaagtagtccaggtgatttagatagtgttgaattattacattagtccagaagattaccgtgtcaagtgaatcagcaccaaggtccacgaattttgtttctccagaaacggcagtgccttcatctactgctaactgattcttaactatttcgcaaaccttatcaatagtgtcttgtttggcctgttcaataatgtaaaataaatcatcaagcagagtctttgaaaatatcctgcataaattttcatgaacatattgtaataatataaactgctacccacagcaattacagcatgggaccaaaattaggctcaataaagtggaaatactgcatgctttaagtaaatatgaacaggactaagcaatcaaggtagcagggtaacacactgaaaatctgcaagcagccaagcagtttggaaaattcatcaggagtaaccgattctatagccatcgtgagtgggcagttctcttgcaagctaggataatttcactgtcgaatgcatctttctagttcttaaaactgattgtgaattttttttcaaaaccattcctcctgccataaattgtttgctatgctgtcactgtaaatctttaaccggtaacatagttctttttctaaaaaaaaaaactcatacaacataaaacattggcatcatagtcagtaatgtaccagggcagcagtgtaggaaaactaatgaggaacactatattaccatcaccaataattttctttatccccttgcaccaagtaaaaggaatgtaagatgcagtaggtgatggcatgatacatcaaaacatagtgaaagttcttggcattgtatggtgtgtgtgagaatttcttatggtggtttcggcaaactactttgttggtgaacgtataagagaagaagaaagattgcagtgaagcaataatttcattggttgactgaactaacatgtatattaacatctggagtggaaatcaaaactacatttagcatcagaaagtaattgcagttcagttgattatccacatggcagaaatgtgcattccaactctgttggaggcatcacgcacttgcattgagcttagaagttaggcatgactgtacagtagagtgcaaattccaatggtggaggtagcaaagaacatgacagtgatattacatacataccgaacaagacaaggcctggaagcgacttgggaccgggcgcaaccgaatggacgggaagcttgctgtttgcctggagaaagaagctgaggttggattgagcattgagcacatcacctgtatgtgtatgtaaggaatatgaacacaattaaaaggggggcaagcttgcttgaaaaaagaaaaaaaaaggaagagcggcacaaattgaagaagtagctagccaagaaatgaagctggggggtgacctagtatacctgaacccgagacgcaggggagagaggcgatgtggcggcggtgatgggagcagccatcgttggcgcgcgggaggacgatgacagggggcgggcggcggagagtgcgaagaagatggacaagaggagaggagatggaagaatcttattgctaagctttttgcctcgtttgtatcgacggccgtgcaacttaggatgcgcatcaccatttccggcctattttttttgtcctattccgacattatcatgggagatcccacaaaaatgggatgcaaacgaggaacactctctcttgtgatcaccatcaccactactcacccatcttcatttccaccatcagattgtgttactcacctttttttttccttctatattgtccgtgacgatcaaaaaaacaaaaattactcaaaaatagaatacatactaattacctaattattaatccatatactaattaatatgatctaattttattagaattggataatctaccggagtcctgttatccagaagattataatgtttgaaggcatatattccttccattcaatatttctttttccccaataacatcaaagatacacaatgacatagctcctttgaaatttggagacccgtgtgaaatcatagccgagccgtaaacttaaatgataaaataataataatttacattagtccatggttattttatagctccttcctagtattggattacaccttttattttctctatggttttaccttttcacaaccagagtgacatttttctgatccaatttttagaaaacaaatggcttgaaagttgaatattatatacatgatgaaaataataaaattggaatttaggaaatgaaattacattataagaacaaagttcacgtttacctgatgagatgatggccgatagaatgagactatataagaacttaatcatgcaggtggtgagagcctatggctatagtagtgcaacctcaccttcatacgaccggtggcaggcgcgaggctgcaaggtgtgaaccaacattgcagagcatttcggtcgagacaatggtgagctagtagtccagtcaaacgtcaagattcgagaaaagaaagcaaaacgatgttgggcgaatactccatgactctcacgcctacttgcgccatgggccgagcagcctagaagcgcttgatcgacctaactacttgggtcttgggcctcccgtgcacgatggtgtttggggaccctagatattgggattgtgaacagccgctcagctcgattccctgggacggtcctgcacgtacacagttatgagtatgtcctattaatacatgtttaaatattttgactccattagctaaagtttactcttttatcaattctattagttttagttaaaattaggaaatggtactttacttgtgataataagcgacaacccattattaaacaaagtgagaaaaatgtttgttatatctctagagcctagactatgttggaggcaattttttatagagtggtgtattttgtaatgatggctaactaataattggaagtctatggtttttaattttagtttcctttttttaaaaaaataaattgattagttctctgtaggcatgaaaaacaaccaaactaaaattgaaaactctacttgtttaactatggtccttgaaaggtattgaatgaacagtgttccttaccttaaggtatatatgggtgtatataggagtatcttacaatagacatattgcactttacgtcgacacaaactaactccaattctcaagtaaaaaaaactcatttaccaatgacataggatagtttaaaagttatcaatccttccacaagaatatcttaacatggttgaccggcttccatactacttagtgagtagtaaactcaacatatttgttcccatcatcctaacttttagcggtaccaggtaaataagcacaaaataaagaaaaatgatcatgtcatcaatttctctaagacattttcctatacctctaatacatgctctagtactgttataattgatatgttgtttggctacgtcttcttaatatacggtgtcatttgtattcttctgcacgtttttgttgtcctattagtcccttcccgcctatatattatttatctttgagtagaagaacatgctctactatgcatttaataggtgctattttcgccaagtataattaaatacgttctagttttgtattaaatagtatgtcagacgattttgccgctcttgcatgcacgctacgtatctactatagtcttatcatcagtgtataagtgacccattttactgctgttgcatgcacaacttatataacaaacaactaattggatttatttatagtgtatataaaactaaaaatatctgtatgaaagttttgattggaaaaaaaaacaatactaatacgaatggatggagaatacaagtggtggtattggaggtggcaggcagcagagcacacaggatgggggtgttgcgggcgcagaagatccgtagatagataggcctcccctcattttcaaccctcggaagggaagcctcctttgtttttttttttcccttcttgttcatttctctcttgctccggctcgcctcgcatcgcctcttcctcctcttccctcatcgcgttcgcgtttccatccccatctccatctcctcctcctcgccgcattcgcatctccctcctctcgccgccgccgccaccgccaccgccgccgctcccttcctgccattaccgcccgtgcccctcacccccctttgcccctcgatctctcccccctagggtagggtaggggcttgcctccgattccgtacggacacaccctacctagggtagggtaggggtaggggtagggttgatagagagaggttccgggatgacggccggcgagggctgcgcggcccgacgcgggtgatccgctctcacgcggggagcccctctcgcgcgcgcttgcttcacgtgggggatcccgtcgcggctatccctcctctcctctcttcttcccccttctagtctagtttagggttttctatctatccatctagattttgatcttcccctcctcgctgcttcccctcgcccttctgacctggcgcagatgttttcccacggcgctgattccgcccacgacgccggcgccgtcagcaccggtgcctccggcgtccccacgcgcttcgtctggccctacggtggcaagagggtctacctcaccggctcctttaccaggtttgcatctcttcttcttcttcttcttcttctttttttaccttatcttctaataaatggagtatatcctataccatacctatcttattattaccactctttaccttccacttgtgctactcttgtttatctcccaccctaccctagcgatcagactgctgatttgggaatacttcaaaacctcttcaactgtactagctctagcgcgccatgtagcttgcgccccatcgcatgccgtgcccttgtttcatttcatttcatccaactatactgcattgatacaattcctgctttatatttactatgtcactgtgtcgtatgtgcatacaccagttgattccattcttttgttttctcccctgtatatggtggatatgctatcatcatgatttatttacttgctatgtgcccttgccttcgtttaggacgattataaaccatgcatacgctgacacgcttctaaagaaaagttaacacgactcctttttaattgcacatggccttcatattcttttacgtggatcggttaaattttttacatagttttaacactagttagctttacgctatgtatataggccatcttacaactttctgtgttgaatttttattttggagactaaataagaaagtaataatatgtgttagttctaacgtgtattgaaagaacttcaggcattattagtaaaaaatatggtgtaaagctggcgaggggtggcagattcactgctaccatcatttgcccaatattaaaagttgctgtgacgtgtataatgcattctctggtcaacatatacatgatgtctcctgacgtcatgcactatagggtcctcgcatggcatgctggcttaggtattagcttggatacgtttaaacatgaatttttcagtatgttggcttaggtattagcttggatacgtttaaacatgaatttttcagttttatttcctgttaaatacatgccatgtgttctttttacacacctaatggccctaatttttcttaggtggacagaacatttgccaatgtctcctgttgaaggttgtcccaccgtttttcaggccatatgcagtttgtcccctgggattcatcaggtgccctttttatcccaaagtttatcatagttgtcttagactagctttgctacccaataaattatgttcttgtgatgcaacatctaatgtgtgaacattcttttaaatcattgatattcagtacaagttttgtgtggatggggaatggcggcacgatgagcggcaacctaccataacaggagactatggtgtggttaacactttatgcttgactagggactttgaccagataaatacaatattgagccctagtacacctggaagtaggatgaacatggatgtggacaacgacaattttcaacgtactgtaagtgccacttatcttgttttgaaatttgaaaatacttgataggatagctgctattttcacagttgcgagcaaacagtgacactgtggtatacttgttgccgcaatttatctctgggttgataataatgtaggggtagtatgcttctgaagcataccatgttgggcagatacaataatacaacacactttaatagcattacaaaggtcacacaaattggaaaataacatctagccccatgccccatctgtcagcgcatttgatgctacctgcgaatttatacatcttttcggtgttactgagcaaagtgtgatcattgaatgctgggagaaggggtggagttgtaattatcagcacctgtgtgcaaaatacaaatgttctctcctctattggaaaatttatttataggaaagcgatacaagctgagtagctgatacatttatttttatcttcactaaaaagttcatgtgtgtgatacatttatttttatcttcactaaaaagttcatgtgtgtgatacatttctttttatcttcactaaaaagttcacgtgtgtgatacatttctttttatcttcactaaaaagttcatgtgtgtgatacatttatttttatcttcactacaatgttcatgtgtgtgatacatttctttttatcttcactaaaaagttcatgtgtgtgatacatttatttttatcttcactaaaatgttcgtgtgcgcaatacatttctttttatcttcactaacaaggtcatgtgtgtttataatgcttcctatttgtttagttttgccttttgcttttttcacctttctttctagaagctaaatataatataaacaacttttcttgttttcttcaagcaggtttctttgtctgatggcattattcaggaaggtcctcagagaatttcagaggcagctatacagatctctaggtgtcgtgtagcggattttctgaatggacaaactgggtatgatttactcccagattctggcaaggtatggaaaatgagctcgtcttgtatgaattttagtgctctaatggttattcttattacattatatttacaattcaggtcattgctctagacgttaatttgcctgtgaagcaatcttttcatattcttcatgaacaggtgactatgccttcttctgctagtttccctccaatctttcattcttcttctgctctgtagcctgtttccctccaatctttcattagttgttctgacattgaactagtgatattttgctttgatctgtaaatatagtggaataggtacatacctttttagtaaatatgttggcctgttgttgcgtacaatgtttggtttcattggcagcttcaattcatctgagattgcatgaaaatggaaacactgcagcctcatgccttaaaagttgcagctacttcacctacttcacacttcttgtacaacccaatgttgcatccttcctcttgtacacatcacctagaatgcatgtggtcaacctttaaaagcttgaaagagcactatatatgtaaaaacattcactttaatttattaatcgatacatcatcaatggggtctaatttttgttaagatttgattagagcaagtaattgtcaagggtgatgattgatgtgtcagacatccaatacaacaattagaagaggttggaggaagtaggttctattctgtttgcactccacaatttccatataggttataagaaagttcagctctgtgctttcttagctgccatcttgattctgatttaattatttttggcatcttgatataactggaaatttcatagtttctttaaccatatatattgaagtacaagaaatattggctggttttgggaacatacattaaataaatagtgtaccttgcagggaattcctgtggcacctctatgggattcattcaggggccagtttgttggccttttgagcccactggattttatactcatattgagagaggtaatttattctgtcacttactgtttggtgttagtattctttaattatttttttatgtgtcattgttgttctctattgtatattttttattgttacaagtgatggtttaatgttcatttcaaatatgctgccacttttagtggccctgcaaaacgaaattgcgcaattcttgttttttttttttaaaaaaatctgaagcagtgtaatatcattctttgacagtattaagttattgacctagaagcttatttcacatgaattataaagacgactggttcattaatggaatgtgggagtctatgcatttgaacaatgtacctgcttgtaatcccgattctgctgtatcacttagtaaccatgcatctcatggaactttgtttgggtgaccacaagaagttcagccaagatagtgatcatgttgaactgtttttcccttaattggaagtgttcagttagtagaacctccaaaaatttgaaatcgtatcttttggaaggtggactctagaaaatagaaataaatatgctagtagtagcgactgcatcatgatactttatttttatgctgtttgaattgtttctgcttccaggtaaaggattattaatcctgaccatgtgatttgttacttgaaacaatttgtgagcatattccaacagagtagcatttaatatcttgtttatattgcagctggaaactcatggctccaatctgacagaagagcagcttgaaacacatactatatctgcgtggaaggaggccaagcgtcaaacttatgccagaaacgagggttcttggagggcaaatcaccatttagttcatgtgagttgtccactgtgtttgtgaaccaattgcaaatctgtatgcactcaccacaaattgagactgctgccatcaacttctatctatatttactggccaaattacactccagtgaattttagaattcatgtattgcattctaaggataatattttaccctttgatttatttgcatttgacaaattgttgtcaacaattgttgtgtgagtaccacataacagtttttggcacaccatgacacacatttttgtcataacattttttggcacactatgacacattttactttttgtgttacaactaagttatctactggatgctgaaatatattttgcttaattagctttaattgccatgctcaagtgagttacttagtgaactgcaatttgtttggtgtgaaatttcatcgaaccccttgcatcaactgttccttttcatttccatcctagtattttataacatgcttagttttataatgatcatgtgtctcatgcacttatgctggagtgaatctattgtttaggccaccccttatgaatccctgagggaaattgctatgaagatactgcaaaacggtgtttctaccgttccaattatgttttcctcatcaccagatggctcatatccacaattgttgcatcttgcttccctttctggaattttgaaatgtaagtgtttctatgtatttgcatgaaaagtgtgctatacacaaacatattacatgatagcttaacaacatttcattttcaggtatttgtagatattttaaaaattctcaaggtaatttacctattttgagccaacctgtatgcacaattcctctgggtacctgggttccaaaaattggtgatcctaatggccgtccattggctatgttgcggcctaacacatctcttagcgctgccctgaatttgctggttcaaggtatgttatctgtctgttttaccataaccaatgcctgggaaagtacttgcatttctgtttcttggtgcaattactgaagtttaatactaattccactgagatctcttacagctttcgattatttacgctatcttgttgccaaattaatgtcttattacaattactctgtactctaattgtttcattcagctggtgtgagctcaataccaattgtggatgacaatgactcactgcttgacacatattccagaaggtgcccatttgatactcaccattctttgtgtagtcatatactattctttggtccatgtattcattgtgttttttccattatgtagtgacatcacagctcttgcaaaagacaaggtgtacacacacattcgcctagatgagatgaccattcatcaggtatgctagtaaatatttaatgcgtcttgatttagtttgtgtctggaattttagctgggatacagttgtacaataatttttgcagagtttcttttggtcttgaagactggttaacttagaaaataataactttactgatttatgtatatgatagggaaatctgtatcgatacctgcatcacacatatatactatgaggacatgcctttgtggttctggcatttattagccctgtgtctttttgcacgcagagcatggagcatgcacacacatctaaaacaaaggctgtaggctgtagtttgatgtgttttgtccatttatcactcttactttccataccggtcaaacaaacatatactataatagaataagtagtgcaatgctgtttaaagcaggctttctcgtgaatttgtgtatatgttatccatcgagctggtgtgatttttggtgtgaacctactcatttttgttgttatgttcaggctctgcagcttggacaggatgcaaattcgccctttggattctttaacgggcaaagatgtcagatgtgtctccggtctgacactttgttgaaagtgatggagcgattagctaatcctggtaattatctgtgcctagatatgcttcctgaaagcaacttttcgggttcaacttactaatattttttttttgcattttatattgttggtaggggtgcgccgtgttttcattgtggaagctggtagcaaacgtgtggagggcataatatcactgagtgatattttcaagttcttgctgagctaagtgaaaatgcccgagccatctgtgttttgttctcacaactgccggagttaacaatagcagaaaaaaattgtgaatctccaacatcgatctctctggcttttggatcagacaggtgtcttttcccgataatggccaaccagagtctgtaaagtcttttttttttcccttgccccttcgttaccaaaatgtctggtgatttttatttattggattgttttgctgcttgctcggtttctgagccccccaaggagttagtagctctgttgaaagggtgggatgggcgcttagagacatattttagcatgaatcatcatcacagggaagtaagaattgaaggaaagaggggatgctctgaagcaagaaggatgaattcaatgtgttgtttttgctcaacaaccgtttttttggcgggcagtgttgcaaccatgaaaggagaaattacagtcggctccttgcttgttagacaaaaaaaaaaaagaaaaaaaagaagagaaaaactattggatatctgatgatgtagtgactgagaagcaggagtggagttgtgtaaaacctgtaccacctgatttttatgtctaaaccgcagcttactcattttccttgtctatgattcttgcttgcttgtgtagtgaatagtagtttttcttgtctggtatctctctctggtagcggcgccgacgtgcggaggctgtttgtacaagttgagccgcatgcaatgcatgttgaggagcaactggaaatcgatttggaacttcattgatgcgtgcaggtgaaggtgaaggtgaaggtgcaggtgcagcgtgcggtgcgtccttggtccctgtcgagtaacggcgacgggcttggcgtcgagcggaaagatctagagagggtgggttacgtcgacagacactggataagatcaatccacatcgccacattactccgcccttttagacgcttgtctgctgctgctcatcagtagttcatcagtagtagtggtaggggagataattcgtcgttcgttttgtgcatccatccagaattcgttccagatccagccagccagccatctcaagcttctctcttctcttgttattaagagcaagcaaacagtagtctagcgaagcgagactgcgagagcagagcattgttcttcttctctagctattagtggtggggaataatggctcccgccaccaccgcagcaatggccctcgcgccgcctccttcccatcaccatcaccatcaccatgtcaagcagctgcagctccctccgtctgtctccgtctccgtgcccctccgctccggtttccttggccgcgcactgcctgctgctgcccacccacagccgctgctcgccgccgagagccgccgcagcagcgccgtgtccgtgcggatgtcgtgggacgggcccctctcctcggtccgcctcattatgcagggccgcaacgtcaaggttctcctctcctactgctaccactagtttgcttccctggaatttccttcgtttcatattataaggttttctagcattactcatattcacatatatatatatatgataatattctagattcattatcatatatatgattataggtaatgctagaaaatcttataacctgaaacagagggagtatatataattcggtaatggaactagagtatttgttttattaattggacctttatgaaatactagtagaattcaacgaaactacattcttctttattggttatattagtagtaatttgcttcactagaattctattttatactagagagattaaaaattattacaaaactaactgtatacccgttgcaacggaatagtaatatggacctattacttattactacctccatattttaatgtatgacgccgttcactttttgtccaacgtttgaccattcgtcttattaaaaaaaattatgtatctattatttattttattatgacttgattcgtcatcaaatattttttaagcatgacataaacattttcatatttgcaaaaaaaaaaaacgaatggtcaaatgttagtcgaaaagtcaatggtgtcatacattaaaatacggagggattatatgggatagctacagtagcagagtcatgataaagtagtaatgtgttgggaggagcggtagagcgttgtgtggaaaaataaagatgggaatggaatggaatgaaaagcgtacgtgcgtggcgtggcggtgcagctgaatgagaaggtgaaggagcacatcgaggagaaggcggggagagcagtggcgaagcacagccagcttgtgaaggaggtggacgtgcgcctctccgcccgcggtggcgagctcagccgaggtcccaagatttgcaggtgcgagatcactctcttcaccaagcgccacggcgtcatccgcgccgaggaggacgccgagtccacctacgccagcatcgacctcgcctcctccatcatcaagaggaagctcaggaagatcaaggagaaggagaccgacgtccgccacctcaaggggaccaagccccccgtctccgactggccgccatcattgctcgacaacaacgacgacgacgcccaggcccagctcaaggatctggaggaggccgtcggcgccgaggacgaggacacggtgctcaccaaggtctgcagtctgatgcatgatcaatgcatataaatcaaatcattcatgaaccaaattaatgcaactgtgaatgcaggtggtgcgcaccaaggtgttcgagatgccgccgctgtcggtggaggaggcgatggagcagctagtgaatgtggaccacaacttctacgccttcagagacgagaagaccggggagatgaacgtcctgtacaagaggaaggaaggaggcttcggtctcatcgtccccaagggagacggtcatctccacaaggagaccatccccaactctgaccaccaccacccctcccttgctgcctagcctctacacctcctgcatcaccatcctcatttgctaattatttctatgcttgcccaagagtctctaaatattactagtattaattaatccaagtgatgagagaggtctttgattttgtctccgtgtacatcgatcgatcgactcttgactactctgtttaaccaactgttttcgatatatttatattattaatgatttttccaaggtttttactctgctttatttctggaagctgcatgtatagcttgtgcttttgctgtattattgcaaattttaaaaaatatatcctacatcttagccactcgatcgagaaacaactgaggaagtccatttgtacctgtttttgaagataggagaaacgttatattcagtttttactgttgacagagttgattcgatccaaatcgaagaggtgaggaatgtacaatagacttattcatgggtgtgtaagttaataaataggaataagttcaccagaggtcccttaacttaaccgcgagatttttcgaggtcccttaaccacaaaaccagaaatgtgtacctctaaactcactgaaaccgttcaaaggaggtcccatagcagtatttttgcccggttttggtgacgtggcattctagtcagcaaaagaaattaaaaaaattacatgggacccacatgtcatcagctgcacatttttttcttctctcttcttctttctctctcctctcttcaccggcagcgggcggcgatgggtgagcacgggatgcgggcggcatgcggagagccagcggagtgggtggcgaagctggatccgcatgtgctgctggcgccgccgccgcggcagatgaaacaactaaccgaccatcgctgcttccaggggcggagctagtatatattagggggggtgcccaggaacccggttaagaaaattttttagctataccttatctatttttaccatgtatgcacccccctcaatgtaaacttaggcacccgcataagcttaaactcgatctaaagtagagtaaattaagcaagtggcaccaccctccatttcgctctagctctgcccctggctgctccgcctgtctgctacgcccgtcgaccgctcgccgccgcgctcgcccgcccccacccccgccgatgggagcgaggcggccggccgcgccgacgtgagaggggcagaggcgacggtggcggcgctgacgggttccttcccctgtcgctggtcgctgaccggtcgggggacgacattgacgccgtgttcaaccccgaatggcgccgtacgattctactgcttgctatatagctcaacgattat

SEQ ID NO: 7209 - DNA, 28161 bp, Oryza sativa
ctccccctccgtgtccggtggcagcagcgcgatcgtgcccgaccgccccagcaccgccaccacccatccccgcgtggtgggcggcgccgacagcaccaccttcgccaccgggaacacggggggccgagggatgcccacggattcgccggacgtgacgctgcacagggcgatctcgcggtcgtcgtccaaggccatggcgagccaaccgcccatgtggccgcagcagcgggcggcgctgaggcgggcggggagggcgaaggggaggatctcggcgcggcggaggctgaagaaggcgagaggtccccgggggggcccagggcggcggaggaggaggcgcggggcctcgaaggcgaggtcggaggggaaggaggcacgggcgcaggtgcgccaggaggagcagacgaggcggacggtgacacgctccagggggctcatcagcttcatgattccttccaggagctccggcgggagatccgcccaccccacggacaaatccgcccgccgccggggatccatgtccgccccgccccctgcttctctctcttcccccctcccccttttcttcctctttcttcttcttcttttttaattatttttctgtcaatggccagtttatatttgtccttacacttcctccctaaaataactttgagtacctgtttgaaaaaaaaaacctaaatattttgcggggttcttgaccgttggatcactttgagattcgtgaagtgcccaaccctaaccactcattttctcgctcctcactccgaacgccgccacctctccgcccgatacccctcctccccaacaactaacatacaaatattgttatatgcctcaccaattatagaatacgccaacagtaccagcggggttcatcagacctcaccctccctccctatcctatttctcaagctgatgatggtgaggtgtccccatcccgttgtctttgacgactcctcaccatcaaagacaccactgcctcctagctcgttgtgctctgagctatcaacattggtcgttccaccgcccataaattactatcaagttcttgtattttacaaccatccttctaaaacttgaggaactctctcctctttcttctaccccgcctcaaccttaaccctatatcttaactggactgggcctcctaagatcaaagagctcaccggaatgtgaagaaaatgtcatggtgtacaaatctcagattgaattggatggtccaaaatatgtaagatgggactttgagtttctattgtagggagattaataattttggaaaactattgaccttattactttctctcttttatgttgtccccacggcacacaggacaagatctctctttgggttgtttaatttgattcatggttaaaatttgtcaatccaactacaatagcaaaagtacgagtaataacaaaaagcttgacgcaaatttaattggcatatgaatacgttagctccacgccttgagaaaaatattttctttttttaaaaaaaaatttctgcaacatcatcaagatcactgtttatttcttaaaatatttaatttgtaaataatctataacaataatttgttcaataatctaaatcaaattattgcctaaaaagtatgagtaagcacgatcatggaattcaatcatgcagacacggaaatacatttacatataacatgagacgtggccatattaggcatcaaaccaaacatcctcttatttttggcagccagggaagagacaaggtcatattaaggattaacaaacaatttggttttgtggattcataatgtaatttgatatttgatgagtagcaacgattatgagttgttggaggaagaaaccatgggagaatatatatgtttttattgggaataggatgaaaaggaatgatcggtcatctttggaatatagagagatgtttgatgaaatcaatgggaaattgcttttcctagaaagagtgagatgttcctcgctagggatttcatcttgggaataagttcactttgattcccttaactagtgatcgaatctgattcatatccctgaaccacaattacggatatctcgaccccccaactattaaaaccggtgcaatttaactcccttggcggttttagagggcggttttgctgacgtggtgtctacgtggcaatattgacctggtcttcgtccccattcggcgctgacgtgtcgattaggtggcattagaattaaaaaatatgtttgggggcccatttgtcattaaaaaaatatgtgtgggacccatagacatgtggccccacatctcatgctctctcttcttccttcttcctcccccctctctttctcttccccatcggcgagcgtgggacaggggccgtcggcaggcagtggtggtggcgggcgggagggtgggcgagcgagggtcgggtcccctttgcgagctcgcgacttcgattagacctctttcagtccccgatcaaccaagccaccaccacagtcgagcttctctcctcccagaaatcccaatccacacctcgctggcgcccaatcaccaccactgccgaaaccccccaaatccggtctctgccgatcaccattgcggagctcgagctgtgacttgccgctgcaatccatcccctccgtttcttcccatttctcccctccctctccttcttttccctcttcctcttccacggcagagaggccaggactcggggagggcggcagtggcggatgaggtccgcgcggccctcgcacgctgtgtccagggcgggctcagggtgggagcaccgaaaggcagtgacgaggagtgacctcccccatctcttttgtggtcggggcggctaggctatcagaggcagcgagggagcggaaggcacagaaggacgaaggcggtggctgccgctcttccaaacgacgttctaccactgctgttgccgccgttttgcttctccgactcgatgcttcttcgtcttctccaacgaaggcggctacacgaagccgggaaggttgtgacggcgacaagaggttgggagggcggtgacggcaaagtgggaacaacgccagccgactcctcttttcctcaaggagtcagctccttgttcccgccatggcatcctcgatggcgaccaccctctacgtcaattcggtcgtcgacgatgacgtttagtcgcacagctccgccgccaagctgtgccgctcgtcgccggctaccgccatgaccccatccatccatctgacgccgcgaacacagccgtgtcgttcggcccgaccaccgcgggtgccacacattgagctcatctggggcgggagcggcgacagctggggaatcgagccgctgccatttccgcatctccgtcgcgccttccgtcgtctccgccgctcaccgtcgtctctagccctcgcctcccaccgcgggaaagagagagagtgagaggaaagagagagaagggagcgacgaggagagggaggaggaagatcagagagcatgagatgtggggcccacatgttagtgggtcccacacatatttttgtgaatgacaaataggccccacacataaattttaattctaatgccacctacgcgccgcgttagcaccatgtggaacgaagaacaggtcaataccgccacgtaggcgccatgtcagcgaaaccgccctccaaaaccaccgagggagtcaaattacactgattttaatagttgggggttcgagatatccggtattgtggttgaggggtacgaattagattcggtcactagttaagggagtcaaaatgaactttctcctttcatcttgtggaggaaagcaatatatatggcctagtggatgaaaagatggctcattggcccattgggaagggaaggcaggagcccatacatattccaatttttctgggctgtcagtgcataaggttagtccaataaggaataagtctatttgacccccttagctcttgctcctgattggatcacctccctcaagcgtaataaaccaggtataatgcctcccctttaattaacgtattatagtcatctttggagttatactagcaaatatgcccgtgcgttgcaacgggtgaaaaaacgtaatgataatatacgtttttcatgcataaccacgtcgataacaatcagaaaattagaactacgaaactttattttctagcgcgttttcttttgtgcttttttctgacatttttccctcacgtgtttttttaaaccgtttttattttctcgcgcattttttccttttttaatatactgtagaaacttctctttttatagttagattagattagattagagataaagaagatatataaatggactaaaaacgacgaatataaatttgacttttttcctccgcgcttttttccgtccttttaattttttttctcgtgcatttcttttacgaagggtttttttcaccactttcacatagtgtcaaacctttctagatataataggattcgattttttttaccgcatcgcgtataattcctttttctttagaaacagacaattttttcgcccttttttatcgcgtcaacggagtcggaatcgttttgattttttccctttttttggatcggacagatttttttttgcccggtttatttcgcccgatcgattttttttaccgcgtcacatataattccttttactttggatttttttcgccctttttttaccgcgtcgacggagtcagattcgttttgattttttttctccctttactttggaattttttcgccctgttttcaccacgtcgacggagtcggattcgttttgatttttcccctttttggctttttttggataggacagatttgtttttttttcgccccgtttttttatcggacttttatcttttttttcgcctggtttttttattttttttaccgcgtcacatataattcctttttctttatcggaaagttttttttcgcctttttttaccgcgtcgatggagtcagattcttttcagctttttccttttcttttatcggacaattttttttttcgcccatttttttttctcctgtttttttcggatcggactatttttttcttttttcgcccggtcgatttttttaccacgatatatataattcctttttctttggaataggacagttttctttttatttttttaaactctttttaccgcgtcgatgtagtcggattcgtttcgatttttttcctttttttgctttcttttttgtcggacagatttgttttttttccacccggtttttttccgcccaggtttttttatcggacttttctttttttttttgctccacgatacatataattcatttttctttggaataggatagttttctttttatttttttaaactctttttaccgcgtcgatgtagtcggattcgtttcggtattttttccttttttttcctttttttttgtcggacatatttgttttttttccgcccggttttttttcactaggtttttttatcggacttttcttttttttttcgctcggtttttttctcccgttttttgacggacgacagaagcacctagagaagtgttttttttcttttctccaatccaatacagatcggatctcttccagggaaatcagattttttttctccagggaatcggactcttttttttcgctttttttattcattaaacggtttgtctctcggacttttttttcccttttaagggatcgggtgtttttttgccagggacaggtgtttttttcgcccggtttttttttcacttttttttggatcggacttttttttcgtccggtttttatgatcggacaaacttggttttttctgcccggtttttttttcacccggtttttttgacggacgatggaagcacctcttattttttaagtagtatatagtagagtagtagataataaccacaacatcatgcgttcttatatatgggcttgtttgattgcatccatttaaaaatactccctagcaagccaaaattttagcaaagtaagagttttgacaatgttacttcaaagcttttagttagctttgccaacatattggaattatgttcttcttcttcttcttcttcttcttcttcttcttcttcttcttcttcttcttttgttttttgcaacaaaccaaaatgaacaccgaagtcagtcgccattagcatttttttttggtatggtttcatacttttattgagtgttaaatcaaacacacgatatgatatatctcatcactagtctcatttgttttttcgagtataaataattataaatgtttacatggtaaacaaggttttttttcatgaaataatgaatcgtaagagaaataatcaagtgaatgaaagagatgatgaaggagcatgcatgcaggaatcctatgtataggaaggtaggaggacatgcatgcatctttttggttggcagcaggcagaggcaggcatggcattggcatcggcatctagagccgcatggatgatccagatccagtccagagaaagaaaaaaccaaaaggaaaaaggaaggtcaatgccatcctcagctgtgttcaatccgtacctccccggccaccaccggccaaaccaaaacataggccagccacccgcacccacagacccagaccaagcttttgcgtgcgtggtacgggtaaacgacggttactactaaatactattatctttaatttaagaaaactattttgtgtaactaatgggtaattaactgcacaacatatagaaggtatgataatttgtgtgattaactagttttagatgggtacccaacgcgttgtttgcgggagaagtgtgtgataaaatagtatatatgagttgtaaaattttatttcttggttactatatatttttttaccttaatcaattatccaaaggttataaatgattaggttgtatggtgtgacttttggagagaaaatatacaatttgcatttttgatgaatcattcaaaggctaaaaacaattaaggtgatgcatatcataactacacttagggtgagtttgagagataggggattgagaagattggaaagatacgcaaaacgagatgagccattagcgcatgattaattgagtataaactattttaaatttcaaaaatggattaatatgattttttaaaacaactttcctatagaaaatttttgcaaaaaacgcatcgtttagtagtttgggaagcgtgcgcgcggaaaacgagttgttttctcaccctatctcacacaaacgaacacagccttagtgaagatcaactttatagatatatagatttcttacatactatacgattttctattgtgtgcttatatattataccttgatcaaatatccaaaaggttataaatgattgggttgtatagtgtggcttttggggaaaaaagatgcaatttgtacccttgatgaatggtccaaagactaaaaatagttgaagtgatatggcttcatgaaagaggagggaattagaattagcattttctttacagagggaaaaatagtaaccttatctcctcctcctccctcctcattcacgatgtgcttgggatgagaaagcttgtgctgatgccgcgtgctccgcttcccacacaacaccttggccttgccggtgttggtgatgcctactagaccggcctcctcccgcccttccccctttgtccgatgttcttcttctccaaatacaatgatgtgaagcccctaccctgtcggtccttcctcatcgccggtggctcctatcataaccagtctcatttgctgtcgtctttcgatgccaaccctgcctgccaccacctctagccccatggctccgacagtgccaccgctgtcctccattgctcgctggccactacccaccactgctctgaccgtcgccactactgcccctctaagcctagggaaaacccccttcccctctttcttaaccccccctcccaccttaaccaccctcttgaaacctaatccaatccatggcaatcatcaaaagggcatcagagaagaagaagagctcacaattaatcactgaaagaatattgctatcatttttttcaaacgtgcaaaagccttgcacatcgatatattaatagggggaaaggagattttacaaccacgactagctgatgcaggtcatggggggttacaggagagatggcgggcacactagattaactaggaaagacaaccaaattcctgaaaacaaaaaaagagaaagagcttgtatctaaacgccaagaagaacttttaggggactagataacgccacaacccaaagctttccttattgaacgatacgatgaacaccaccatctccaccatgaaaagtatctccttgaaaacacgagcatttcttttcaaccacaagtgccatgtaacaaggaggacaagggagtcgaaccctttcctgttgtaatcccctgcagctgcgggcaagaatactcccaccaaacctggttgctattgcaattatcatcgttgttgattagttaccccttcttccttacccctccctttattcatagcaggtatcggagaagaggaagagcttccaatcactgaaagaactacccctggctgttggatgcccagacaagcgatttcaatcacctaaaggctagcaaaaatacccttagttgcttcctctcatgcatcccaatggccatgcatgggcacaatcacacggctattaaacaatgtggtgcttgctaatgcagtaaagccagctgctggtgcttgttgcacagggccagaaaagcaaagctacagaggccatggatctccgggccatatggtctccactggcagttgctctgaccaaaagccactgttgcatgcatgccaaacacagctaccgcagtactccactgcactgctctgcaggacgacctgacccagatctgaccatgcattgccttgcatatagcagcacatagatccatcatatccagagatgagaccacacgatgagactacacgacgacgctgcctatttcccatccaaaacaaacaaatctagtagatgaaatataatattctctctatttataaaaaatccaattctaaaaattaatctaaaattagaccaataaagtatatatgctagcattatgaatctgaacccatactagttttgattatttttccgcaaacttaaccatctcaagcgtaaccccatactccctccatcttagaatgggtccaattttttatcgtcttctttttatcctaaaattattttgaagtattcactgcatcagaatttgtaaaatagaggataaatatattgataatagaaaaagagagcaataactacattgggattaataaagtgggattcccagactttttaattttatattgatatgcagggcagaagaaaaattaacttattttgagattgagaaagcagggtaagtattttaaaagttatacttgtctctatcagttactcctatctcttaattagtatttaaatttctctgtctattatcgatctgaaccacactgccctcaacaatctctcgatacaataaaacacattatgacttctttttttacattcttgatccaaccatctctcaatggataaaacacattatactttttttacatccttaatctctccaatacaatctagaaatacttacttccatcattttaaaatatacgaattttaattttatgtgttttagaaatatatttgtgaaaagagggagcagtatatatatgaatatatatactgtgttactactactctactcctaattatatcagatccatctatccattacgacggtttaacaattttcagccttaattagacgatcgatgatttggtactgccttccaccattaattccatattgttgagacctttcaaagggattgaaaccaaattaggtgcggaataaattcacatctattttggtgtaaaatgaattaatgttctcaatccaatctaatttctttctctaccggattaactgaaaatagcatagtttcagctcaaattaaccagctatatatatacgtaccattgtgttgttatatttaggtggtgttattttttaaggaagatgaagataagttaggatacgtaaaacaagaaaaatattagcgcctgactaattgagctttaattattataaagcaacttctttgggatccgtacgggaagtacatacgtatcaatttaattataatacgctatacatccgtaaagaaaacttcattctttacaggaatctgcacaagtgataacacgtgtagataaatgtgaaaactttgaggtagtagccagtagactactccatgcggtcgtcaatgcatgcatggatgatctttttgttcaggtgtcacttggtacagtgcacctagcttacctagcacctcgaagctagctaggctttctgttcagttactactacatttagcctcgaaagaaaaatcaacttttatacgctaatttagtgatgtatatgttcaaatttatatacctaaattgatctattttgagacggagggagtaaccattacacctagctaatcttctgttcaatgcgcgtattcctaaccattcattttaatttggtcaaaactattaatcatctttgtgcatcattaattcactgtaaaatacttcatgcaaaatgcaatatatattggagtatttaataaataaccaagctaggaacttaatcaaatttactatatacggctatgtatatactttatatagatatgtacttgtctttcattctagactaaaacgaaataattacgaaaatgaagcctactggtggagattaattgagtgcataattatggagaataatgtgatggtctgaaggagggcaacaatattcttcgttgagagcctgagaatgacattttgacaagtataggtacaactcacctcaccggtcaattatattgcaaccatgcattatactatatggcaccatgcgttgaataattaagctacatgttccacgaaagtgctacacatttgtctgtgaaaagtgaaaacaaccaaatattgacttttagcttagtgctatatatatactatgtgatgttcacattatttcctgatagatagttaaaagtgtgatatatatatatatatatatatatatatatatatatatatatatatatatatatatatatatatatatatatatatatatatatatatatggttaacagcacgctgtatttgctttcagaattgcaaataacaataaaaaacaactacaattaattataagtaattttcttagtgtacgtaatttattattttcaacataaaaatgttttgtttcctttgatacgctttaggttttgtcatatattgatgctacctatttcaactttgtgcccccaagcatttttagaatcctacgtccaccactaacattactttggtcacagtgcgctttctattggattttattgtgactatgaatttgcagatggttgacactggtgcgcgagtgtggtgtgcgtacggttaaatgtagactatttgaaagaacataaatccatttttcaaaataaaccaagcacctgtttgtagtgctacagtaaactcataaaagggacaaaattgaattttaatgaatgcatggactggcctgctatatattccctccatctacttttgatagtcatatttccaaatctgaaaaatttatttttgataggcatatttcaatccaacaacctatcatcttaatgactttctcagaattaatgtgtgactctctattcttccacacaagattggctgtgtcagggttacgggttaggcataccctttacctttcgatatacgttacatatcggcatggcatacccacgcgcatacggatacttcccgcgtacactaaggaaatccttcacgaagtctacgaatgggaagagtcttactcggataacactaggtcatcaatgtatcgtatagggtctgttatctccgagttctacttggaaaccgtctaacctgcgatataaaagggactccccggggaggacctagggcattgaatctcagagccaacacaaccctcacagcctacgaagtcggagcccgcaaggagccaagtcgccggggatctagtcgaaccaactcgaccacgatctcgccggatccgtcaagttccattgttccctttgtaacctgtgttttccactatataatcccacatcaactggattagggctattacctaccaaggggtctgaaccagtataatcctcgtcttttgtctgcttgatgtcgtattacgtagatccttgtaccaacgtaccccaataccctctatatccggtctacgggtaccacccgtcgacagtggcgcgccaggtaggggcccttggtactcaaggttctactactatgtcatccagcctcgtcgacaacagcgtcaacaccaacctcagccaagtattccctgcttcaacgatgctggtgtggacccaagttagcgaaatcgtcttcccggtttacaccacgacgccgatctcaaccggtccgccaatgactggaaacgagaacgcagtggctacaaaccaaggcgactccatgtcgaaaaatcctcccgccgaggcggagaacggagtatcgacgacatccgagctcaagaaggattctaatgtggccaaaccttgtcgttccgacatgaaccgcgagccgacgaagatgacttccgaagcgacaaggtcctggtgtcctatccacaaaaccaggaaacacactttgcaagcctgctgggttttcctcaacgtccgcgctgaaatttgcgcctacaaagagcgtggaattcagcgtatttctccaactcgtgctgtctattgtcctattcacaagacaaagaatcacgacctttcaagctgcaaggtcttttccagcgccatggaagcgccatcccctaaggtccaacagtcacacatccccatctgggataaagacaaggaacgaggagcgacgccaacttcagatcgatttgttggggtaatcgatatcgatcctcacgaaccatcagtcttgcaccttcacaagcgcgcctcgggaggtattggctatcgatgatgtcggcatatcagcgtgcaccaatgcagaagcggagaatcaattgaccactccagctcagcacatcagagccgtcaacgctatactgagggaaaccccctacgatcccgttctgaacgacaatctcgcgcgttggacagaacgactacgggaatcagtgaccaacctcagtaacgcgttcgaagaggccgctgccgcagcacacccagagcagccaccaactggcgatgccaacggtgaaaaccctgaacggagggaattgcctcagcgagctacccctccacctcgtggcactggcgatctccgagatcacatcaacggccgccgagaggcacgacgcacatgagacaatgagaatcgttcccgacgtcatgtctcttcacggtgccatgataacgaagatcgaggagaccgctcaaacgaggaccgagaccgtgataaccgccacaaccaccacgatcacaacgatcgcgaacggcgggtgccaaacgatactgatcgaggacgtcgccataacgacgacgatgatggagactggcgccaagacaacagcgggagacgacgacaggattctccagatccaagccgacatcctcgtaatcgtacgccagaaccaaacgacccatcatcatcgtcatcatcctcgtcttcctcatcatcagacagacatccatgaaggacacacgatcgccgacaacccaccgcccccagcgctgggtgtagggctttcagtcgttccctacgtgatgtccgatggcctgagagattccgaccccgagcaatagagaaatacgatgggagcaccgacccagaagagttccttcaagtctactccacagtactctacgctgccggagcagacgacaacgcattggcgaattatttgccaactgcgttaaaaggctccgcacgttcatggctgatgcatcttccgccctactcaatctcttcgtgggcagacctgtggcagcagttcgtcgccaacttccaaggaacctacaagcgccacgcgatcgaagacgacctacacgcgttgacacagaacccgggtgaatccttgagggaatatgttcagcgcttcaacgagtgcagaaatacaatccccaaaatcaccgacgcttctgtaattcgtgccttcaaatccggtgttagagatcgctatactacccaggagttggcgacaagacgcatcacaaccaatcggagattgttcgagattgttgagcgatgcgcccacgcagatgatgcgctaagacgcaagaacgataagccgaagaccgggggagagaagaaatcagccactgacgcacctgagtcaagcaagaagaagaatcgcaaaaatgggaaaaggaaagctcaagcggaagtcctcgcagcagaatacgcgaaccctcccaagcgcccagacccacaaagtagcgacacaaagaaagcatggtgccccatacacaagacggacatacatgttttggaagattgctttgttttcaaaaaatcgctcgagaagcacattgcatctgaaaaaggcaaacgagtacgcgtggtcgaaaaggacgtggaggcggctccccaggaatcagactcagcatatccagaccctgacctccacgtttcacacatcttcggagattccacaacatactcctcgaagcgagagtataagaaagtggaacgcgaagtctgttcgacatggttgggggctgcacccaagatgaagtggtctgaacagaagatagagttctcggaagaagaccaccccaagaccgccgtcattccaggaatatatccgatcgtggtcgaacccactattcggaacatcaaggtcgcacgagtcctcatcgacggtggcagctcaatcaaccttcttttcaccagcactctggacgcgatgggaattccacaaagcgagttgacaccaaccgatcaaccctttcatggaattactccccaatcctcgtccagaccattgggcaagattacgttgcctgtgacttttggccaatccaacaacttccgaacagagcagatcacctttgatgtcgctgaattcgatacagcttacaacgccatcatcgggagaactgcacttgcgaagtttatggccgcatctcactacgcgtatcaagtgctcaagatgccgggaccgaagggaacaatcactattcaagggaacacaaagctggcggtgcaatgcgacaaacggagcctcgacatagttgagcaaacgcccagcccacccgccacgactgagccacccaagaaagtgagcaaaacaaacaagacgccgaaaccggacggcgcaatcaagatcgttccactctccagtgccaaccccgacaagatcgtcgagatcggggcgacactaaccgagaaataggaactcgtactcatcaccttcctccgcgacaatgctgacgtgttcgcttggcagccgtccgacatgtcgggggtccccagggagataattgagcacaaactcatggtgcgacctgatgccaagccagtaaagcaaagactgcggagatttgcaccagaccgaaaacaagccatacgagaagagctcgacaaacttctcaaagctggcttcatcaaagaagtacttcatccagagtggctagccaatccagtcatggtgcggaaggccaacggaaaatggagaatgtgcgtcgacttcaccgacctcaataaggcatgccccaaggatcacttccctcttcctcgaatagatcaactggtggactcaacagccggctgtgagctgttgagctttatcgacgcttactctggctaccaccaaatcagcatggcaaaagaggacgaagagaagacatcattcatcacgccgttcagggtattttgctatgttaagatgccgttcggactgataaccgcaggaaataccttccagcacacggtccagggcgcacttagcgaccagctcggcagcaatgtcgaggcatatgtcgacgacatcgtcgtcaagaccaaaacatttgactcattgattgacgatctgtgggaaacgttcgacaacctccgacgatatcgcctcatgctcaatccagagaagtgcacgttcggagcaccgtcgggaaagctgctcggtttcctcatctctggcagaggaatagaagcaaatcctgagaagatcaaggcaatcgagaacatgaagtcacccacaagactcaaggaagtacagaagctaaccggatgcatggcagcattgagcaggttcgtcgctaagatgggagaacgaggacaacctttcttcgctctgctgaagaagcaagacaaatttgtatggacacaggaagccgaaaaggcattcgttgcactcaagcgctacctatcaaacccccctgtacttgttgccccccaacctaatgaataattattcctctatattgccgccacgccatattccgttagcaccatcatcgttgtcgagagagagaaagtacaacgaccagtctactacgtcagcgaagctctccacgatgcaaagacaagatatccacagatccaaaagctactttacgcggtcatcatgacatcaaggaagctacgccactactttcaagcccacagagtcacagttgtctcctcctttcctctcggtgaagtcgtgagaaacaaatacgttgtcggttgcattgcgaaatgggtagtcgagctgagccagtttgatgtccactttgcgccacgaacagccatcaagtcccaggtactcgccgactttgtagccgattggactatgcctgataacaaatcagacaaccaagtcgataacgaaacgtggacaatggcgttcgatggtgcactcaacagctaaggagcaggggcaggatttatcttgacgtctccttccggagatcaattcaagcacgcaatccacctcaacttcagggcgaccaataacacagccgaatacgagggactactcgccgggataagagctgcagccgcacttggggtcaagcgactaatcgtgaaaggggactccgagctagtcacgaaccaggtgcacaaagattataaatgctctaaccccgagttatctaagtatatcacagaagtcaggaagctagggaaaaggttcgatgggatcgaagtccgacacgtctaccgcaaagacaacatcgagccagatgacctagcacgacgtgcgtccagacgagaaccgctcgagcccggcacttttctggacatcctgacgaagccatcagtgaaagaggttagcggcgaagttagcccggacacccccgacattagctcggaggccacaaaggcagaacgcgccgttgccgatatcgagaccacagacgactggcgcatcccactaatcaaattcatcaacagcgaggagctgcccaaggacgatacagaggccgagaaaataacccgtaaagcaaagatctactgtatggtcggcgacgatctatacaagaaagcgccaaacggggtacttctcaaatgcgtctcgtccgacgacggcagacacctcctccttgatatacatgaaggcatttgtgggtcacacgccgccggtcggacattggtcgggaaagcttttcgacaagggtttttctggccaaccgtccttaaagatgcatgcgacatggtccagcgatgtgaagcctgtcaattccacagtaaacacacaaagctacccgtgcaagcgctccagactatccctcttacgtggccgttctcgtgctgggggctagatatactcggaccattcccacgaggacagggtggctacccacgggggaaatcaaggctgacaacgccatcaaattcatcaaggggatattttgcagatacggactaccgcaccgcatcataaccgacaacggctcccagttcatcagcgctgacttccaggattactgcatcgggctgggagtcaagatatgcttcgcctcgttctctcaccctcaaagcaacagacaagtcgagagggcaaacgatatagtactacaagggatcaaaacccgcgtctacgacaggctcatgtcacatgacaaaaaatgggtcgaagaactcccatcagtactatgggtcgtacacaccactccgacgacgtccaactaggaaacacccttcttcctcgtgtacggctcggaggccatactccctagcgagctacgacatcagagtacacgagtacagaagcattccgatgaggaccaggaggagcaacgaaacgtcaatgtaaatctactcgaggaacatcgcgaacgagttgccattcgagcagccagctatcaacaggccctccgccgttaccacgagaagcgcatccgagcacgcatactttcgatcggcgactacgtcctccgacgggttcaaagccaagcagggcgaaacaaactctcacccaaatgggaaggaccttacacgatcacacaagtcttgcggccaggcgcattcaaaattgcagacggcgagggtcgcaagttagcaaattcttggaacattgaccaactacgtaaattctatgtatgagtcaataccatccgtacctgtaagacaccttacagtatcaataaagcctattcttaggcccatattagaatcaaagtgttcccgcccgatgatcccttaccctgatgacacctagcgttgaaacctatccttatgtccctttacgccgtcttgacaaggcctccgaggaacccaagggatcttcggctggggacgcccagagccgataaggccttgtcagatcctgtagagacgaaagaccatgtaagatctggtcatgtaagagttctcgccatgcatattaaccaagccgcgaaatcggaaattaactttccaacttcacggctgggggctaggatcagagcttattcaaccaaggcaggtcaaaggtccaagagccttatcctccgagaaaatccctcagacgacaaggctgggggctagggagagtgtacgactcaaacgactgattaaagtcgtgaactgagaacacactcttacacatgacatccggagtaagaaagatttgttaaagatagatttcttttctattttacaaaatacttcttacagtttttacacaaatccaaagctatattacacctttttcctgagatatctatcacagggtacgaagactaccaagaaggccaacgccaatccatagactggaatatcttctccgccaacggcgccatcgacctcgccaggtggtctatctctgccggagtcctccgagaacgagcaaagccctcacggagaaaatcgaggtccaggcgcgggcgatgatctcgtagacaagccaacacgtgccctccggcatatcggctcgatcgacgacattcctgcttcaaggcctcgtcgatacacttgccgacgccatcaagttgagcacaggctccgttcagccacgagatgtacccagccgcggactcctcgggatccccacgaggtactcgaagctctctacaaaccttggccatggatgtgcagcaactcttcaagtacgagttgaaccacacctcgcgacctcggagcgtttccacagcctgctttttcttcactacaaccatagttctctcgagttccgctacttcaaattttgtcttccaatattggatacgacgatcttggccagcaagagcactctcgagatctgctcagtgtgggaacgactaagtcaggctacacgcctcttccgagaacataggtgatctagtcagaggcgcaaaaagggatgaatggatcactaacctaaggaagtggtcgccatctccgtccccgaggcaagggtttggtctacattgtcgggcgatgcatgttggtcaaacgtgagagccggaataatcgccggtgactcgggttgcccatgctgctggacatcctcgtcatcaacatctctacaagggacaaaaagctttcaagatcaacatgcaagagtaagctagaataataactgctcgcacaaaggcggttaagatccagttttacacagcatatctagggagtacaagaggccccactcttcaaaaagggggagaacagattcccccaggtcaccgacttcttccatcatctccttacgcgtgttgctagccgccccctgatccaagatctcgcgcagatcgagttcaggatgcgccagctttacacacgcaaggacgtggcacgccccggtgtagatcccgttcgatgtctcctccccgatcctagccgcatgcttggaggggatctcctccatcgccgccgccagctccgcaagagaagatgtcaacgagaactcgtcgggattcgccgggatagtagacttaatgccacactccccggcgagctggtgcagaccagtataggtgacccgcaatgagccacggattttcgacagattgttcccaagctctgacatgcggtgctcgagcccctgccgttgtcgctcgttgccggccaccaactccctcatcttcttgaggtcctcacgagcctccgacaactcgtgtgccaatcggtcagcccgcttgtttgccgacgacgccgccgaccttgcctccacaatctcgtgaccgatgccgcgagcaccagcctcgaggaggcgccccatctcaacctagagctcctcccaggtgaggacggtagccggtggaccacggccagccgcgggatcgttgactgggccgcttggtgtcacctcgcggcccccgggtgcgagcatgacatccgacgaggccgcagcgggcgacgtgccggaggtccctccggacttgtcttgcccagccttcgcccgcgccgccctatgagacgggcatggttcagacaacactcgaataaaatcacagaaacttaagttcatcaacttacttctcgccaaccgtcacaaggcgttgtcgtcgtggaggcgggagagacgtgtccgaggcctgaaaaatggtcgatgcgaagtaaggcgaaattcttctggctgtacgatttgacgacaggatagcttaccgagggggttgatgccttgcgacgatgtccgctcacagaggagaacttcctcccctttgtcggaacattgccaccacttgtagtagcagcagcagcatcagacgcctccttggcgaccttctctttcagagacgccgccacctgatggtccgcgagcggctcgatgatgtcagtcagatgaagggcctacgcttaatcaagtcacgatgtgatctcggaaggaaaacgtagaatgcctatcgggtacacttacattgatggcagcatcacgttcagccgcacctttctcacaaaagggaacggggatggtactcgccgttgtcggaccactgatcatcacttggccaacacgacgttccacagctttgctgttcagacctgtgaatcgagaccaaattttgataaatcaagaggaacacgaacatgagcatgtctggataaatgcgagaaagataccccgaggagaaacccgggtcgcatcctccggtccggaataatcaaaggctggatgtgcccgagcctggagcggctggatccgcctaccaacgaagtctgcagcgacttcataccccgacaagcctcgtactcggagatcgtcgataatgtcgataaacgactggagagagggggtcaaagggggctttgcggtccaagacgaaatcttgtccggttgttctttgggaacaacgaagacagggtccgaatctttgatctgaaggtagaaccacctagtccgccatttgttgcgagaagaagggcactggaaggggatataacgcgacttcaggccatcccgaagtcggaacccgacgcaaccagacaccctgttggactccatccaacgcagctcgtagtagaagcgaaagagatcaagaaagggctctaccccaatgtaggcctcacaaagatgagaaaagatgctaaggaaggcgatagagttggggttcaaatggagaagagaaagaccgtagaagttcaaaaccaagagaagaaattcggaaggcacaaggagaaaaccgcagagaatatagtcttcgatcgcaaccatgcgacctaagacgggctggggattagtacctcctgcttccctttccatggttccgcgaccaggaagggcgccgtcttcctgaagcttcttcagtgacacactggtggaggatgatttgccgagatccatcgttgatcggagatcgccagagaaagggctcaggtcgatgaactagggtttcttgtggcagcggagaagacgaagagcgcttacaggcgggatgttttcttcacaataggcggacttcaaaatggatccccaaaattcctttaaatagacacacttccgacggtacgacttccaaggaaaggggagagatgcccgccggagatttctggatccgttacgcgcggcagttttttggacttcagtttaaattcactcgtgaccgttgggcttcacacggtgttctcgactacgtcctgtctctatggtcctcacaccgggaacgacaacagtctcgacacaacaagtcgcgaatggttacacgagttcatttaagcagaagtcgggggctactgtcagggttatgggttaggcataccctttacccttcgatatatgttacatatcggcatggcatacccacgcgcatacggatacttcccgcgtacactaaggaaatcattcacgaagtctacggatgggaagagtcttactcggacaagactgggtcatcaatgtatcgtatagggtctgttatctccgagttctacttggaaaccgcctgacctgcgatataaaagggaccccccagggaggacctggggcatcgaatctcagagccaacacgaccctcacagcctacgaagtcggagcccgcaaggagccaagtcgccggggatctagtcgaaccaactcgaccacgatctcgccggatccgtcaagttccattgttccctttgtaacttgtgttttccactatataatcccacatcaactagattatggctattacctaccaaggggtctgaaccagtataatcctcgtcttttgtctgcttgatgtcgtattacgtagattcttgtaccaacgtaccccaataccctctatatccggtctacgggtaccacccgttgacaggctgcatgtgcatcgagaaatgtaaatattaatgaatcgcttgtttacgaggaatgactagtggcatgtttaaatggatgataagtagaattacttatccttggtctatgtgccaagatgaaatatgactatcaaaagtagatagagggagtatttaattgatagtactgtgtacatataggagtttatctttttgaggggcaaggcaaaaaagggtaggatgtagagtttgatcggccaaccggcctatttaaccagtctcgttatcatggagacaacaggcactttacgctgttgctgcgcacttgatcgatatgcatttatagtttgtactcactatcttttagaacttaatatatataaatgtgtcatattatcatccactaataattatgattagagtattttaaatttcatagaaacatggcatatcattcataattttgttgtacttttaaacctcagtatataagcaatgtcaaatcatcatctccacatcatttttacattatttaaatacatacatttatcatttctataatatataacctatatttatccatatatcgtaacaagtgcgaggtatcaactagtaatttttcaacttcttgtgtcgatcaagcgagcaagtgataaattaaagagggtggaccagcatgcatatatttatataaataggaactagcatttatatttcgatgttaatgcatagcaacacagttagactggatagacattaggtaaagtcttcaaattaatgtaactttcactaaaaaaatgattttccatggcaatttcctttcatttttttcagatggactaaaaatagtcttgacagtgaaaaacacgttcacttttactagcggacgacataagcatcggctagtgaaaatcgatttttactggcgtgcgtttaagacgtccgtttgtgaaaatcaattttagaaaaatatgcatttgtacctaactttttcctaaaaagtcaaatgaaaataaaatttataccaaacttgtagatctagtattcgttataagattcaagatctattttacaacatttcagatatatgatttaaataacctttgatggacacatgatctgtaccaaagttatagagctctacgaaatctacaactttgtagttcatgaatttttttatttgaaatcatttagagagacaaataagtattttaagtttcgaacaatgaaaatcaaaacaatagcattctgaataagtgcttcatggtgagatggtaatgtaatacatatgcgtagagagaggtctttgagtttgaatcctatacaaaccacatacctgcgaatttaatctgaaaagttgcctaaattatcaattaggatgcttagttgtgttatatgcctagtaaaaatcaaaatattttttgattttatttttgctgattttcactagatgtcggatgcagtcagtaaagatcgttgatttggactaacttctaattgcttgctgaacgtctagccgctaggaaatataggttttagccgccagaaaaaaatgttttttatagtgtctgacccataatactctctccatctcattttaacctcagccatggttttccgcgcccaaatttgatcgtccgtcttatttaaattttttttaaaaaaattaaaaacataagtcacgagaaaagtaatattcatgtttttatcatctcataaaaaatattaattataaaaaattttcaaataagatggacgatcaaagttggacacgaaaactcatgattgcacttaaagcaaggttaatagtatagccaactactagctccaaatcatctatagccaatttaatagctaattcatacaatagttgcttactatactattaatacctggtcccatctgtcatacacgtacacattatgtcttgaaatccgtgctgcagctggctacatatctatagcccgctgctcttctatcttctcttttatctttttaaaatatgtttatagttagcttataatatgctattatacctgctcttaaaatgggactgagggagtatatttataaaaccattaacattatactaatataatatgaagaaacgtgaggcaaatgaaacaatagtactactactagctagtacacgtactgcatgcagcagtgttggtcgttggttccatatatttcttggcatgcaacgatcgaatccgatccgagaaaaagctactactgtcctgtgctgtctgcagctttgttcacttgtcacatcgattgatcgtcccagctgccgacctcgcgatctgcaatttacacagtacagcgatggatcgatgcattcatcgatcgatcaaaccgttaattacctacagaaccaacgtaccagaaggcttgctagctagctgcagcttaattaattcactgtattactacatgtgtgttactttctcgatcagcttcttgcttcgtacgtgcttccatctccaccacaaatttctctgctatatatagcttgctttctgcggctgcatccaccggagaaaacgacgtatatatacagccagccgacttaattagttttcggtcaatagttctataagctagtaatatataatatctcatttaatcctaatactatacatatgttgatgtactacatatatactgcctccatctcgtataatagctacttctaacatttaaattttgcctcaaaatatatacattacctagctacttctccaactatattatctcaaccaataatcacagcatctctcatcatctaattattccacctactttctttattatctcaaccgatcatgatcattaatttcacggtgttccttaacctctctaaaaaaaattcaaaagtattactgtagtgctatactctctttttttttagtaatataattgtttttgttacatcaaggctttgactaataactattttgcagtttctaaaaacaacaatcgttttacatttatttcacgttttcatatccattggttatttgtaaaattttcttaataggaataaaattcatcctttcatttaatatatcacttgccctttcaaactcagtcacattagatagaaattacgaataataaatttggcaccctaccttatttattgatatgaatatgagcacaccaaccttattcttaaatttgtaccatgtgtgaaatcaaacttaaacatattttaaacattggtacttcacaaaaaaaaatgtgctgtagatttaaataaaagattgcacatttacttttcggggtgtgcgtgtgtgcgcgatcagatttgaacctctgtatttatggcttggtatgtgatttgacaatttgaatttagagtattaaatataattggcatgttatattttaaatttgtatggcataaatatgtgatatcattttaggaattacgacgcttaccttattaaacgttatgaattttaatgacactttaaagaatattaattctttccttattatgagatcctacccagaacaaggtaatataccattggattctagtctaatggacagtgaaaacatttggagcaccttaaaaaaaattccattgtttttttatataaaaacaattattgtaagtaagcaattttaacatgtatctttaattttgtgttaaatatatatatcttgctagagtaattattgtcaaagtcttgccctaacaaaacaaaataatacacaatatattttttaacgaaaggagcatatagaatggctaacgcatgccacactgggaatatggaagaattaatccgatttgggatgaattgattattctcgatcgtccctaagaaattccagtaccggcatatatatagtggcattcgttcttgtataccaaacaagtaattattaacttgcaattcaatcaacaaaagattctggtacataattaattgacacatttaactaaagaaaaataacagcccccaagtccaacttttgaatgatgtgtaattgccctcgagaacatttttatatcgataaattagttatagctaggtctcgatgaaatgctagcttaattcagcttgcatatatagaagcataaccacacttacttaaattatcttgcttggaccaaccaacaaaacaataagagggttgagggttgaaagtttttttttcagaaaaaaatattacatacatgaattatctacccaatccatgtatatatatatatatatatatatatatatatatattctcaaagatggggggctgtacaatatctatatatatgtctatatgagcatattaaagcattaaagcattttctttttggggtaaacctcgagaaggaggacagggagttcatgttttatattaggaagaaaaaggagttggcctagtttatcatgggccaaaaaaccaaacaaccatacgattaattgatgaaaaatcggcaaataaaaacccaactctatcagcacataatactggtggaaaaaccatttttggtcggtcggccaaaatacacaatattcccggttgcaataaaaaccgggactaaagatatctttagtcccggttcaaaaggttagagttttttttttatctttagtcccggttggtattaccaaccggaacaaaagatctatttttagtcccggttggtaacaccaaccggaacaaaagatccctattatctttagtcaccaacaccaaccgggactaaagatctatttacagtcccggttggtgttaccaaccggaataaaagatcggcatgcgcaacatgggcggcggagagtacgaggccagatcgaggaggaggaggagcagttaatatattctatctcctcactggccttatctcttcctccatatctcttcctccatatctcttcctcttcctcctcctctccttttaacttctctcctctaactcctcttctccttttcctctttctcctctatgagcgccggcgagtggagggcctggtggccggccgcgt

SEQ ID NO: 7210 - DNA, 79148 bp, Oryza sativa
  unsure (1)..(79148): unsure at all n locations
atatacacccactctgtatggcttcatttacagctactaactagattgtggaacagaacatttgacttgcacctcagcttcctcctcctctgctgcaggcaaacacttctcatgcgggcacggcctggcgaagaatttggggatcctgtccccaggcataataacgggcaaaccacactctttctctgctttctcgttctgcaaacaacaatacatggggatcattcttagatttctgtaagtctacaagaaacgatcatttcaggttaagatcaaagtaagatatgaatagggatcgttagtactgtagtaccttgtgatcagatgttgtcttgctcggagacgcaatggagatgacggtgtgctggccttcttggagtatcacatcaggatgccgagaccagaggaaggcacggagcttgtcccagtggtagcaacatgagaagatgccactgagggagaagataacaaagatcaggagcgccgtccctaggggaaaacccagagttggccttgaggaatgtgccattggaatcgtcatggatggagcaggcgtcagatctccaagcttatacatatgcatcagttggctcctgctcatttggttaagagcccagacttgcaaggtaaggagactgggtatttatacttgcagccagggcaccttgcacggacagaggatgatgagaagtggactggcttgcacggccaggaagacggaaccatccgtggtactggctagtgctgtggcccacatgcatctgctggtgcccgctggtagtgcttgatgctgatctcactgcctgtcttttccaagaaaaagaagctgtttaaattatatgaacacatagctttatagggtgggagaaaaggtaatgaatttcacttcggacaaaaactacaggtatgttcacaagcaaatgtttattaggcaaaggatgatgaaatgatttactgatgtactgaaatgttcagcttcagaaggacaaaaacatatcagcctagcagggcagcaggttggcaatgaaacactccatgcggattttctaaggaaaaaaaattactgagactcagagtttacagctttaaccgagtaaagaggaatcagaaagtgggctcaaaaagattgacatacaacatgaacctactatgcaagagcacataggagatgaacatgcatcactttatctaagtgttcttcatcattcaccttttgaatactatatgcttttcaatagataaagtgccaacagattgagtatcctggacgaaatccacacttgtgtacggatgccacacatgtcaacttatcaggaaaatgtggctgctcttgtgatgtcaaaaaaaatgtgactgctgaccataactgtattaagcctggaagctagcctaaataagggaaacttcactctatggtgtaccaagtgccatgaacaagtttttttcagtcataataggacactgcaacacattagaatgacccaacagctttacaattctacacaagaagcaaaccgccgggagcaaaagaattgtaatcataaataaatccgtagttagcaaatagatcagcacaaggcaactagttcttaggtccagtctttcctatccaaaacggtgtgtcaagcatgttttcaattcaaccaatagttactaatatgttagctagctaggttcaactttggcatcagttgagctgcatgagcaatccaattcacctgtttcccacttggaggttcccacatgcataaataataacagagataaacaactttaatgatcgcactacatcctgtcggaaaaattgttatgcacattggtgggctcgcttcctggtttttcttcaatggttcgtggcctagtatatcgaatctggaacatacactcaccacatgtttgtagaagcagatcgaggaatttggtacagaaaaagatactgatgggaacaagcaaatttagtgatcaaaacaagcacgatgtatcgagaggtctatgaaattagtatcagacagaaaatgtgtacggtggaagaaaattgtgtgggtagctatagcagatacatatatgatttacagattctgctccaattcatgaaggaaacataatataatcgtgtgggtagctaaatacccttagcagttagcagcatcacaattttaggctctctagtgcagaagttgaacaatacatgttggataaattaggtttatagaattacttccacatcatccagccaatatgccactgtactgggacctagcaccactagcaatagtgatgcaccctaggctcctaacccacctacaaggctacaacgaagctatttgagagggacctctccggtaagactttaggtaagtgctcttccatattattacagaacacacaagaaaactgtactgctcaccatcagtcatggtctggtaaatcaggcgtcagatcccaaatgttacacgacacagtgagtagtacataatccattctacaaaattacaatcatggataaacttcatatttataatgtaactgcaaaacttagctgtactcatccatcatttgtacgcctcaactgaagtaacctgacggtaatcagttccaactattggaactttgcaatttatctagatgctcttcaatatttgtattcactttgtctgattatgtaaaaagacaaaaaacattttgctataagtgattgatcatactaactcttgtcaagctttcagggtagagactggaaacaactgatttccctccgccaaaacaaaatgcggtaataatatatggtgaaattgtttattacagacatactgaaaatggatatttagatttgcacgaagtttagctgaggaataacatctctaatgcatagtattaatgaactcacactactcgtgcaaaataaggacttgatattttcaagcccaaggcactgtaccgactgatctaatggaagcataacaggggctgacacctttataaaataatattttttgatcactagatgagatggagaaaaagaatacatgaaagatattaaggatcttgcttagtgcaattttctaatgagacatgctttttgtaaaggtgcattaaagtaagcatcatatgaaccaggaaaagaaataactaggggaagggcccttaaaaggctaaaaaggtagttcagaagtccagaaactggccaaatcatatcaatctaacttcacaataaacaagcacaaaaaatttagaggaaaaatagaagcagtaaccttagtgatcttttaatgagtggcttaactgaaatgtaaagaacatgtaaactaattgtaacgcaatcttaaagcaagtgaaattaaagaacagggccacaggaaagggcgtgtgatttttcctttgttaatgcaaatgatattttccaaacaaaaccatagctgtcagcacaaattcctgacttcccaacattaccatggggaaatttgatgttctgctggatgtacagttaacattcacccaacactatgtttctgttacttttgctattttgcagttagttttgatttaaatatgacacaattgtgataaatagagttaggaacctgacccaagtaaaatgtgttctacatagtggcatgtctcagatacctttcatggatacgaaacgatttgaatatcttgataaaattttcttgtgagtctgtgatgcagttctcaaagtgtgtttcccctttcagaacagttcactgcagcaaacagaacagtcagttaattcatgctttgggtgataataaagctgtaatggtcatataggcaactgggcattgcaaaaggaattcattggaaatgatgctagcaccttgacttgcaatgtatcatccaactgcttccaggcaatctccgcacacctcgctgctccatctcccttctcacctgttctgccttgtcatgcatacccatgcctgaatagatgttcgcaagtgaaacaaagttacctgcattctccggttcaatctcaaacaatgctctccctgcaacctctgccaaccccacctccccatatttcctgcaagcagcaagaagagcaccccaggctttcgcagtaaccttaactggcattgtctgtataacatcataagcttggcgtagtcttcctgcccggcccaagacatcaaccaagcatgaatagtgatctccacaggcctcgaccccaaatattttggttagaacatcgaaatacttcaatgcatcatctgcgtgaccagcatggccgcaagcctttaatacgccaaggaacattatgccatcaggccggacattgtccagctccatatgcctgaaaagcgacattgcaacatctgcgtggccatggaatgcatatgctgatacaatagagctccagacaaccacatcgcgctcctgcacctggtcaaacacgttccgtgcgccagccagagaaccacatcgcccgtatgcttcaatgagggagcttcctaggtggcagctcgcaaacatgccgtgccgcgtagcaaaaccgtgaacctccttgattgagctcaacgcacccagcgccgtgcacgaggggacgagcgccagcagagtaatgaggctcgggagaacgcccattctctgcatccgtcggtagagatcgatggcccgggccggatgttccccggactcagcaaccgcggcgatcacagagttgaagcaggaggcggtcggcgccacatccatgagatcgagctcacgcagcgcccccgcgaggtcgcccgatcggatgtggacggagatcatggcgctacagacgatggcgttgcggtggggcaattcgtcgaacaggcggcgggcgagggcgggggaggcgcatgcgccgtaggaggcgacgagcgcggaggcgaagaatggactggagaggaagccacacttggcggcgagggcgtggagggagtctgcggcggccgccgctgaggggaggcggagggcggaagaggacttgagggccagcgggaaggcgtangccaaggaggggtcggagagcggccggagggaggggtccgagaccatgctggagaagaaggcgagagcatcccggtgacggccgacgttgacctgggaagtgagcaacttcgtcagcgacgccaggcgttggtggcgggaatgcatcgatcgccgcctggtattccaaagctccacgaagactgaccgcgagcgaggtgatttgaattgaaccggagcaagtcaagacggggaagatgcaacaggggaccgatctcctgatactgcatctaaatatatgaggccctacatatatagttttgtgataattttaaaatataatattttaaatccgtattttttttatatattttgatcaatgtacatgtatatgtagttttgtaaaattcactctttattattccatctggctataaacattttatatttagaacaagatttatgttttaagacaggatttgatcaaatggggtagttgatgatatacccacaaacacttctttcagtgcgagactgcgccgcgtaacccgcgctgcttatcgtacttcagctctgtggcacgcttatgaattgatctgttgcattcaagtaaaattgatctgttgtattcaagtcaaatcggtgaaatgtatttggggacgatttggtaactagtggttgtcttttgtaatatatatccaacagctaatatctcctagcaatcaatattatcatgtacacgtgatattttacattaatagctttctatgtaatttgcaagaatcattactcgcatgtacttgcaatattttgttatgaatatcattgcacgtaacttattttatccactcatgttttttttttaaaaaaaaatactttgacggatagctgtacatttcgagggtcatcttcgaccaatattcttcaaacccaaacagtatataaaacattctaacatttctgataccataaatcgcaaggacaaacatcacaacgattgatacagttatcgttaccaatagactaccacattgaaaagtatcccggtcagatgtcaatcgtcgcaaaaaggatcagtttctgcaaccaaggatggcggcattgtccagccggttgaaactcgtaaaccatttccttcacccttcgtgtccagttaagaaatttagctgccccagatactactaaatgctttcttatgcacaataattctctgatctatagcctgtataaatacacgggaacattgcttgtacaatttcgcaatttgaacagatgaaaaaaaaaaaagaactctcgaatcagtaactgccttcgaatggcaattgatcattgggcctgggggtctgcacccatagcaccaaaccttgctccagcgccaagcccagcattgggtggccttgccacaacaacattgtcatcagcaaatagcgccttgatgaacgaaggagtcttcaggggacgcctcccagtcatccgcgggtatacatcttccaggaagtagtacacatgcccagcaatcataccctgaaagaaacaatatttgtcaattacagatatggtccaagaagaaaacagcatattgacaattttaattcagtcaatacatcaggcattcataccgaataaggacatggctaataattcattaaaaaaatacagatgcatgaaaatgatggtcaggagagtacacaggcataaattatctctgaggaaaaagtctctgttaatacaaacaagcaaataagatccattttaagttcatgatattggcaaatacaaaccagtcagagaagacacgagccagccagcactccattaccaagttaccattaatacatgctgctatgtctaccagcatcgtcacacatagacagcaaaaagaccaatagcttatttctgttaaaaatatgctaacatgttgaaaataaagttttcagcttccatacttcaacaccaaggttaaccattgaaaatagctagtaccatctcaatgtagctagttaaacctacatcaggttatagctcactaacccagaaacatctattggcaagctgggtagaaaatgcaaaatagagcccaggttcaggcattcaaaaacaatggaacaagcttttaacacaggcttatgtcacacttgcaaataagcaatgccaaataaaagttggacagcaagatgaccaataaaaaccagtcacaggcttgtagctcatggaaaacgaaacaaacaatattcatacaaaaccatgatagaagaaataaccgttgaccatactgagcttgcaattctacaaggcattctttaactgcagcattggcagcacagacactaaaaaatcacagtgctattatgatattcatcataacgataagaaacataccagcaaatcaacccatgtactgcttcccacaagaatagagaaccccagaaggacctgcaatttaaaagagaacaattcacgcagctgtttctcatctctgatataaagttgaataaactttgaacaatttcagtgaaatttcatctgtgtgatatcaggtgaaaaagtaaaatcaaggatcactacaaagcaaaaacaagatcagagccactagagtttctgtttctctactttgtaataatacattctgacaatgaaatatgtgcgcgatgcaaaaggatgtccaggagttggttgacaaaaccttttcagcgtacattgtcacagccagtttatgttgaaggcttagcaaatccaaaaggcattctgtaaagagagcacatttacatttgctaattccccattttactttatcacacagtactgaatacagaaatttattcccactctagtgaggtactcccctcatttcaaattgcttgccgttctagctttgtcctaaatcaaatgtttatatgaacatcaacttgtagaaattcatatagtttaacatcataaggtttatgtttttagattcaccatgagaaatacttccataatatatattgcatgttaacctacacgaatttccaaaaatggatggtgaaaaatagaaatgtttgactagtggcaaagctagaacgacaagtaatttgaaatggagggagcattcatttttaagatgaacctagacctactggaacaacaaattggctccatggtaaaggaaaggtctagcattttacaccaagttcctgtgacgtttttacacactaaatagaccattcttgcaccaaaacataaagttactactacttcatgttgtgaaatagtgagagcattcatcacaaaacaaaccaacagaaaagcatttgttgggtaatgcttaggacaaatggacaactgttgggaaaaaaaatggtttgcttttgggctcttggctaataggggaaaaaatcaaacatatattttgctctacaaacaaagaaaaatattgaaattgaagaggttttaaataattctattgcataaaacatatgaaatcaattacagatttcaaatcgtgtgatttaacattcaggcatgaaaaaaatgattatatgaagaggctctaggaagttaacttaagatgagaatcaagtgtgcattagtcatgtagtcatgttgtggtacatggaaaggaaactaaaaatacttacccaaggtaaataagcagcagtaaaggtgaacaaacccaagaagctcatatgaatgaagggattgtgcttgctccatacataaacctgcaggtccatacgagaggaattactaaaactcaacttctaagtatgcacccaagaagactattttcagagcccagaaaatccctaagatttgtcctgcacccctaacgatggtgtagaaaaccaaaaaccaagtataatgcttgtactaatctcgtaccatcataaatgtcaatgaattgctcaagaacaggattctggcaaatgtctcagaaatataaggtatcatcccaccaatcagaacaatgccagtcaggacagtagcgccaaacaagagcatgtagaaaaagtcagcagttcttcctctgaatgagttctcctcaagaagcttgcagtatcgtgcaagaaaaaacatgtggaacagaaagtccaaatctggaaacaacaaaagatggattcaggaataagagtaaagggattaaattatgcataaaaattattcaataatgctagaataacagcgcttacatgttctacttataatgcaatacatacgcaacacacgtgtagcgaactaataatatacaagcacttccatggtgtcacatgaggacacataaattagcacgataacataaatctatatccgctgttaacttataatggtaactggagacgtggtaagatgttagatataattttctaaatgcgctatacatcaggatcatacaattaggggaacaaaatacagggtagacacaattaattcaatgaaaacaaacaaggaccttgagtgggtgggtataaggagctttcacacattatgagtttgaaatacattgtgatcataattaaagagttgcaaattgtataccacttgataagttctttgacgaggtcccacctaaactcctaatgcagcccaaaggcacttatccctaatcaataccacaggttgaagctgtccaacaaggacgctaaagagcgagtttaatagtagaggtaactgatgcctctatttttgcccacattatctactcatcgattaggacaataccaattttattttatttgtttgatatcaatctattggttatcttcctattccctctcttggtgatggagcacatgtacaggccgtcttttgcatgaggggcagctccttttcttctccacctcataatgagcactcttggcactagcgctttataccttactggacattctgtaagtagccgtaggcgcataagccttcatcaatgagtcatgggcagaacaacacttccgttctagcttcacgtccgaaagaatcacacctctgaaatgataccctcagaatacaataatagaattatcattaggactcttattgggccgccttttttaaagcccccccttttaaaaatttggggcccccaaaaaaacccggttgggttaaaaaaaattacgattgggatccgcacaaatagtaaatataagtagatactgtttgtaaactgacaatcttgcaagtgtaagagaaaggtaagaggcgcatacccatcttacggaagtagaggaagttggtgacgaggcgccagatctcgtagtgctgcaccaccagcttggggttcagatacaggtggtagggcgaaatgatctgcgaggcaaggagggcattaggccatcagcgcaggcactcaaacaagcaccagatcgaggagagagtagaatcatgtaaagaggggcgggcggagagagagagagagagagagagacctcgagggtgcagccgacggtggtgacaacggcggcggtgaggtaggagcgcgtgatgatgggcatctgccggtaccactcctccaccgcctgcgccatctcccgcgaaaccctagcgggcgagctctcctctctcgagtctcgagtaaaccctaattgacccgaatcgaatcgccgatgagatgttggcagcggaagggggaaggggatggatggagatggagatgggtcgcaaactcgcaacggaaagctgcgtgcattggtgtctccggtggctgcgtgccttcctgcctgcctgcgtgtcactgacatgtgggggccacgagtcggtcgcattgacgtggtgtgttccagtaggatagcgacacgtcagcgcacacgttgcaacgcgccatgtttcgttgacaattcaaatctgacctggtatgtactcctatgttgttgtagtatgttgttggtcaagccagggattacaagtggtcatatagaaaaaaataaaacgtggatgttaattatatgtggttgttccttctctataatagatactccctccgtttcataatataaatcattctagtattgcccatattcatatagatgttaatgatatatatatatatgtctggattcaataacatctacttcctccgtttcatattatactagtaagactttttagcatatgtctagatttattgacatatatatatatgtgcctagattcattaacatctatatgaatatggacaatgctagaaagtcttataatatgaaacggagggagtatatgaatatgggcaatgttaaaatgacttacattatgaaacggaggaatcatattgtattgttttggtgtaagtatgcaattggttatacggagtatatggaaaaactaaagtaacacttacaatctactcctgtattttcttactagcttaacaacttaactactccctacattttttatttatatgacattgtttaggccctatttatttcagcttagaattattataatctgaattattagcaataatctgaaacaatcatgtagatcattataataatctataagctagattagtataatatgataatctcctctaaacgtgcttctttcaaattagtaggtggctaaagacccactaatcttaaaatttgtatgcaaattacccaccacttccatcgaacccaatagattgagtacatccgcttcctctctccacagtgcaggcgaatccggcgcctcccccagccgcgcatgcatccgcttcctctctccctagtcgcgcgcgaacccttccccaagccgtatcgtcatcgccgccatttcatccttctcccactccacaatagcttagggtattagagacatcagcctttcgaaaccaataatatatgtctctaataatccaaagaaacaaacagctaataacttattttattataacttattataatccagcttaataatctggattgcaataatgtttagttattaaaaaaaagggtagtacgcactggaaaaatttgagactcaagtgaagttgttgaaagaagatcgaacgttagaaaaagaattatgtcgtgatacagtgatttgttctttaatgagaaaaggttagaatctttaatacctgcaatgcacgttcttatctttatcgtggagacgtaaataattactactacaatacattttaattgaaacagaataaaacaagctcgatgatacaaatcaataaaatagtaacctaatgatatgacatgcgattttattgacaaatttattatcaccactcgtaagagtggtaaatagttaattattccaatgagagttgggttcttctttgtatggcagggagaaagaaaaaagataaatgagtaattttacactcaagacatgactaatgggttagggaaataatttcctagctaaaaatacttatatttttaagacggagatagtacctcatttcatctcagtttttcattcatttacatttctcaatcaggcttctcatgatccattatccacacatactgcggtgacgtggcttccgtagatttaaaaaatgacacacgagcaataaccccaatatttgggaaaagccttctcttcaatgataaaaagatggaaatgatccaggaggatgacatttgcaaatacgtgaaccggatgagtcaaaaacccaacagagactggaatcagttgagtttcagcatcagcgcccccaaaccaaataattttgaactctccggactccggccgccgccttccagaggaacctcgcggctgccggtgccggtgccggagaagacatggccgggaagaagaaggccctaacaaatcccgcctctccctccgcctccgcctccgcttccacccctaagaaatccaccgccacctccaaggaccgctccacgccgaaaccccgcaaaaaccccaaccccaaggaggaggcaccaccgccgccgcccgccaacaacaagcgcctcaacccccaagggggatccaaccgtaagaagaaggccgatgcggggacgccctccaagaagccgaagcgccagccgccggagcccaaacctcggaagcacaagggggccaagagcgagaagccgcaccgggtttccggcgaaggggagaagcccacgcccacgaagaagaagaagaagaaggagagcagcaaggagcccaagcgcgagaagcagcaagcgtccgcgcctatgtcgactccctcgaagaagaacaaggaagccaaacgcgacacaggaggagcggggaagcccacgcccaccaagaggaagctcggcgacgtggatcccccacaggagcgaccgtccggtgaaggccaggcaagctctcccacgcccgccaagaagcggaaggacaaggcggcggcggcggaggcggttgccgaccacggcgccggcagcttcccgatggctcgggtgcggcagataatgcgggccgaggacgccaccatccgcccctccaatgaggctgtcttcctcatcaacaaggccaccgtatggttctttccttccttcccacattctttcacttaactcgcatttggttaatgaaacttagtttatgcaatgatttgtgatggcaattagcaatcgaggattggagcttctccatcctaatgtgatgatttgggttggactggaatctagttaacctaatgagatttaggtcggcgttgctgtgatcgcccacaaggtgtttgatgaattgtctgatatgatcacagatcacgaatggtgttttctacctccaaatggtagatgttacaggttgtctcagaagtccaaagcttgatttctctgcttctgctgccatcaaacttttggcaggagggtttatgcacgattgttttatgtttgtatttgttggtaactcgctaaaatgttgctgttctctgatgcattaggcatatgttactggtttatggcatactggcaatgagaatattatagagggcatattaagatagaatctgaagaatatattttcatgatttacctagttattctgtcagattactgtgatattcattacggaccagtgtttcattattttttccattcctcgtccaaagctgatttggttaatgttatatcgctcacttgaacctgtaaatctgtaactgcaggagatattcttgaagaggtttgcagacgatgcttatcgaaatgctttgaaggatcggaagaagtcaattgtgtatgataacctttgtaagttgcacattcattcccattcacttcaaaactttctttgttgctatgttgaaaatgcactttgtatagaaaagctaagggatctgcatttattaagattggaaaaaaatgtttgaaacattcaaacagtacatagaaaaatgagaaatctcagataggtgaaagagggtttccctattctactaatgtaccagcacgtcatcatcaagtttcaaaacaacacaatttgtggaaactgtatgctgtctcattagaattttttttagtgaaatataaactacacatgtcctgaggttgttacttttagtgttcatattttcattttcaatctctcaagagatgaagaaccttccaagattgcaatgatagtctggtagttatcccatctataggtagatgatatttccatttctgcagacaggtttgtcaagccaggagagaaagagcagttagtatatagctatagtaggaccattgtgtgtaagagggcaactgcatttagttgcgattcagcttatcaatgccccaatatcactggctggatagattccattgacaagagccaaaagataaatactctctcaaagattgggtacagatgttgagtcctacaagttgcaacatcaaatggttacatacataggatattttgttatggtcttgtcaatattcttgcctgtcccccctttttcttgataaaatgtgtccacctatcaatctaatgatcataactttactcatagcacacacatttctgtgatgttggcatatatatatatatatataaaactaatgcatttgtgcagtgatgaaacatttttatttctatacaagccagtgtaacatgtactgatattttttagactgtccaacaaagatagttgaagtccactcatgttctgaaactggacagaggggaatcaatcccatcgagaggctctcttcctccttttttctgaatctgtgagagaggcaaatgagaagttcagagagacctcaactcttctgcatttctctgtcagtagtgataataacttattaagttgatcaaattagggatttcactttcagtacagatgttgcattacttgcatctcaaatatcattttttgagccatattttttgacattggcctttgatatatgccccagcttcttttttttttctctcaatgatgcagactttcagaggtcataggataaattctttataaccagtgacctacaaaataacctcaggaattcatatacttaaacgtctatgctttgcctacttgcaccttttttttttttttggggggggggtgtgcaaatgttccaacttcctgacagagttatcgtgtaaaattgactcaggaaaaacaatcataaaacatgtttcttatgatctgtgatggcaagatcagcatccaacatgtgaatagctttaacatctttcatctcaactcatagacatacactttttgtggatgggctcatctctgaattgcaattaaagttcattgatcctgtcttccgtgaggttgaagatatagttaatgttctatttcttttgtccttttatttttctttatctcacagcacatctgccttccttttcagcaacagcagtgtgcaaccagaaaagatacaagtttctctcaggtcaatatttgtcttttttacaaacccatggaagcctattttaatcagcaaaggctcttcatatgccttagccttttagcaatatcattatttacaaatcgtttctgtggtctttgctcagattttgttccacagaaagttacagctgaagatgctttgaaggctccagttagcagccaagtgaaccaaccacaataagttgctagtgctccgcgaggtatgctgctatgtttttactacttcctagcttttttaaggagcgaattactggaaattagttttccatgttgtgaaagttccagcattcagctgctccatcctgtagggaggtcatcctttcacgagttatctcctgggagggttctgcaattgtaaacgccagctgtgcagctcatgttgccctcaggactggcatcttgcgacatgttcaatatgattctgatcagaatcggaggcttaaaagaagattataaggggaaacctgagtaatctacatatgaaagaagcatgatgaaactttttgtcatgagaatcacttgaaatatgcttgcttagagcctcaaatcaggatcacctttttggctgtgtaagctgtgggttgtgtgaggtggatgtagcttaggctaaatgttactgtgtatttttttttagataatacgttactagtagtatacatttgtgagttctgacttgttcatgtactagttcattacatatattttcgcaggtgcatgctttaccaattacttgctggtgcaaatatgaatgcctagcaccatgagatgcttgtcttgcactggagtttatctcctatggaatccacgagtaggctgttatggaggatttgtatttgtaccttgtttcaaaataaataaaactagtatgagatatgatatattttagaactatgaatctgggtatgagtattataatgtataatatctcatattagatctatttattttgtaaccaagagagtgcttgctttgtttcataaaaaaaatctaattctgtataggaatctagatatagaattgtattttttttttaacggagggagcaagtgcgagcagacacggtgagtctacgagatttgtgtgtcaagtgtcaacgcatcgttgctggggctttgttcgggacgaagatccaagtatgcagtacgcgtgttcgccggtcattcgctgcacatgggctcctgacttgcttatgccgccaaagattagcaacagccaatagctagctgtaaataatgcgtaaggccaacggtaccatctgtaactttctctcactttcgttgcatctcaattctcaggaaagcaactgaccctaacgcaaacagtagtgtctttgaattggtcggtgcaactttgccacgaacaatttgctaaaaagtgctagaaaaaatgaatatacaaacgagtcagtcataagtttcagccaaacatcaatttgccaacaaattggttattatggcacatataatacttgacgtgacaaaacttcaactgcaaacctaacatgccctttgccataaatggcacagtaccgctcatgtttgaaataatcaaactgctgtctccaggccctaaattaaagctatcgttaaacatccaagtcaacctctttaatttgtcgtaacattaaaatccacgcgatcattgttttctgttctcgagcagctgctgctatagcacgagttgtaccacatgtcagtatatctgaacatatgtgtccaagggcaggtgccgaactaatgaactccggacatatgtatatgtatatatgtgttagtgaaaacacattttcttttctgttgtgtttggatgaaaaattgaaagagatacttttgttgccaagtgtctccaagcttaatttggcagaataaaaacgccaagaaagaagtccggaccaccagattaattatttgtttggtaagctttagcatcagcgcatcggctatagcattagctccactcatttgagaaaacgacgacgcattaaattagtaacagattttttttccacgtaaaataatttcggaagctagtctaacaaaaagaaattaggagtagtaataataataataagtaaagtaatctagtaacaaaattacatttgatgagcgactggccagggaggaataggttcaggtgccacattttcttctcccatcccatcatcccatggcctggcctcatgggcgcgtgatccgagaaggaaccgacggtgataaaaatattgaaatctcgcacatcccaaccaaccatgcagaggctcgcagttctggatctgaatactgttcacaccaatgcatcacggctcacagctcacttggagttggttctaatcaaaattattaggagtagcagtatatcattctactaggtatacaaaactgcgtgtatccatctccatatcactccattacgttattcctctttttttttcacagaaaaagaattttaatggtttcaacaccaagaataattaacacaagaatgaaatgaagaatctaacatctcgcggatcacaggagcaatttgaagcgcggccatggaaggcatgcatcgaatctgtgtatctgcggagctgctgcactgagacgacgaacgtatatggtggggttgtactgctgatgctactgtagatgtagatgtagtgtactactccggtgaggagctccggcgaacgatcagacgagctcgaggcgggcggagtagtcggcgtacctggaccgccggatgttggcctgccgcttcttccacacgacggcggctagacccaccaccgcggcggccgagaaggcgccgaccacgacgccggccttcttgccgccgttcaactcgtgcctctccgtctccccgtcctcctcccccgccttgtcgcccgcggtggcggcctttatctcctcggcggcgggggcaggcgacggtgttgacggcttctcctccttgtctttctccttatcgtcgtcgtcctcctcgtcgtcgccgccctgcttggccttggcggcggagggggccggcgcggacgcggcggaatgctccatgggcgacggctcgggtgccgcggaatgcgggacggggggcgagtgggagggcgcggggagaggggaggtctcaggaggcgcgggaggggagagcgcggcggcggaggaggaggcctcggaaggcggctgcgacggagcgagggcggcgtcggcggggtggaggcgctcgtctgcagccggggtggaggcggtgggcgcggacgcaggcggcagcgagatgggcgactcggcggaggcgagcagcggcgcgaggaggaggacgaggaagagcgcggcggcgcagggcaatgccgatgacgccatggcggaggcggaagcagatctgcggcgaggtggtttggttggtgacgagattggaggggttttatactcgggtcgtgaggggtggggatccctcgcttcgcttgccacgtcggcgatgcggttgcggcgggcggtagcaaaggaaagggagagagtagaagagtccaatcgccggcaacgcagtataggccggtggtacgccgttttcggcccatcttccacctctacctgccgcttgtttgtgcttcaagattcgtgcacgtggtcacactctttacttcctatatcatcatcataatgatagcagataactatatgcatcagtacgtaatttaagtgctactgtactctttttttaactcaaaacagaagccccatcaattaattctgctgtactcacggatggcacaacagtgttactctcatcagccacaacaacaaactactactactactccagtatatattggagtatactgaaacttcattttagagtttaactgaggtttttttttttcttaccatagtcttttttcaatcattgacttctaaaccatcaataacacatgtataaaagttttacacataaatataacttagttgcttcatatcttctagggcttattagccgtagctcaaactatagaagcatcatcaaattattgctgctccttagcgaacatacagacagtgctactacaacaaaatgctggcctgccagcataactgcatcatcaatgagaaaggttcatcacagttttggatggaatcatcttaacagaatttcgccctgcctaaccactaagattaaaaacaaaaataatcccagaagcgtaacaataagattgtgatgagcgacaatcagtgtagggctgtggcacgtttcttctgttgcccttttgtagcttttcccccttgtgaagcagcagccttactcagctcttctgctgctgcttcttcggatttatctgcatctgcagaatacggggaatacaggaacttctttgagttgcccgtgccaacgcagttcagcttcacgatccttctccccgtcatccatttcagcaggatcttcatgtgagtcttgctattcaggccactgataccagcatcctgttgtaacatactccaaatgagtaggggctcatgtgaaccaataattgtgttaggtatactatcttcaagtctgatgcaactttgcaatcaacatgagctgaattcgcagaatggcatcaagaaataaccaaatcccggtatactatcttcaagtctgatgccactttgcaatcaacatgagctgaattcacagaatggcatgaagaaataaccaaatcctaaactgctagttgtagattaaaaggtactgtgcagtatgtgaggatgcagactgctaatgttcccaggtgccatggaacgggcaagcagtcaggtcagccagaatggtagagcgtattagcaactgagatttagaccaactacacgtgcctcgtagagagaggcaaaaatatggcttatgttttcacttatagaaacacatggcatactcctacataagataagttgacataaaaatcactccttgaacatttatagcaccaaaggcaatgatatgcctccatttgaattcaggttatctataacaccaatacagcaccagctcattcaagcacaataggcaacataatgttgactcaatactcataagctttcctcttactttgaaaatatttgtgatataaccattgagttgaaatacattacacatggcgcctgactgaacattagcaaaagaaacctagacttatcacaaggatatactggtagatatcctagtaacagtctctgtaaatgagtgtatgacaaacactcaggcacgcacacatattgcacataaaaaaaaatccactttaaccagactgaataagctaaagaccgtgaatcaaagcacggaaaatcgcaagatgatgtggcaaaatgggttacgtggatcactggtaagcctgattcaccaaaatacttaaatgggctatgcaatagtcctaagtggacggttactctgctgatatttttatccaaatgaaagaagctagagggggtaaaaagggaggagccgctaccaatttcatagtgtaaagaacattggatcaacgaaatgagtagagcaatacttgtaggcgtctataacagttgatcttagaccttcacctactgttgatttagggggaaacgcagcaggtttgtttcactgtagaatgcacacatagccggagatttgcaccggtatctggtagactacactaaacatagagctggtgagtagtgccagtgtcagaagcaacgtaccttggcgtggttccatgtgttgccgacggtgagggggccatggtcggtgaagatctggaggaggcgaccggagatggcgacggcctcctccttgggcaccttggggttgatccgccgcacgtccaccgcccgcttccgcgagaagtgcctcttcagcacctcccacgccatccctccagctccgccgccaccgctaccgccgccgcctcctcggaggaactgcatgtcgccgccgccgccgccgccgccttggttcgctggctggggttcagttcagcttccgcagctaagcccccgtctctcccttttcacccgtaggccgtaggaaggagaagaattttggcccattagatgagatatcatatgggcccggaacaaaaaggagaagaaggcgaaggcccacgattgcagattatatgggcccagcccaagaagagaagaaggcgaaggcggcggctgggtcgggcgctccccaccatccaaccaaccaaacctctcatctctccgccgcgatggcaactgcggccgccggtggtgaccagtgaggtcgccgccggctgaagtgtggttccattcgaggtcagcaccccctttcctcttatctatctgcttctattctatatgccctcctagatgggagcgagtgaggctgggggtacttggaaacatgagcagatgagctcaattgatccgatttgattttgattgggtttattttgggttgttcgctgatggaaagaccggaattttgctcggaaccttgtgtttgcagggcagtggcctgtagcgccggccgcatatgtcagctctccgcttatgccatggagccatcaagtcgccgtgcgctcggaagcttgctgctgctgctgcgccctgcgctcggaggggaatcccggcaccccaccaaaagaagcaagcgaccttctgcttgatgcgagcttctccttccttccgcacaaattctaggtagtgttctgttcagcgtttgcaccgaaatggctagattcctgatgtgtaatgtgtcaattttgccgctgtgtgtttattaggcagtacttaagtcaatttcgtgccacaccaagtgtttggacattatacagacaattttgtgctaaaatggggatctaaagctactctttccaaattcaccgtagcagtgacctcagttagtataaagacatgcctttctctcctttttgcacctaatgtaaaaaacattgcgttttctgaacagttggctgtgttaattctatcatggaagactcaaatttaacactctctttatatgtcgtcaatcttcagatatagagttggcaccgaaccggagtcaagagtgtgaactgcggtatttcattcaggcagtttgtgttttctattgttggcatttttgtccatctttacgcttgagttaacactctttaaagtgttgccaattttttgttgatgacatgaaatgttcgaacgtataccacactgtaacaggagattacctatagcgtttgctctacttgccagttttgcttgtttgtataatgcagaaacctctttttatgcaggcagatgcaatggtccattgaggctatgaccgatgatagtgctgaccaatcaggcgacaataacactcgcctgtttagtgcaattcagtcgtttttgagcaagttatatggcaagctcaagaaactaaggaaagggctgccgctgaagatcctcttttttctcatcggattttattgtgctacggcatttgctactgtcatcgggcaaacaggtgactgggacatattgtctgctggacttgctgttgccattgtggagggtatcggggctctgatgtatagggcttcgtttgcgtttcttggtaggataaggaagatgattaccatattcaattactggaaagctggccttacacttggattgttcctggattcttttaagtatgaagtggatgaatttcttgaatcctgtaatccattcaacattgatatcaatatatttagtctttggtgaacttctgctccaggttttaaaattttgttcttttgcatgccaatgatattttgatgtagcaatttcaattgtttagtcactcccgggggagccgcataactttttctgtccaaaagttggagccatggatcaaagaagagtagttgtatcttaaaattgttgtatatacaatattgtaccttacaattgttgtatacacaatactccattgtacagcattaattaaagaattgtttttgcacctgatactggcctgtacaaagtacaaccgtttgacaatgaactggggttagttctatgttcaccaccactaaacaaaagagctctgaaatatggttcaaaagctactatgatcatttgaattcatcagctttgacatgacagtcctctatccctcatcgtcttcttcaccttttcagcctctaccaaccttcccacattttgatagatctccatcaactttacaaaattgtgctcattgtcaggctccagttcgatcaacctcttcgcaatgatctctccaaccctggcgttgcgatgcatcaagcaagcctgcagtagagccctcaaaacagtctgttcattgtcgagaggcttccgcttcgacatgaactcgtaagcctcatggatcatcccagccttgcctagcatgttcaccatgcaggtatattgttccatagtagggggaattctgtactcattctccatctcagagaacaatctcatgccaccctccaccagccctaaattgtcacaagctgagaacaccaacgcaaaggtggtctcatctggtcgcatcccggaatccaccattcgacggaagatcatgagaattctgtagtcctggaggtgagcagagattatagcattccaggactgcagatccctcatcgtcattgactcaaacaccaacagggcatggctctgttcgttcttatcagagtacatcctgatcagagcatttgctactgacagctctgtctcgagaccatgacgaattgcccaggcatgaatctccagtccccatttaccattgtcacaaaccaacggcagtatcgacagcattgttgataatgtaatggagtcgggctcatgttcttctctcagcattcttctccagagctccagagcctgctgggagagcccatgtcgcaggcacccagcaagcatgatgttccatgagacgccgtccctgtccggcattgcatcgaacacctggagagccctccgtacgtcgccgaatgtggcgtacaaatccacgagggcgtcgcacacaggcacgtcggacgcgagaccggcgcgcacgacgtcacggtggatggcatggccgagctcgaccgagccgacgccggcgcaggcctggagcgcgctcgtgaaggtgaagcggtcccgcgggacggtctcctcctccatctggaggtagagcgcgagcgcgtcctcgtggcggccgaggcgcgcgtacccggcgatgaggcagttccacgggaaggcgtcctcccgggcgcgcgcgggcagcaggtggtcgaacaggtggtgggcgtaggagacgaggcccagagaggcgtggaggtggaggaggcggcgggcgagcgcggggtagcggcggaggagggagacggagaggaggcggcggaggcgggcgaggttgcggcgcggggaggggtggagcgggagggcggcgaggagggagtcgaggaggtcgggggtgaggaggcgcgggtgggacccgaggtcggagaggacgcggtccagggtgggctgggtggccggcggcggcgcggcgcggagggtgagggccgcgccggagtggggatggcggcgagaaggtgggcctcgtcggcgagctggcgcggtggagcggcgccgccgctggatggcgcaggtcgtgtggctaacggttgctgggagcgccattttcgttggaccaatccacacccagagcttctagaagcagtctcattttttagcgccaaaaaaagaactactcgtggcaaatactccctccgtatttcaatgtatgacgctgttgacttttcgaccatttgttttattcaatttttttgtgtaaatataaaaatatttatgtcatgcttaaaaaacatttgatgatgaatcaagtcacaacaaaataaatgataattacattttttttaataagatgaatggttaaacgttagacaaaaaaaatcaacggcatcatacaaataaatatatggaggaaatactattcagtaaaagatggacaccacaagtccatcacaggatttagagtggaagagaaaaatatcatatggtttgatgggagtctctttgcatgcgggaaaactagttagcgcacggcggcgcgtgtttcacacctcttccacgctttttttttccgtttttttaccgtttgttttcccacttttttctgattttttttatatttagcatgttttgagtttgaaagtttttaaattttgagttgaaaattttcaaatctaaacttgaaagtttttaaatctggatttgaaagttttcaaatctggatttgaaagttttcgaatctcgggttgaaagttttgaaatctcgggttgaaagttttcaaatccaagttgaaagttttcaaatttgagataaaaagttaaaagttttcaaaatttgacttaaaaaaattcaaatttcaagtcaatatttagaaaactttcaaatcatattttgaaaactttttactcaaaaattcaaaatcatctgtttctatttttattgagaaattactgtagcatttcgtgattagtgctaattatttggattagcaatgtagtgctgtttttcttccagaaaagcgctaagcgcttgaggcggaggcccgcgtgcgcgcggcttaaagttctcgcgcgcgcgcgagctaaccacccccctttgtaggcccaaagaggatggggggcttggttttgtcaacacaaaaataatgaatgaggccctcttatgtaaatggatttacaagttggaatctgggtgcaaacagcctttgctgtgatctgcttaggagaaagtatatgtcaaacggtggaggttttttccaaacttctgctgatgaggtcaaaaaatggatgaagcttggcagtgcatatgttgtgggtaatggtgaaaatattagattttgggaggacatttggctgggggaggtccctctaaaaattcagttcccatacatatatagtgtttgttctgatcctagtgatagtgcgaaacaaatgcaagtggatggggaatggaggattaatcttagaagatctctaggcccaaatgatctggaagagtggtcggagcttcaagagatgctttacttcgacacagctgactgcagaaaatgacactatgttttggaaactaaatcagtcagggacgttcactacaaaatctctatacagggctattatctttggagggattaagggcaccaagctccaggagctttggaaaaccccggttcctttgaagataaaagtgtttatgtggttaatgctgaaggggaggattcaagtggcaaagcaacttaagaagatgaattggtcaggcagcccgttttgtaagctttgtgggatggaggaagatgtagatcacctaatgtttagatacctaccagcacaattcttatggtgttgttttagggcccctttaaattgtaggaatggaaaaatggaggaataggaaaaatataggattctgacaggaatgcaagtgtaaaacagaggattgcaaaacacaggaaaaacacagaaatagccgtttgattggaccgcaggaaaaacgcaggaattagaggagagatgaagactcataggaaagtttccataaggtagaacctcatgctagattttctccaaaacttgcatagcattaggcattccataggaatttaataggatcctataaaattcattcctttgattcaaagggctatataggaaaaattcctatagaaatgaaatcctttagaattcctatgaatttcctttgaatcaaagggggcctattagagatgctttccattggataggatccccacctctaggaatgaactcttagacttcattcaagatcatgggggagttaggaacaaaaacttgttttatttgtttgctgcaggtgcttggtcgatatggctagtgaggaatgactgggtttttaacgacaaacttctgaccaacgtgacgtttttacctcacaaagctatgtcgtttatgatacagtggaaaaacctggcgccggtgcagctgaaggaggagttggagaaggtaaagcgatcgctgcttgccaatatccgcgagacaggagattcaagcagctgatgtcttcgtgtccttgatcttttaggctgttttctgttatgctagctgtgcattagctttctggcttgtctgttgtgccagcagcacttctacttagactctttcgctgttaattgtgaagctggcatccccggcactactgtatcagactcttatgctttcttataaaagctgggctttatgccttttctccaaaatactattcagtaaaaaaaatcgtaccagtagtattttctatagcttgttaagccaaaagtattgttcagaattggcatattaatagagaaatttgagatgaacttttcatgtgctatatatgtggatcatacactggacagaagtacaaatgatgagttgaagtgtctggagaatgattgacgctagttgataacgatggtcatcagtctgaatgaagggtaattttagaggcttggttttcccggacgcataagcaaagaattcggatacatggatatgaggggatgcagattgctgcacgaaatcgaaaagaaagttgcctgccgattgatcatttcagttgatctcttttcaaaaaatcatttcagttgagcggttcggttcagtcagttgaggcatccatccatggattgcatcgcatcgcatcttgaggtaggtggtgctttggatagctctgaattcaagcaagcatatccaaccgaccggatgatacgttagcttccagattccacaagctatccaagaaatcatcgtttttgcttgcgtctcttaattaaatgcatccatgcatgcgcatcataatatgcataaaaaatgcattagttcatgccccacaaagtagcattaccagtacctgaattatcagaaattgatcatttgcgtaatcatcactaagttcgttttgacttggattcagagatatctgaagccggtccatcggatgaagaaacaataatattaatttttccctcgaatatactactacttgcagcatgtacccggtactccgtactagtatagctttcaagcgttggtgtgaaagtaatattaaggtccagtagaaagcacgtgtcttgcttacgagaagcagcaacacataaaactttcagtaaagtctcttctcttgctcatgctagccctgtcattttcagtcctaaattaaatctctctttcttgtccatcggtttatcaaagaatatcccactcaaagagcataattcaggtttccttctcaactcaactctcctgatctctctggctctgcctctctctatatagtgtcacagtgtattcatgcagaaattgatccaaaccaaaaccaaaagtgaaaaaagaaagtaccaagaagaatataatcaacacaagagtacagtagtgtagcaatggcggcggcggcggccggcggcaagatcaagacggtggtggtgctggtgatggagaaccgctccttcgaccacatgctgggctggatgaagtctctcaacccggagatcgacggcgtcaccggcgacgagatcaaccacctcgacgccgccgacccgacctccagggccatccgcttcggcgacggcgccgagtacgtcgaccctgacccgggccactccatgcaggccatctacgagcaggtgtacggcacgccgttcgtcgacgcgcgcgccacgcccatcacccctcccggcgtcccctcgccgccgatggccggcttcgcgcagcaggcggagaaggagaagcccggcatggcggacaccgtcatgaacggcttccggccggaggccgtgccggtgtaccgcgagctggtgcggcagttcgccgtgtgcgaccgctggttcgcgtccaacccggcgtcgacgcagcccaaccggctgttcgtccactcagcgacgtcgcacgggctcgtcagcaacgacaccaagctgctcgtcgccggcctcccgcagcgcaccatctttgactccctccacgacgccggcttctccttcggcatctactaccagtacccgccgtccacgctcttctaccggagcttgcgccagctcaagtacgccggcaacttccaccccttcgacctcgcgttccggcggcactgcgccgagggcaagctccccaactacgtcgtcgtcgagcagcgctacttcgacctcaagatgctccccggcaacgacgaccacccctcgcacgacgtctccgagggccagcgattcgtcaaggaggtgtacgaggcgctgcgtggcgggccgcagtgggaggaggcgctcctcgtcgtcacctacgacgagcacggcggcttctacgaccacgtcccgacgccggtggacgtgcccagccccgacggcatcgtcagcgccgcgccattcttcttcgagttcaaccgcctcggcgtccgcgtcccggcgctcttcatctcgccgtggatcgagccgggcacggtggtgcaccggccgtcggggccgtacccgacgtcggagttcgagcactcctccatcccggccaccgtgaagaagctcttcaacctcaagagcttcctgaccaaccgcgacgcctgggcgggcaccttcgacgtcgtcctcacgcgcgacgcgccgcgcaccgactgccccgccaccctgccggagccggtgaagatgaggccggcgacggaggcggcggagcaggcggcgctgacggagttccaggaggagctggtgcagctgggggcggtgctcaacggcgaccacgccgacgaggacgtgtacccgcgcaagctggtggaggggatgacggtggcggaggcggccagctactgcaacgccgccttcaaggcatggatggacgagtgcgaccgctgcaggaagtgcggcgaggacgggtcccacatccccacggtggtgaagccgccgccgccgccgtcgacgtcgtcctcaggctctagctcctttgcttccaagttgctgtcttgctttgcgtgtggtcgtcctaacaagaattagtcagtgaagatggctgattaattgcttattcatttcgcttgttgattactgtatagattattaatttggttgtgcagggaggagtacagtactaaggccggattttacagagtgattatgggtggtgtgtagattattgatgtgatgattgtattacgaatgttggtttactgatcctgctgatctgaccagaaaagaactctggaagttcagctcaatcagattcgtcattgagacccaaaagtttccattaagattgcatagtacatcaccaactggacaaatgaatagcaggcaaacagaatatctggaaaagaacagagaagctaagaacaatttcacaggaaatgagtaacagttagaaatggctacaaaatcaaaatgttacagctggagtttatttcaacggcactaagatggcccagagcagtgatctacaacacatcatgctgtattagacaggcatttgaagcaggatgaaaatgcctgctcatcatgtgcagacaggtaatgctactaagttcatctaggaaacattggacacgtttaagcgtaactttaacgccttcagctcaagaagatataagcgggattggtctcacagcaccctgtatacgacggaatgcagtcttgatcctttctctcagtgtagcattttcacattcaacaccaccactcctcccatccaagtgtgctacttgtccatccacagatataacaagtttcccttcctctgcaactttgacatcaccaaaaagtgacaccataagagcataaactaccttctgggccaccctttccgtctcttcctgtgtcttcactgcttcttcaactgggacaactttgggaccttcacggcctatgttcaagaccatggcgaccacagaatcagacaccatatcactgataggatcagacgaccactgcaatgtaacatagctttctgattccaggcgaatggtcactctctcatgcacaatcaatgttggaacatcagactcctctgttgatgactccacgctctcatatatttgcttcagtctgtactttatgacttcaaaagaaccagaatatgggacggcaatcctttgggtaatgttagctgtagatagctgcgtgtacacacggagatcctcaggagccataatttgatatgtgaatcccttctttacaagcaagccattaactgattctccagcttccggtaccttttcagccaacctgccaattgtcttggccattttctcagaactgaaatacatctccactgattggcaattcttggggttaacaacttttatatttgtcccatcaaactgagaaataagcttctgcttaagtcttgacatctcatttgcttccccgtgtacaagaacaatgttgggtggctggagctcatccaagaaggtgcttgtctgagggaaatcagcatgagcagaaaaggaaatatagtggacctgcatatgaagaggagcagtgagcccattcgccagtgtcacttctcttggctcgttaataatggtctttgcaagggtgccttccacaacataacctggaataacacatgaattcttcttatctgtgcaccatttgtcaaagagctgcctggagaggccactctggagaccacctgggcttgccataaccactgatggacccacatcatgaaagttatctatgctattcaaagactcaatatgcttgaaatggaagggattagattgtgcaaactggttcctaatcctttcattcatggagttgatgtatgtctggtagacagccatgcatttcttggcaagaggggaggcataatagattggaatcttatggagctctgggtggttggcccaatactcatccaggataagtagcagctcttgagctcttccaagagcaaaggctgggataagaacgcgaccaccctgcgagacggtcgtgtgtattacatcagtgaagcgcttctctcgtacatggcggggttggtgctgctgcacgccataagttgactcgataatgcaaatatcaggggagaactggggaagttcagcagctttcaggtggcgatcttcctcacgggagtagtcaccagtgtaaagaacgcgaaccccagcaatgtccaccatgaacattgcagcgccaagtacatggccagcagtatagcaccagaagcgtatgccattaacttccaatgtctggtggaagtctatgacctgcaaggcatttttatgttaacaaaagtattcattcactccatgaaatacatacaagctttcgatcatcacaagaagaatcaacaatatgctatatggaaggaaatggtcaatgtttacaaagcaacaatcagatgttacaggtttctcagttgattatcaaccatctagaggatttctgtccattcaaatttgttctaacatatgcatttgaaaggggtcgacaaagtgctgtactgctatataggcaatttaaatccattcagggagataaaatacctcaattttatccatggaacgaagaatgtcttgctcgtcaaacagcatatcctccacagaaactttgctgactttgacataatcggaaaggagcagcctgtagatggcctttgtggcatgggtcatgaacacgcgccccttgaatgtcgtctgcaaataaaaccagagcaacttgaggatgctgaatggtatcagggcaatagctgagcacttactgtcgaagcaaaaaaacggaagatggtggaacattaccttctccaagaagtagggaagagaggcagcatggtccaagtgaaagctgcaaattttaagggcgaagttaagcaagagacgcacagatttgacagaaggggcaaagaaaataaaagaaaaagggtgaaaagagagtggggggaataagtactgggtgattaggaggacatcaatggtggagggatcgatctcatcgaagtaggggagcgccgccatgccggagtaagccgggtggatgccgcaatcgaactatccaagaatccaaaccacaccacaccacatgacaaacaaaagcagaaattatcataaaaaagaaagcagtggaagctagggtttggagggaaagagtggggggattggatgctcacgaggacggtgcggcccttgaatgacatgtagacgcaggagcggccgacctcgttgccggcgcccagcggagtgatgatgagctggtctccctcccgcccgccggaggcctgccgcttccccggcggccccccggcggtcggtgcggcggcggcggcgacggacgacgccattttccccttcacttgctgacgagcggagaaggaaagaccttttagggctttggacacggcggactcgaagcaggctgaattaagttgggcccggaagggcttgcagtccaagcagccctggagctggacagtaagttcactttagctcccttaaccaatctaatttgtatcttgaaccgcaattaccgggatttctagccctcggcccttcgccgccaacactgctccagatcctgcaccgaagtggagaggaagagaaacatagagagagaagggagaaagagggaagagcaagaaggatagaggggagatggcacgggggcctcatattttttattgtgtgaatgacgaatggggctcacacacatatttttttttaattctaatgccatctaaactccatgtcaacactcacgtccgtgaaaccgtcctccaaaactgctgagggagtcaaattgcatcggttttaatagttgagggatcaagatatcccatattggagttgaaggaaacgaattatattggttgagatatcatggagctggagcataactttagcacaactcagctccagcttcacgtcttctagagctagagcctagcctaacaatttcagttccaacttaaatggatcagagttggatggggaactctcacaaaatgaactagagatgtagagctgggtttagactgctccacaactaaattctagacctaacgtctggagctaaatttaggagttggagctctaccaaatagacccagagaaattcgatagcaggcatggagctagcccatcgagctagactaatggggagaagaagttgagtcgtgcaggcttgacgtacgcaaccgtccttgcattgatctataggtgtcttaggtggtgtttggatccaagggctaaaattttagtctctatcacatcggatgtttttgacactaataagaagtattaaacttagactaataataaaactaattgtataaatgagagctaattcgcgagataaatttttaagcctaattaatccataattaccacatgtttaccgtagcatcacatagactaatcatggattaattaggctcaatagatttatctcgcgaattagtccaggtatggtatgagttttgtcattaatttacatttaatacttctaatgagtgtctaaatatccgatgtgatagggactaaaattttagtccctgatccaaacaacccgttagattcgagggctagtttattcagtttgaggaattttaatccatagaaataggaaagtgaaaaaaaaataaatgcacgtatcaattcatatgaattttttcaaaagatttgagtgaacggaagtcttcctatgttttttctctacaacttaaaggaaaagaaaaaattcgtttggttttcctataacttatttatacaaaccgaatgggaactgtagaaattatttttgggaatccattttgtttccttcaaaccgattaaaccaatgcacaaaaatgctaattgtcagggttatggataccacatacctaatagtagttgacttaatctcgacaggacccaccatataccatgtcttatacggaaacaaccttcggatataggaggagttccgtataaggaaggatgaatagagttctacatgaaaatggcaatgactactcggagtatccatattggttttcctagttctacttggacaaggggacacttatgggtataaatacaaggccccctaagaggagaggggacacggaacaatagatcaagacataagatcaacatacaagccaacatacgccaagacaagacgctggatatcgacttaagagataagcatggctagtcccctatggtgtctacagatgctgttaggagagacatagcgctgtctttgatctcaccggatgcggattcgatgaggaaggctaccctgttgtcgactacgagtcagaactttagaccaccatattgacaacagttagataggctaccccaaatattgtactggtgtgactatggtaaataagagcaacgaccggcttcggccaacatgagtagggttattacctgacaattcaggggcccggacatatatacaaatccttgcctccgtctcttttacctaaatctcgcgtatatcctagtaccaacgatccccatactatgcaaataccggaatcgcgacatcaaacgtcgacactaatataatgttcctatgtagtcacgtgcctttgttggttgccctgttcacatcgtggttctcactaaactgtgatcttcactcaaccttttcaactccgctcactcagtttttacgcgtacgtttcctaaactattaaactgtatgctttttaaaaagaaattctatgaaaaagttactttaaaaaatattacatgcgcgagagattatttctcacctccaactaccgaacacagctttaagctacccatcatggcgttactaaactacgcatatagtattatatatggtactacctaattcaaggtcttcgtatcaaagtctttgttttttctataaaaaaaaacaaacgaagaagaggaataaatagatggctccacggctgccaataaagcgcattcccgcaggcgcgttcaaatggaatcaatcctttttcacatcatggtgtcactaattttatgcataatataagcatttctgtaatgattcatattactccaataattgcaatggtcttagagtcaatcagatcgattgttacaaagaaattcaaacatataaaaattaacaactgaatgacaaatatggaatcttttagcctaaccttagaatttattaaacacctattacctcgcctcccaaaatatatagatttttaggattgtacatggttatttaaaaatagctaggtataactaaacgagagaaaatcgtgattgagtgacaagtggaggtatgtggggaaattaaatggtggagaattttgattagttgggaagagaatattgatggagaagttatcatattctagaacgaattctagagattaaaaattattatattttggaacgaacagagtatatagatccttgaaatgtaaacatagacgggtacaacacaaacacaaatattgaccagacgcgtcaatgccccccccccccccccccccggggggagtgcatcgattcttttacaaggaccaccttcacatcatgccgtggatagtctatttcaaagtttccttttttattattaagaagaagaagatatagactctccctcaatggcttacgagccgtagccaaaatttaaattttaaaaattaaatttgaagatgattttgaggttaacttattaagttgtatcggtaagctcacctattaagttttaagttttaggactatattgcacccacatgtcaattcaatctcccgtgaatataatttacttattttttaaaatgacttaaaacacatactcctatatgcaaattttacctctaaaaaaatttagttgctttagttcaatttaagtcgtggagcaaacgataaaattggtagtaatcatgcaccatggtcgccgaggaggcatgtcaatgtgttccgacacgtacactagtaaatgaaatggcagggggagggttaggtgaagacaaaaatgtgtttttcataaaagtttcttctacttagtgtgtctagatccagggtgaaaattttttaccgtatcaaatcggatatatgaacacatatttaaagtattaaatgtagtctaataacaaaacaaattacagaattcacccgtaaactgcgagacatatttattaagcctaattaatccgtcatcagcaaatatttaatgtagcactacattgtcagatcatggagcaattaggcttaaaagattcgtctcacaatttacacacaatctgtgtagttagtttttttaatccatatttaatacttcatgcatatgtccaaacattcgatgtgacaggataaaaaaaacttgctaggagatctaaacaggccattatatatttctactatcctataatatcattatatatttctactatcctataatataagacatggtcaaacttgacacggtaaaaaaaaactaatcttttctcttataatttatcatatattataaggtttgtagtgacaaaattatagccatacgaaagtaaattcaaatgtcaattcaatatacaacttttagcaagtaaaattcaattcatatcgtactaaatattggtcattttgaatgtgaaatcttgaaatacgcgagcaccttatattatgtgagtatcttataatgcctatcctacacattttgttaactttattttttaaaagatactagtattatattagactagccagggaatcatcaatcatcattttttttgaacgaaatcaatcatcattttgatacacgggttctttcggaggtgcgcttcatcaagcatccaatccacttgaaccacttgactgctcctaaaagcaatatataagcagaccatcgtctagctaagcttatgatcatgagcaaactcctaataaaatccctcacccataggaaaatcggagcaacgacgtacacgctcaaattcccacatacgcgcgcctcgatcgatcgatcgtctctaagtcgagtcgttggtccttgtgtggttgagagagagagagagatgaatatcgggcctagagaacagagagcatttgcgagaatgacgccagaagaccgagcgtggttgataaagggcaagtcggtggtgctgacgtgcctagcgtcggtcctcctgctgtcggccggcagcatcaaggcccccaagacttgcaccggcggcatgttcttggggcctataatcgctatcggcctcttcctcattgtcatgttcgtggtgggttcgtgtggcctgaagaaaaacgatggtgacctctacgactgctacctcctcggcgtgttcttggcaatcctcctcctcctcgcctttatcatcttcggatacgttgccgtgggaggcatcgacgcggggcatgcggcgaatgcccgagagtacagcctcagtgagtgcaagcgggggtggcttaggggtcgcgtcacccactcctcgcatttctgggcatcaaccagcgcgtgcctccgccgcagccacgtctgcaacggcatgactaacctggtacgcaaccccgacaccggcatttttgttccccgcccatcctccttcgaaaggtgggccaagagacacggggtggacgccgacccacgtgtaatgtcccctatcgaggtacgtaccgcctttttctctactccctccgtctcaaaatataacaatcttgtactagataggacacatattaatacaacgaatctagacaggttatactaagatatgtcccatccagtataaggttgatatattttggaacggagggagtatcattcgcatgcacacctataaaactagcgagaagctccgcgcgactggatacgtgtcgcgcgtggagagaagagcggcgaacactaattgcataaatgagagctaatccgtgagataaattttttaagactaattaattaatcagtaattagcacatgtttctgtagcatcacataagctaatcatggattaattagtctcaatagatttgtctcgcgaattagtctagggttttgtcattagtctacgttctaattaatgtcaaatattcgatgtgacaaggactaaaatattttagccctattcaaactcccccttattaggttgtgtttagctttaccctgcgttcccaactcacatctcttgttattttacctagatgactattctattacattgatgtggaaaattaagttatgtaatatgtataaataagatgtaatataattattaaaacttaaaaaaaatgacttgcatctacagtctggatgctgcaagccaccatcatcgtgtggattaacatacgtgaatgggacgacgtggatatcgacagcagcatcagcaggtgccccagctgccgttgcccaagtaaccaacaacaacaaggacgacgactgtagccggtggagcaacgaccatcaaacgctttgcttccagtgcgactcgtgcaaggctggcttcctccgccacaccagtcaggcctggagtgtcgctgccatctatatcgttctcgccttcatcgggctcattctttcctcacttgcactctacgcagatcaagcaactgggaataataatactggaagatcacgatgagtactagctagcagctactcccagttatatatatacatgtgcgtgaaaatctctgaagcttaattcatttaccttttacctgcagtacgtacgtacgtacaaaagacgtactaggatcgcatgcacgtgcgtggtgtgtaatggtgctatatataaaggcctggtccttaattaatttgttaacgtttttactgaaactagctactctctccgttttatattataagtcgtttgattttcttactagtcattatcaaattagtttcattaaatctaaaattgaatatattttgataatatgtattatttacgttgaaatactactatactcttctagaaacttgatcaaacttaacgagttcatggtgccttgccactatactctcccagcacacttatgctttgtcgtcatcatggttacattgtggtgtcctctgtccttgatatgggatgttaggtcccgatcttccgataggtactgataaacagtcgatttgtgcggagtcgtgacacaactcgatccggcttttgaacgaacacgctactgaggctcacaatcgcagaaccacgtctcctctggttatcaaccgtgccgaaacccggttgacctcgccgagaaggctaatccctgtatgcaaatcgaagaacacaagcaagaacaagatatattgcaaccaaattacatatgaatgattaaacactcgaatttggggttctacaaaccgatctagcggcgaaactattcttgacagaataatataagcaaaacttgactctaaaagataacggctactgaataaatgtgattagggacgtcatagggttgccctagcgcgcacacccccttgggctaagcccacgacacaattacaaggcccaaaacttttccacacacacaaacttccaacttttctgtcacatcgttccaattttaaccaaactttcaattttagcgtgaattaaacacaccctaaggagaaataggactatatttttggcaataactaagggaaagcctggaagctttcatggacactgatgtcacaaactgcacactttgttgctaatcagagatgctgtactgctagcgatcagacttggctgcattttcagtcgcgtgatattttgacagcaaatatttgatcattgcacacatccgcaagccatcaagacgatctggaaacgggaaagatctggtagacactattgaatcgcaaaaccacgaagctatggatcaccaaaaagatgcaaaagattagccctaatcgcaccgtgattaagcagttgtctgcgacgtaaccaatctcactttgcatagtattacggtctgatccaaagagagagtataaagctaggttgttcctgacaatcaaacttgttcctgacattacactatctcacccgtccgtcactaaggtgactaactaaagctatatcatctctcaaaatatcgttctgatggtcttccagcatccttttatagcattcatccaaaagatcgttcttgttgagatcaatcgtagcatgtatagtgaaatcagattagaaacataagcatctgtctgaacagagaaatcaggcagcccactagtatgctttcctaagactatattcctcaattaccaaatcaaacacgtctgcaaactgaggatttcgctgcgccgagccgctggccgcgcagccaacgatttttgccgcgccgctgcctgccgggaggaagtgaaaacctgcatcagggagagatgcggttcctacgtcggggcgagatgcgatgcgtcggacctgatgcgaagaagcgaagaaaacatcccataccaaaattacccctaaactatattaggatattactaatctatcctataaaattaatggtcaagattaattctacttgtggtagaatacttcaagtagagagcattggagcgtaactcttctccagaatatacaaatcggtcacctgctccactcaatttacaggcataacgctatctactttcatatttagtgatgggttattaatgtatgacctggatagaaccttcgcaggcaggccaatttcctaacagtttccatggtgtaaagcagtagtaaagaagaaaaggtatacgccgagctttatagagaaagcataaagtgtctacaaggtaactgctgggaactccagcttacaagacaagacggatcaaatctttcaagctcatgatgttcttacaggcattgaggtttggagttggcctcgtcgccgaattgcaaacacctggacgaagaagacaacggccagcctcggcccgtcccctggtaagttgtactgctaccagatgtacctcttccttctctagtcgctgttgtctaaaattatgagaaacagctggttggtagttagattttaaaaatttagaaaggctgagtttcgcagcttctagcatctagtttattttatgaattctacaactatagtttctgagaatctggacaaaaagctggactgtttggggagcttcttattctgggagaagctgcaacagttagaagttggatatttttttaccatgtcagaatgtcactataatgtcttaataatagttttttcttcttaaaatatagcaatctaaaatcgaatgagacacgttctagtaatatgaacgtagacatgtcccgttcagatttatggtatatgatatatctcatccgatccttgtatttttagacagaggtggtatagtagagccccattgaatgtgatttcataatattttcaaaattagtttttaagtcgttaaaaataaatatataacagttttatatataaattaatttggctcatttacgtattagaaaatatgggtaagtgggcaaccgatggggacagtagtttagtggcgtcatcctgccaaggagcctggaggtcagcactgacgttgctggaggtgagtagccatgggccaatggccatggcatgtaccggccggcggccggtgcaggtgaattgagatgagaggctcaacttgtggctgctttattgtgttaccggtgaccgacgacttggaccgtcaaatgcctcgtcgcgcactagtggaaattaaggcagacgcgtgagctcgttttataatactgaaatactttctccatttcagtgaacagagggagtatagttttttctgtcacatactcatgtggaaatactccctccgtttcaaaatgtttgataccgttgattttttagcacatatttgatcgttcgtcttatttaaaaagatttgtaaaatatgtaaaactatatgtgtacatgaaagtatatttaataatgaatcaaatgatatgaaaaaaataaataattacttaattttttttaataagacaaacggtcaaacatgtactaaaaagtcaacggtgtcaaatattttgaaacggaaggagtatcatactagtctctatacaaatatttttcttttctttttgttactttatggaccctaaacactatgcatgcggtggaaaagtttgggagttggggaccctcgatttctgctaaacgacatgacttttaaaaaaaagaaaatcatcggattttcttagaatacctttgttaaattaatttttaactttcccattgtcggcattgacctcagctcagacgaggtgacgaatcctagcaaaaaccgtgttgctttcaatataagcagagtcttttgaccttttctctagaaaaaaaaaaagacgaggtgacgaagctgttggaaatttggtcataattcggcatattttaatccaaaataacaagataataaacatgatatttataatgggatttgatccagtgataatggtgaatgtaatcaacatgagcatgcttaacgttgaataagcatcaacaatcacataatgacacaatgttgacattgcgatgaacattaacagtaaaacttctaagtgaaataatgtaataaggttataccccaagaatggtcctccgctggagtttgaggcagtattgcctccgttggtgttgacgggagtctccttctccttgtctccagtgttcgacatgttggtgaagatgaagtagatgttgacgaacagtgagtagtcgcgccttgcgctccccaaaaacctgatcgcccgcccgtctgtgcaaacgtcgcagcaacgcgtggtttcggaggcctactctcccaacgcgtgtgcacacactcgtcgggatgggattaccgtagcaacaacagctttagaaaatggatgaaagtgtgtcttccttttctcgcgggagatcaaatccattcccattttataagaggaatggaagatgaagagtaagagtcatggaataggaagaggaatggagcaactaattgtcatcaactagccatgaaccatcctccactacacaaccatcaaccaacaatcaattaagagtaattgatgtaagttaccaatggaataggaagaggaatagagcaactaattgtcatcaactagccatgaaccatcctccactacacaaccatcaaccatccatcaattaggactaattgatattagttaccaattccttaatcaaatggattaattctcaaaactcttcatcccattgatatcccatagaagaatgaattcacatgaattcctagcataatgagccttggaatttatttgatttaattgatttaaatggattaattacccaattaaatctaacagaagctgagtctaaaggtgattcgattcataatgcatatgcagtccacttgagtcacaggactagctagctattcccgaatggacaaacgtacggttgcaatatataagcagccgagcatgcatcgttgggagcaacatacactcaaattccctggcaggctcatctgtttgttgggagagagagaagagatgagtaatattgggatggggatgggggtgatagaagctgggcgatttatgagaatgagttcagaacgacgagcgaggcacttggtgggcatgggtgttgtgctgacgttgaacacgtcgatcctaatactgggtagcgccacccgtgccccgacgcattgcacccgtggcgtcttcttgtggccctgtatcgcgatcggcctcttcttcatggtcgtcttcatcttgggcctgtgcggcgcgaagaacaacaacgagggtctcttcttctgccacctcctcggcgtgttcatcgccatcctcgccctcatcggcttcatcatcttcggttacgtggccatcggaccaggcatcgacctcagcgatgtgaaggcacgcgagtacaatctggacgactacaagagcgggtggctcagggctcgtgtggacgacgccgcgtactgggcaacaaccagcgcctgcctccgcggcgacaggggcgccgggtgcaaggccatgacgaaactggtccgtgacccacactccggcttgttcgtccccgacggcggccgccggcacgtcgacatgtcacctatccaggtatgtacgtatttttgggatatatggatcacggatagtttacaattacatactactatcactaattggaacctctccctagtagcttattataattaactgaatatatagtctggatgctgcaagccaccatcatcgtgtggattcacatatgtcaacgggacgacgtggacaccaacaccagcagcagcaacaaacaacgtcgactgcagcaggtggagcaacgaccaacaaaagctctgcttccagtgcgattcatgcaaggcaggcttcctcgaccacaccaggaaggcctggagctcggctgccttctttcccattttctgcttgatcgcggccattctttcatgctgttcaggtttaaaatatggaggggttctccatgaataagttgttatcttactttgtttatttttatcatgtttaggctttgagccaacaaccttataataaatgattgttcctttgtttatttttgtcatgtttgggcttcgagccaagaactttataataggagactgtagcttctctcaaagcaaaagccagatttaatattcattatctaaaaaggttggaggagttactagatgggatacaaacagctcataagagttttcatattatatttattgttatttttttaaaaaaaaatagaaaatgatttttttatccagcctctatatccaaccggatatatacattttttttctaaattgggaacttagtccatcaaacagctcagtccgaaattcacgcttctatggaaatttgaacctaggaccttgagatgctactcttatttgttgctaattaagtttcaagagaaaggagagaagtttaaaatctgaattaagttgaagcaggctgaattaagttgggcccggaagggcttgcagtgtacgtgaggcctggtcaatccaaacagccctccagctggggaataagttcgcttaactatcgaccaatctaatttgtatccttcaacccgatatctcgatcccaactataaaaaccgatgcaatttaactcctttaataattagaggttttcctggtttcgctgatgtggcatctacatggtagtgttacattggtctatgttgttgatatggcgcttaggtggtattagaattaaaaacatatatgtgggtcccattcatcactcacccaaaagaaaagagggctgctatacaacggaatcccgttgtgacgagatgataccggttaggtatgaggttctgatacctctgaggtatcatgtcttgatatctaaccggtatcatgtgatacttgtgaggtatcatgtgatacctataaggtatcagacgattcctattacgtatcaggtgatactcgcgaagtatcatatgatacctgtcaagtatcaggtgatacctgtgcgattcctactacgtattaggtgatatttctattcctaccacgtattaggtgatacttgcgaggaatcaggagccgggcaccaaagcatcgtcgccggtgatcccaccgtccacgtcggagctcgtcgccagcggccacatcctccaccatccacgccacgtcggagctcgtcgccggtgtcagcgtcctccatcatccaagccccacgccgaagctcgtcgccggcggccgcatcctccaccgtccacgccacgtcggagctcatcgctggcgcccgcgtcatccgtcatccacgctccacgccggagctcgtcgctagcggccgcatcctccatcgtccacgccacgtcggagctcgtcgccggcggccacgtccttcgtcatccacgccacacatcggagagagccccttcctcttctccggcgatttgctccctgacggagcggcgaggtgaggcgaggcgaggcagcgggggccttctccgatgagctcctctctctctctctctctctctccgcttagcaagcccccttcttccttcactaccgcatgctgccattgtgttgctctgctgccccgcttagtgctctgggacaaataagaagacgataccatcacgggtgttgagaacgggataccggtatctagctttttcgaaagaaaattgtggggaaaattaattaaggttgtaaagtaagtaaaagcgaagaagactaggtatattctttcttcgatactttattcatcggctagcccaggttttatagcctgcgataataaaaaggttacaataattgagctcaatcaacactgattacaagctctaagttcaggaacgtacacgagcaacgacaaaatgaatgacgtaaatacgtaaagcgcaccggtgtatcggatgtattcgaactgtacgtgcggcttatgctgtatatatatgggccggtcgaccgtaattgtgatgtacgtgcggcctattatgctggagcgggaatgtcgctcgcatgataagttcatgtgaggtccattaacttgtcaacgaattcgatttccgtccttcaaccgaaaaactagatacaacggatctgtcaactgttaaactagtgtagatgaaatcccttagcggttttggctgacgtggcggtcttcatctaactggcattgatataacgtttacgtgacaattcgattcgaaaaataataaacccagtgagacccaactgtcagtttcacacccaaattaataaaaaatggtgggtccacgtgggccccacatgacatttccactcctcttcatcttcctcctcctctctcccctctcccctctcccggcacgacagagagtcaacggcgggggaggggaggggattaatcggcaccaccacatccacgcgacggcgaggaggcggcgcggcgatcacataccgcaccaccgccgcacatcctcctcccccggccggggaggtcacgacatagacggatcatccaatcatccgatcactgccgcagccaattaacttcagagctctcgtaggtgttcgtccatttgtgacagtagcaaagagaagtggtgagtttgtagtgttgctgccatggccaactacgcctgcgtcgtcctcctcgttctctccggcggggtggcgttggcggcggcgtgccgaggggttggagccagaggcagccagccgacagtcagcatgggtcccacatgtcaaggcctattcatctctctctctctcttcctcccttgttcccatctcactaggcaacgagcagtgagctagtgaggagaaggccggccaacgacgggcggtgccggtgaggcgatcggaggctgttttgctcaagcgggaccatgacacgacgacgtacgtcctgtggagaaactcaccagcacgcgcgcgcgagctggactcgatgcatatagcaattaaaacacgccctacagtgctggcatgagatcattgaccagatggcgataggcacaatagataagagacaaaaataaaaaagtttgtttcgttggaagctacttctattaagctaggtagggcgcgggacaacatgcaaaacgatataccccatattactctctccgtttcaggttataacatgtcttggattttagtaaaagtcaaactgcttcaaatttagctaagttaataataatatttatattaccgaattagtttaattataaatatatatcttctctactattataaaaattgaatatgtttttgtcagtattttagtacgtctgtcggtgatatgggaccgggagtatcatggccagaggcttgaggcagacgcaatcgcccacgtggcctggcaccttcggggacgtcgggcccgagggtgaggtgtccgccctcctcctgatctcccccgagggggggtcgggttgcgcttgccccggcccctagggccgaggcaccccgaccccttaaggacgtctgcgccacatatatgggataagtgagcacagctgtgctcacctaacagcatttattgcagtctggtcaagcgtgtcacgctgcatgcaacgcagcacagcgcgttcctttatccggtctgtgaccagtcacagaccggtcagatcacgggttaggtggcgactgacgggctgacgcacgctttgccccgtcccgtcaagacgaaagcctctaggcactcgtctcaagccggagctagcgtgttatctcttagagataacacgttagccctggtcagatttataccaggcttcatcctaaccattacaggcaaggtgttacacaaagaagggcgaacatgcatgttgttaagctgacgcgtggtggacaagaatgaccggtctggcactggtcgcgtcagctacgggcagccacgatcccacgttgcgcctgtctccgccgggagtggaggtaggtgtgggctgtcccatcggagtgtcattcggacagcaatcataccaatctccgtccataaagagaagaaaagtccagtttggaaagggaagggtgcatgtggtatccccttgaagtataaaaggaggaccttgcccatagagaagtggttggttgattcttttccagattgagagctgagaacgggggagaagtcgactcacactttgtagctcattcatacacaaatccacaaaaacacaggagtagggtattacgcttcgcagcggcccgaacctgtatacatcgccgtgtctcgtgtgtcttgcgggcgagtgatctttccacagacagagagagtgagagagcttgggattgcaccctaagcccctggtcgaaccggcaaaggggggcttgcgcagtctcccggtgaggggccacgagctccgtcatctggcgcgccaggtagggggctcagcgtgtgttttctgagctctcagactcttccgtgtgcgccaagtttttcttgttctgcctaatggccgagcaagcaaaggcgcacgacctctctccgagtgtgagcggcgacgacggggagccaaacccacgccgtcgagctcgtactcccccgcctccacaccaaagtcctaagcagggggaggcgctcgagagggttggtaaatccgcagcgtcaccggttgcgggtgatgcaggagaacggcgagatggggagcgttgcctcctcgtctacggcgacggcagcacgcctcagggcgcgcttcaggctgctagcgcgctcctacgtcacccacccgtcgtccatgaccctgagtctccagctcagcgatggctggacgacgtggccaacttggtcgtgacggcccagcagcgcctgggtgctggtggacggtccgccgccaccaagacttccggcgccgctaccaccggttccgtgtcatcaaggcggagggcgcggcgagcggcggcggctgcacggcattcggctaccactccctcgtcgacaccttcgactcgggaggatcagcatggggagccggatgcccgcctcaacatcgagcgccggcgtaatagccggcgtactccccgtgcaacggagggcgcctcctcgtccagagtgtcacctcgacatggacgtgaggatcagccctccgtgcccccggctggtggtgttggctgtagagcctttgtggcgagtcttcggaatgtccgttggcccccaaggttccggcccaccatcaccgagaagtacgatgggagcgtcaaccccaccgagtttctccaggtctatacgaccgggatcgaggccgctgggggtgacgacagggtcatggcgaacttctttcccatggccctaaaaggacaggcgcggggttggctgatgaacttgtcacccgcgtcggtccactcctgggaagatttgtgccaacagttcaccatgaacttccaaggcacatatccgcgcccaggcgaagaagcggacttgcatgcagtacagcgaggcgatgatgagtcgcttcgctcgtacattcagcggttttgccaagtccgcaatactataccatgcatccctgcacacgcggtgatctacgcgttcagggggggcgtgcggcacaaccgcatgctcgaaaagatcgcttccaaagagccccagactaccgcggagctttttcagctcgcggaccgagtggctcgtaaggaggaagcgtggacatggaactcctccggttccggagtggcagcttcggccgcccccggatccgccgctcagacagggcggcgtgacaggaggaggaagaagaggtcggaccgttccggcgacgagggtcatgtcctcgccgtcgagggcgctccgcgggccacccgaaaggggaggcctgcgagcgacaaaaagaaagaggctggtactcccagcagggagcgccccgccggcaggtggtgctccgtccacaacacctccctccacgatctcgcggactgtcgtgcagtcaaaaacctggctgagcgaacgaggaagtgggaggaggacaggaggcaggaacgccgtgagggcaagttcccggcggttccttccggcaaacggcgaagtgaggccaagcagaaggcccccgctgttgacatcgatgatggtgatgatgacctaggtttccaagaacctggggccaccattgccaccgtcgatggaggagcgtgtgctcacgtctctcgccggagcttcaaggctatgaagcgagagcttctggccatggcccctactcatgaggcgatgcgtcgggcgcggtggtcggaggttgctctcactttcgaccagaccgaccacccaccgtgcattgcccggggagggcaggttgcgatggtggtttcccccaccatctgcaacgtgaagttgggacgtgtcctcatagatggaggagcggccctcaacatcctttcccccgtggcttttgatgccatcaaggccccggggatggtgctccgaccgtcccaaccgattatcggtgtgacgccggggcacacgtggccattaggtcacatcgacctaccggtcaccttcggtggacccgccaacttccgcacggagcgggtgagcttcgatgtggcggacctcagtctgccctacaacgcggtcctagggaggccagcgttggtgaagttcatggcggcggtccactacgcctacctccagatgaagatgccgggccccggtggccccatctctgtccatggcgatcttaaagtcgcgctcgcttgcatggagcagcgcaccgaccgcctcgctgctgcgtccaagcccgagggtggtgacgagaggcttggcccctctgcccccaccgccccgaggcagcggattgccacatacgacgaggtcccggtcaaggaggttgccttgggcgacggcccatccaagaccacacggatcggtggtcttctggatggcaaataggaagacgcgctcgtctccttcctgcgggcaaacgctgacgtcttcgcatggagaccagcggacatgcccggggtccccagggaggtgattgagcaccgtctcgccgtgcggccgggcgcaaggccggtccggcagaaagtgcggcggcaggccccggaacgtcaagccttcatccgcgaggaggtggcgagacttctggaggccggattcatccgtgaagtcatccatccggagtggctggcgaacccggtggtcgttcccaaggcgaacggcaagcttcggatgtgcatcgactacaccgaccttaacaaggcatgtcctaaggatccttaccccctgcctcgcatagatcagatagtcgactccactgcggggtgcgaccttttgtgttttctagatgcatactctggttaccatcagatccgcatggctagggaggatgaggaaaaaactgcgttcattacccctgtaggaacctattgttatacatcaatgcccttcgggttaaagaatgcaggtcctacttttcaacgaactactcgaatttctttgggtagccaaataggacgtaatgttgaggcttatgtcgatgacttggttgtaaaaacgcgcaaccaagaaactttacttttagatctagcggaaacttttgagaacctccgctccgcccgcataaagctgaaccccgataagtgtgtgtttggtgtacctgcgggcaagcttctcgggttcttggtctctgcccgaggcattgaggccaaccccgagaagattcgagctatcgagcggatccgcccccccagcaaacttagggatgtgcagtgcgtcactggttgcatggccgccctaagtcgtttcatatcgaggctgggagagaaggcgcttcccttatttaagctcctcaagcgttcggggccgttcacttggacggaggaagctgaacatgcccttactcagttaaaggcatatctcagctctcccccggttctagtcgccccggagccaaatgagcccctgctactttacttagcggcgaccccccaagtagttagtgcagcgttggttgtggagcgcgatgaggacaatcctcattctgcgcacccccactctgtgccgacttggcccgggagcaggcagggaggagaggcccccgagtcgaacggtggcctaaggcccctgacgaccggagtcggccctctgcccgcttgtcaaacggtgctgagtgcccccgaccctcaggaaggccccgaggccactgagggaaggccgcacttatcgccctttggccccgaggctaaccctgtgctgattcgacccgggagagagcagggagaagaggcccccgagtcgaacggaggcctgaggcccctgacgaccggagctggccctttgctcgcttgtctgacgacgccaggagcccccgacccccaggacggccccgaggccactgtgggaaggccgctcctgtcgtcctccgaccccgaggtcatcggcacagaagacgagtgtgccccgaggggccacttggacgaagagcaccccggggatacggcccctagcgaagaggatcggccccgccgaaaggtgcagcggcctgtttactttgttagtgaggccctccgggacgccaagacccgatacccacaggcccagaagatgctttacgctattctgatggcctcgaggaaactgcgccattatttccaggcgcatcgggtcactgtggttacgtcttaccccctcggtcaaatcttgcataatcgagagggtacaggacgagtggtaaaatgggcaatcgagctttctgagttcgatctgcactttgaaccacgccacgctatcaagagccaggccctcgccgattttgtggcagagtggaccccggctccagagaccgtctcaatccccgaggccagcgcggacccctcacagctgcctcacgccgcccactgggtgatgcaattcgacggttctttgtctcttcagggcgccggtgcaggggttacgttgacctctccaaacggagacgtcctcagatacttggtccgtctcgactttcgagcgactaataatatggcagagtacgagggactccttgccggactcagggtggcagccgggctggggatccgccgcctcctggtgttaggcgactctcagctggttgttaaccaagtctgtaaggagtaccggtgctctgacccgcagatggacgcctacgtgcgccaagtacggcgtatggagcgccattttgacgggatagagcttcggcatgtgcccagacgggataacatgatagccgacgaactctcacggctcgcatcctcgcgaacccagaccccaccgggcgcctttgaagaaaggcttacccagccgtcggcgcgacccgaccccttaggggagacggatgcgcctgaccggcccccgaggcccgtcggagtccaggcctcgggacctgaagggagcgctccaagctcccttagattgattgcttggatctctgagatccaaacatacctcacagataagactctacctgaggaccgcgaagggagtgaacgcgtacaacgcatttccaaacgctacgtgttggtagaagggaccctctatcggcgcgcggctaacggaatcctcctgaagtgcattcctcaggaacaaggcgttgagcttcttgctgacatccatgagggcgagtgcggagcccattccgcctcgcgtaccctggttggcaaggcctttcgtcaaggattttattggccgacagctctcaatgatgcagtcgatctggtccggcgatgcagagcgtgtcagttccacgccaggcaaatccatcagccggcccaggccctgcaggtcataccactgtcatggccatttgctgtctgggggcttgatatcctgggaccgttcaaacgggccccgggcgggtttgagtatctgtatgttgcgatcgacaagttcactaagtggcccgaggcttatccggttgtcaagatcgataagcactctgctcttaaattcattaagggcatcacggcccgttttggggtgcctaaccgtattattacggataatggcacccaattcactagtgaactcttcggcgactactgcgaagacatgggcatcaagctctgcttcgcctcacctgcccaccccaggagcaatggccaagtggagcgcgccaatgcagaaatccttaaaggcctcaaaaccaagaccttcaacattctcaagaagcacggcgattcatggatcgaggagttgccagtggtgctctgggcgaaccgaaccacaccaagccgagcgaccggggaaacgcctttcttcctcgtctacggcgcagaagcggttctcccatctgagctcaccctgaggtctcctcgggccaccatgtactgcgaggctgatcaagatcagcttcgtagagatgacctcgactacttggaagagcgaaggcggcgcgcggccctccgagctgcgcgctaccagcagagcctgcggcgctaccatcagcgccacgtccgggcccgatcactctgcgtcgacgacctcgtcctacgccgcgtccaaacgcgtgctggactgagcaagctctcaccaatgtgggagggtccgtatcgagtgatcggtgtcccccggccgggctcggtacggctggccacgggcgacggcacggagctgccaaacccgtggaacatcgaacaccttcgtcgcttctacccctgaagggggggtcgggtgtcaggttctggctcgggccaaccccgcacccccctcgggtgtgcaggatcggccgggggctaccacacatgcacatatattcctttttccttcatttcagcatttcaataaaaacgttttcaatttcctaaaggttgtgtctgtgccgtttttccttctgaagaatcttaacttgagataaagtcattcgtgctcaaccttgccctcgggggctcggttcggtcagctaaaatcgccaaccggggcccagaaccgagccgtgccccggggcgtggtgaactccgggggggaatcggcaaaaacccacaatcgggtcacccatacccctcggtcaccacgttcccggcctggccagtctcgacatgtggatctccccaggcactagcccgacccgagccattcgaggactgggacttgggcacgggcccttatttcaagctaaggcgcaaaaggaccatggcacagatcatcctcatctcgtatgtatagcaaaataaaactaacacaaaaattttttttcatcatttctgattgcagattaagttaatttgtacaaaaaagaggcatgaaggccttagaagaaagaaaaagaaaaaagattggcgggggcctgggggctcattctgacgcgcccgggtcgccggcctcgtcgccaccatcgtcctcaccgctggcatcgccctcctcgtcggagctgggggcgaacgcgagccgaggggccgagccctcgaagccgttgacgatgtggtcggcggcatcccggacgcgcgcgcgtgcatcgtcctcggtcccgggagggaactcctccagcgccatccatggggagaagttggggtcccgggcctggtaactcgctagcacgagttcgaccgccccccgggcgaggtccctcaaggatgacttaatggtcttctcgagctcctcggggagttgttcgaggacccaggccatcctgttgaggtgcggagcgaggccttccaggttggcggggcgcatcctcgtctggcctttccagaggcccgcttgccgaccggcgcgatccatgcgggagaccgagtcccaaagcatgtcgggccccatctcgcccgccaagcggagggcctcggcctccccgatggaggaatctagtgcgcgctgcatgtcagcgacggtgtgttcggcagccgcgaggcgagcggctaagtcgctttcgcccgcagccgccccaccgacgcgcgcccttgcgtccagctctttttcccgcgcctcgaggtcggcagcccgctgctccagtgcggctctctcggcgcggacgcattccagattgcggagcgcctgctcctcctgcgctgcctcgcggagggacaggctgtccgccagccgtttggtcgtggcctcagcctcctcgagagctcgctcccgctcagcgagtgcgtcctcgcggaggcggagcgtgcactcctcctcggcgcaggcggcctcgtgcgccgccagcgtcgcctcccggagaacagcggcggcctcgcggtccgtcaagcccctctccacggcgccggcgtgttcttccagcgccatggcacgggcctcaagagcctcctcgcgccgccgagacgccgcttcagtctccgttacccgccgctctcgggcagcggcggagtcaaggaccccttgggcggcgtcgagctttttcttcagctccgcctcccagcttgcgtgctgaaggcggagggtgtcttgcgcctcgatcatcgcggtggtggcgatgagggcggccgcccgctcctcctccacctcacgggcgatctctgccagcgccgctttccgggcttcaagctccgagacatgacggcggtgagccttacggcccacctccaccatggcgtccaccgagcgccgcccctcctcaacacgcgcccatgcggcctcgagctccgctcgttccgcacgcagggcctccacttgggcgttgaacccatccagcactgcggtgtttgcggcggccagggcctgcagaaggggctcggcgctcagcggggcgacagaagatgaggagaagagccgccttggagaaaatgcgacgcggcttggccccccggaggatgcgctgggctcggggatgtcccccgggcccgtttggtcctgggcgtcgcccggtgaggtaggcccaggcgatgcgcccgcggcctcgtcgcgagccgcttcggaggatgtcgcctgagggccgcccgagggagtgggcccaagtgacgcgccagcagcggctgtcgcctcagcctggcgagcccgggcggcctcctcccgggcagcttcttcggcttggcgagcccgggcggcctcctcccgagcagcttcctccgcttggcgaacccgggcggcctcccgggcggcctcttccgcttcccgaaggcgatctgcggcttcacgccggtcagattctcgcctccgctcctctgcggccgctggatcctcggcctcggactggccggacttggagtgacgggaggaatgcgacgggacatcgctgaaacagaagaaaaaaccagaagacgaacaaaatgagtaagaaaaaacttctttttgggagaaagatggttgcaatgagagtgagacgaacctgcgagggggtcggttgaatgaccaccttggaggggaaatcaggtttccccggcatggttccgtctcccccgttttgcggagccgtttcttcttgcgctccccctcgggctgcgacgtcggcgcggccccctccgggcgccgactgctggcacgcgccgccccgccccctcggggaggagatgggggaggtgttcctcccagcttcctcttcccctgggcgtcggcagggcggctgctccccgagcccccgacgcggggcccagaagcacgaccccctcctggggcagattgttccccccggcggcgctcgcccgcgccgtcgtggcccttaggggctctctcctctgaggccccgacccccatcataatggttagaatggaggcgcggtcgggatcgctgcagagggggaggatctcctgaggaatgcgagacgcctccgcggagctaagattcagcaccctttggaccacgatcttgaagtcctcgggagcccaatcccatctggctccctggtgggtccgcatgtaatcttcaggcccagtgtactcccaggcgctccgggcgcgtcgttggagcggcgcaatccggcgacggaggtaatcgccgtacaccatggccccggtgagcccctgggatcgcaggccagccaggcggtcgaggacggcgtcgtagtcctcccccagatctaccgtcgcccgccagctggagacctgcgccgggggctggcttggaagtcggaggcgcgcttcgttggcgaggggggtgtagaaccagtcgctcttccagtcgtcccacttcttgcggaggacgcaggggatgtagcggttcaacaccggcccccgcggctggaagtagcagccgccaaccaccgacggcggtgacaccgactgcacggtgaaaaaccaccggaacagctgaagagaggggcgcaccccaatgaacatctcgcacaggtgcgcgaagatggccaatgtcatcaccgcattgggggtgaggtgcgccatctggagatcgtagaactccaggacatccatgaagaaatgagaaaatggcgggaccagcccagccatcgcgaaggggaggaagaagatggaccgccccgggtagtctggtgccgggcgcccctcgcccagcatcactatctcccgaccggtggcggactccggcatgaagcggcgcggcagtccggcgtgcctctcgttcacgatgcgggaaggcggtagtacactgccgtcgagcagagcagagccccgtgccatggcggtggaggaagagatgattgagaacgagcgcgtgtggcgaaagtagggcgtagcagagaaagagttagagctcaggcggcgaaggcaagaggaacaatggcaaaaggaagggagcaaatccttttctcgatgcttttatacccttgccatcgctgggcctggctcctcgtttctcgcgcccactatctcgctccctcgtatctcgctatctcgctccctcgtttctcgtgcccacgtttccactaatcccattcgcccgcttacggcgcgtgaagtggatatgcggttgtggcaatcgaaatggattgtatcgtgcgcgcgttaattacgctcgccgaccgaagcggcgttaccgtatctccgggcgagacagatctgctcacccagattcgcgcgctgctcaagtggtgtggcagtcttgaatagaccgcccattatggacaaccaaagttatcaataccaatgtgcatggattgagaccgttgggtattttgcccagctacggaaaccggtcccacctgtcaccaggctttaggggtggcgtcacacctgaccgcttcccttgggaagggaaattgctctggcataacgccgggggctactgtcggtgatatgggaccgggagtatcatggccagaggcttgaggcagacgcaatcgcccacgtggcctggcaccttcggggacgtcgggcccgagggtgaggtgtccgccctcctcctgatctcccccgagggggggtcgggttgcgcttgccccggccccgagggccgaggcaccccgaccccttaaggacgtctgcgccacatatatgggataagtgagcacagctgtgctcacctaacagcatttattgcagtctggtcaagcgtgtcacgctgcatgcaacgcagcacagcgcgttcctttatccggtctgtgaccagtcacagaccggtcagatcacgggttaggtggcgactgacgggctgacgcacgctttgccccgtcccgtcaagacgaaagcctctaggcactcgtctcaagccggagctagcgtgttatctcttagagataacacgttagccctggtcagatttataccaggcttcatcctaaccattacaggcaaggtgttacacaaagaagggcgaacatgcatgttgttaagctgacgcgtggtggacaagaatgaccggtctggcactggtcgcgtcagctacgggcagccacgatcccacgttgcgcctgtctccgccgggagtggaggtaggtgtgggctgtcccatcggagtgtcattcggacagcaatcataccaatctccgtccataaagagaagaaaagtccagtttggaaagggaagggtgcatgtggtatccccttgaagtataaaaggaggaccttgcccatagagaagtggttggttgattcttttccagattgagagctgagaacgggggagaagtcgactcacactttgtagctcattcatacacaaatccacaaaaacacaggagtagggtattacgcttcgcagcggcccgaacctgtatacatcgccgtgtctcgtgtgtcttgcgggcgagtgatctttccacagacagagagagtgagagagcttgggattgcaccctaagcccctggtcgaaccggcaaaggggggcttgcgcagtctcccggtgaggggccacgagctccgtcaacgtcatccgtgtatgagtcggtttttaagttcgcttgcttttggaaatacatatttatatttgagttggtttttaagatcgttcacttttggtaatactgaaggaatcatataagaaatctgtttaaaaaaactcacatgctaactcgagacgattagacttctaactgtaactcataattttctaaaaaaatatatatccaagcgaactccccgcgataaatttcatcttaactaaaccatacaacagattaaaatagacttcacccattgcaacgcacgggtattttttttctagttttttaagaaatttatcttgggtcaaaaatatattttttctataaatttcatcaaacttgaagcagtttgattttgacaaaatcaaaacatcttataacctaaaacggagcgagtatattacaagattagacagtacgtatactccactgaatcggccagtagtagtatgtcatcgatcgatcgtgtcctgttgcatgcgtctgccgtgttctggtttctggtaggacgaactagattctatcaaatcgaatcgatcaaaggcaaattaaaggcatgcatgggacggcgtgaagtatgtactgtagaggtagaggcgtatccggccggccgggtggtcctagaaagccgtggtacaatgcaggcagccatagccgggcacgcaatgcatactgcagcccggcaaatcagtggcagtaggctgcaactgcaagcaaagcaagttcgtactactggctgcatcgtgtaatactccctccgttttatattaaaattcgtttgattttttttatcaaactttattaagtttgattaaactcataaaaaaaatttaggaatatctgaaatatcaaatcagtttttattaaatctaatattaaaatattttgataatatgttttgttttgtgttttgaaaataccactatattttggcacctcccaagctaaagcgcgttgaggtaaccgtgacctctgcgagcatgataagccacaccatggtccccctaccacgggcgttccgtcgcctccaaagtgaaggtttgagaccgctggcaatatatacggcctcatcttttcgcttatgcttatcagtcaaaatttgaattttcaactttaaatttgaagctgattttgagggttttttcatcaaagtttattttttagcctttacttttaggtcgctaataacacgtatataaaagttttattaacgaattacttctcatttacaaatatgctgtttggtttattttacaaataagccaaacaatgagggcgatagtatggcctaagtgttggagcggctacagtctagctagtacgatgggtaggcatgcagcagtgagcaagccatggctgcctcctactggccggccaagccagccatcctgcagcctagtactacttggtagctagttcctcctagtagagtagtactccgtagtacaagtatagtagcaggatgaggcagagaggccgggcgtgcgtgttgcaatgcaatgcattgggtgttttggtgcgtgcgtcgccggggaggggatcgatggtggatgaactggcatggcatcatcgatcacacctgtgccggccggccggagctagcgagcgatcgagcgaagacgaagagagaaagtgagagagattcctcagcatgattgtgtcgtggaaggaaggaacaagcatgcatgcaacccacaacccaagctgcaatattgcatgttcatcgtactacataggagtacagaccagtagtactaccctgctttgcttgctgcatgtcgcacatcgaccatctatctgtctctgctactgctacactcctactcctactccgcgatcgatccatcggtgtggcttggccgcaccgtcgtcgacccaaccacaaacgaactgtctcgtcctcctcctccatatccgaccatccgtatcagctgttgcctgccgcttcagcagtcgacccacccgccgatcgaccaacctgccactgctgactaaccgcgccatgtcctgctcgcaggcctcaccctctttttttttcacaaaagccttggggatcgatatttattatatatctatatcttacaactgctgacgcagattatggggattacagaggaaaggaagaatacgctagattgaaagacaatcatattgcactcctggaaacaacaagtaaacaaaaggagaaagagcttatgtctaagcatcaggaaaaactcctaggagactaaggctgtgttcgggcatccttgtacttacccatccggaacagtaatcacagaaaatagagtggtctattagcgcttgattaattaagtattagctatttttttaaaaaaaaagattaatttgatttttttaaaagtaactttcatataaaaatatttttttttgcaaaaaacgcaccgtttagcagattgaaaagcgtgcgcgtaaaaatcgagggagtgaggttgggaaaaagggtgccaaacacaggctaagggcacccacaatggttatctataagctctctacaagagatccatgtcagcatatctattatataattaaaggaatagaaaaaggagccttcacgttcgctctcatggcctagaaattctcacattaatcggagaaaaagaaaaaacagagtccatatagaaatacaatttacaaatagctgaaattcggaattaaaaataaggaatattagaagaggggactagagtccatatagaaatacaatttacaaatagctgaaattcggaattaaaaaataaggaatattagaagaggagactagagtccatatagaaatacaattagaaaatacctgaaattcggaattaaaaataagaaatattagaagtagagtatagactccatatagaaatacaattaggaaataactgaaattcggaattaaaaataaggaatattagaagtagactatatagtccatatagaaatacaattaggaaaaaatagaaattcagaattaaatatataatttaaggaatagaaaaaggagcctccacgttcgctctcatggcctagaaattctcacattaatcggagaaaaagaaaatacagagtccatatagaaatacaatttaaaaatagctgaaattcggaattaaaaataagaaatattagaagaggagactagagtccatatagaaatacaatttacaaagaaatttggaattaaatatataattaaaggaatagaaaaaggaacctccaagttcgctctcatggcctagaaattctcacattaatcggagaaaaagaaaagacagagtccatatagaaatacaatttaaaaatagctgaaattcggaattaaaaaataaggaatattagaagaggagactagagtccatatagaaatacaatttagaaatagttgaaattcagaattaaaaaaaggaatattagaagaggagactagagtccgtctatatagaaatacaattaggaaataactgaaattcggaatgaaaaaaaggaatattagaagaggagactagagtccatatagaaatacaattaggaaataactgaaattcagaattaaaaaaaaagaaatatgagaagtagagtatagagttcatatagaaatacaattaggaaataactgaaattcggaattaaaaataaggaatattagaagtagagtatagagtacatatagaaatacaattaggaaataatataaattcggaattaaaaataaggaatattagaagtaaagtatagagtatatatagaaatacaatttagaaaaaaaaatagaaattcggaattaaaaaaataaggaatattagaagtagagtatagagtccatataggaatttaaaactaactaaaatttggaataaacataataaaattaaaagtagagtttagagtctgtataaaaatacaatttacaaataactaaaattcaaaattaagaaaaacattggaagaagaatttaaggtcaatataggaatacaaatattggaatataatttagaagcaactgaaattcgaaattaaaaattaaagaatattgaaagatgagtttagagtccacatagaaatacaattagaaataataaaaattcataaataaaaatgaattaaaaaaagaaatattaaaagacgagtctagagtccatataggaatatatataatttacaaataactaaaatttgatattaaaaataattaataactaacacgtatataaaatataatataaatattacacattagtagttttgtaaagttattgcaaaatttaaaattatgttgtcattttaatatatttgaataatataatgagaaaacatatatgctattatatgagagaaaatataatgatgctagccgcgcaatctgcgcgggccactatgcttgttttcctaattggaagagattaaatgaagagagagagagcaaagctatctactaacatggagatagtctatagagaaaaaagaggcaatggattagagagctatagatacccatgtagacataccattgaaatggtttactattaatctagtctattgttgaggtgtacatgttttatagatagcaccttactttaccattgcgggtgctctaagagcatgtacaataagctgactcagcatgctccaaaacattttatattatctaaatcctacgtggaagaaagagaattgaagagagaaggaagcgagcgaccattctgtcgccagcgctagctgcatgtgcctgcgcgcttccgaataaaaaatacgctttgcggaccccacaaccaaaccgtctgatcccctgtatgttcccatcttcatgcctgctttttctcttccgctccgtcgaatgctaggcgaaatctccgccgcgccaccaaactgcgtcgctcacctcatctgtgttatttttaaaccgcaccaacccaaagcttcccctttcttacatgattcgatcaacccccgtgttcgccgcccttatggacacgagcgttcctttctaacctgacctcaattgtcaacgcccgataaaaccgtgaatcgatttatactgtaagtgctaaccactagcagagcttcaagattttataactaggccgacaagtatttgtgtcgagaattatattttcaggttatataaaagggcattatagttcgtcgtgtcgttacataataatggcataatataaggtgtgtattagatgtaatatataccaagtagataacggatctagtaccaaatgtactaggttgtaacatctccgcccagggcttaataggattgataggatactcatatcaacaatttgtaacttctttttcagaagccgatctcgaaagaacataggttaagcgtgcttggttgcagaaaagacttgtgttggtctgtgagggcagtctatggcctatgaaagttgccagatgtaagcgggcccaggccggtctgcgagaggcgggacgttgcacaggcctcaggtgttgggtacataaactctccgtccctaaatatttgacgccattaacttttttaaacatgttggaccattcgtcttttttaaaaaatttaagtaattattaattatattcctatcatttgattcattgttaaatatatacttttatgtatacatatagttttacatatttcaaaagagtttttaataagacgaacgatcaaacatgtttaaaaaattcaacggtgttaaatatttagggatggagggagtatttaccaactattacaaacaacagatccacgattagaaaaggaggtgcatgcgcatgcaatatattgcatatgcactcggtgtgaaatggcctacgtgcatcagtaatgatgcagctaatgtccgatcaatcgtactaaaagaacatcaaacactcgatggatgcctgccatgcaacctaggcatattcatcaatggcaagtgcaagtgcaaagctagctgctgccgctgccgctgcacacgctccactcaaaacaaatcatagcgtgatgcagaggcctatctactgtgcgcacacgagtaattataagtgctcggattactgtctctctctccgaccatgcatgctgttcctcaatagccgctccatctcctcattagaaaatctctttttttttaatatatactactaccatttcatattgggttattgtattttatattatagacaacttgtctattatttcctccgtcctataaaaaaccaacctagtatcagatatagaccacgaatctagttatatatctatccagatttgtagtactatgatgtgtctcattcggtactatattcgtttttcatgaggcggatgggagtatctcataaaatatacgcgcaccaagataacattaatttgaatattcttctttatctgttggatatataggcctaatgggagaacgtccacgcacggtctagatgtatgcaaacacattcggcttggcctacatgtttctgaccctttgccctgaaacgtttttacataataattttatactataagctttttaatatagaatcattctatataaaattatttaaatccaatcagtattagagcaggtacaatagcaagctataagccagctgcaaacatattttaaggagataaataaggagagagaagagcagcgggctacagatttatagccagctgtagcatggactcaaagacacagtgtttgtatgacaggtgggaccaggtattaatagtgtagtatgtaactattgtatgaatgagctattagattggctatggatgaattgaatctataaaatcgaactttcagtgcattaacttacaagaagatcgaggaaattaatgatgtggcggaaaaagaaaaacacgagcattcgtgattcgtgtgtggcccggacaggcgaacattccggcactagcccttaatttcgatcttgtggttaaagtttgttatggagatcgtgttgacacttgacagagtggcctaattggtttcttatgctgcagtgagagcgttaacattgatgtatggctgacacatagcacctgatcattaagcaatggtgggcccttcattacagataaaacgccccctaatttctgcattgaaatgaagtgaaattgactaggtactagagtatatgatccatcatcataatagccatgcacctgtgttttgagtgtgtgtaataataacatctatggcactgccactaatacttgttcaattcatagctaatctgtagaggtttttcaagtctgaactgagattactttggagcacttacaaaactagagaatcaatcgatgctctcttttttttaatcaaggatgtttatacaaaggccaacactagaaacaacaacgttaatatagatagacaaaatgcaaattattgatggagctggatataattcagagcagaggattcttgtgcagcgagacaggggtaatccctagcgataacttatatagaaatttgatggataaagaaatatagtagtacatacatacagtctacagaagaagagaagagataagaaaagaaatgaaaagaaaaagaagaaagtagaaaagcagagtccgtggagcagagagaagagcaggacagagttaatagttatcacgcggtaaattaattaagagcgggacagagttaagagcgggacacgcggtaaattaattaagattatgataattttgaataggacgaatgggcttgcgttgcatcgctggcgaatggcgatggccggccacgcttgcagctcgagtaaccttagctatcactctgctagctactcctacgccggctcctccttccgtcgcatagtataacaatttgatattgaatgaaatattttacagtacaataaatcttaacacttttttacccagatttattgtacggtaaaattttttatttaattgtataagttgctatattataggacggaggaaatagtacagcagtgagtagctaggagtacaaacttaattactagattaagtagcgataaatgaatatccaggtccagttccaggggaggggacgacgcgcactcctttctccagctgcgcgcgcgcatgcgctgtgctttaactctctcacaagacaacctaacctaaagcaagctaagctagctcctacagggagtatatagcacgccggccttgcacttgcacctcacctcgcctcccttgtatatatacactcactagtacactagtagccggccggccggcgagcgagagaggtcgagtcgagagagatcgatcgagcgagagctacctagctagctaggctataggcctgcacacacatacagctagctagctagcgcgctcgagacgatgctggcctgcatcgcctgcgtcaagcaggaagatggcggccgccgccaggacacgccgcgcgccggcgccggcgccggggacgacacgcccacctgcagggaccccgtcaagacgctcacctcccaggttaatttcttacttaatttattactactataccttcatttttctccttcctttttgtttgctgctgctgcttcttcttcttcttgttgttgttcttgttgcaaccggccgggctaccttgcttgcattgcatcttgtttgccatcgatctgcactccagcttattttcgatcgatactatcatctgttacttaaccatctgcaccaccgtaccatccattactttcttgaggctaccgatcgagctttaattaatttattaattattagctgcgcaatatataaataatacatatatatatatatatatatatatatatatatatatatatatatatatatatatatatgtgcaagttttttttctatataaatatacactattaattagccacactatatgctcagtgtattactagtagcacatcgatcgatctgccgatcgaggatttgatcacggcacatagagggttgttatgacacccggcacttaactccgatcctgtaccatcgattccttcaattataatcgggtagtactgtcttaattcataattaaataaataaaataaaattactagtaaatgctaactgagtacgtacgtactcagggtcagagatgcgtactacgcacatatatgtgcagtatatacatgtacgtatatggcgttcgcgaaaaaaacttagtacgtactgtatatatatacatataaagtattcgatgatttcaccaatccaacacaacgtacaatataatagtacctgcagatgttgtactcctacgtaatgagtagtgtttagaacttattaatttactactactacgtcactagctagatcgattgatttggccttatatatgtactcctacgtgtttgaaggttctctagcactacttacatactcgagactgattaatttcaaaactttacatcgtttgtttcactgtttggacggtagagtttgctatatatatacacctagcttttcctcttgcttttttatatgatacacgcaaggcaattaatatcagagtcttatactctctccgtactcgtaaagaaactcgtttaggacaatgtttaagtcaaacctttaaaatataaatcattaataactctcaagttgttgagtttgaaaatgtaaaaattatatgaatagatttgtcttgaaaaatacttccataaaagaatacatatatcactttccaataaatatttttatagaaataagaagttaaagttgtgttttggagaccgtgaagctgttcaaaatgacttctttttttttaagtacggagggagtatatatatagaagaactaggtagatagagtccccaattaattgcattacggtagtaattaactgacaaaaagtgagtgagagagatgaagctgcagctacataaattaatggacatgatgatgaggacggaaacgataataataatacagttaagcaaagtgtgatgctgcgagcagagcagtaatgatcgagagaggatgagtggctggtcggccggccggagatcagagggcgtgcccgtgcagtcgctttcgattgagcaatatatatatatatatatatatatatatatatatatatatatatatatatatatatatatatatatatatatatatatatatatatgcgcgttgccatcctctctcttaagtttactatatgccctaattaattactagcttaataatgtttttatacaaccggaatatatacccctctattctaaaaatacttatatttttgaatggatgaagtagtgcatagtaggttaataataatgccagtgtaagaagcaaccagaggtattaccaaacaagagagaagactgacagtacagcaagactacaagagagacgactgaccattgtctcgcttggcacgtcttccgaggcgtacgtaggggcccaccaaccctacccagggcatggatgatggatgcgagcgggcgtgtacggtggatgcgtggcccacgtgtcggaatcatggcagctcaagctgatgctgctgctgataataacagcatacgctgctgcttttcgcagcttcattgctttggctgctgcatgcatgagactgtacatgatacagatgatgcagtactagcaaaacacaaaagccaggcgccaatcccgatccatcatccgatctccatcgatccatcgatcaatcgacctaccttactagtattgcattgcagctagctactaatttactgtaggatcgatcgagtaacaactgtgatccatggccggccgtgggctccattgctcccagcagctgcctccttctgctacctcagctcatcgatcgaccaacagcatgcagacatcgatcgatcagatgtctgcaagcttcaacagatgaagctgctaattaactattagcgccaaccttaattaaatagtagtagctacctaatcagtccaacgtcgtccatgtatctctatcacttttctcttttcttctttaatcgatcgatcgatcggatgaatactatagtatactaacacctggtggccggtcatctgccaaaaagaaacgcatctcacttctctccatctctttcggcgaattgaagctttagctgagcatgacactgacgctagctagctatctttgtgccaaagtcgatcaattcttctttctcttttctctttttgttattattatgcttgtctactagaaacagaatactggaagctcacctgatcaatcatccggccagtacctgcctttaacttcaaagcaagtttcgcgccttttttgccccggcctcttcacgaccgttgttgcatgatccatcgccatttcaccaatgctttcccagctctcccaatctgaaacttttcagagtagcatatcacaagttagcttgcagtagatgcctgattcaatttaaccaatcacccgtttcacccatctgatcaaactaatccatgctttggcatcaatgtgaaaccagaaaagatgtgccccatttagtcctgatcaacatttgttttcacatttggacttgctttgaatccaatgttttcacatccatactttctgtaaggataataccgctaccggtctaccatatgaaaatctgaaattagatcagataggactagatatattgtttttaattagctattcccatagatgtagcagccagatggacactgcacttcatattatttaagctaactgaacacagttactaatatttgagtgatgtggatacagttagttagatactgtatatatgttcaaactgaaactgaagcgggcaacgagatggtcaaaatgaggggacaggtagcgtagtgtaggctgtggctgccctggttggtggatgatcacctttcactttgtgtcgtttccttggggagagatcctggaacaaattaaagcaaagcacatagtatgcgtcatctacatatgtctattgtttctttctttcattcctcccccacaaagagtggccatggactattcccttgttcttttgtgacaaagaagctttgtgccccaacttcccatagctatgtgtccatgtcttttgcttctcattttctctcttttttcaacaccaaagtatatgtagtataaggtatgctcagagcttcagatgagatattgatataaggatggggctccagcatgctttctttctcaaaaggagagattgagagagtggcactagtgcactgcaatgcaaataaagagatcccctggttggatggatggatggggatgttgcactgcatctgcattgctgcttgcatgcttcagttgttatcagtagcacggcaagaatctatgtgcggggatgttcattgtactagtacatgtttttaacaataacaatacataaaagagaccagtcctaaagtgatgcttgatatcatgaaaggggaaaacaaactgtagatgaaacatacaggcgcatggacagtagtggctagtaatggagttaaatagctaggaagaaaatgtaaatatagtatatacttgtatgagataaaaacatacatatccttgtttcaggttgtgctgctttatatatttacctcatggtagaataagaatttactaccacttactgtgtgaagtgtggaacaggtcgtatttactttcttcttcagtcttgatgaggtagcaatgcaagatggcattgtgcagtctgagctgaataaagattacaaattgattggctataggtcaaatagtggatcctagagtgtaagatagtctttgaaaatgtcattccctgacccctaaaggggaagcagcttcattatctagcattcatatttgaccggagccttcaatggattcactagctgcactgccaatagtaccccaatataaaatcgcccatttgaatgctgcagacagatttgtcgacaactagtggctattagtgcagatagttgcaagatgatgcgttaagcaataacttactagtagctattagctctagacctctagtttccagaaattctggttgtagaaccaaataccttgacaataatgcagataggaacatggatgatatactaggtagtaggactagtacctggcccaaagctgcagtcgtatgaatgagtccaaatcaagagctgaacttccctggaaatcagccagttggaagagtatacaacttattcagcaaatcatgatgccttttaagttgtaaccaagagtaatgcatccagatggaagcttaatgactgacacatacccagaatgagcacaaatgcgtcctgaattatgattcaatatattcagcaaaccatgatccaggtataatcttaacggaaggaaataacatccagaatcagcacaaatgtatgattcattatagttcttttcaggactataatgtgatcgaatagcacaagttcgatttgcattgcttggagaaagcgtttacaatttcttttactacttgttttacctgcagtgtagctatctgctgaatgcagaggcaaccatcaagggctaaatatctcatttcaatgcacctaatgaaccctgatgaagttgacgcaatgtcattttcgtcatcataggacaaaatcttgcatctgatcacattgatatttaagtatcatcctagtgttgatcatcgatgatcccatgaatccaattaggagatgatggatgatggatcatcaaaaattaaatgtgttattaattgttggtgtatgcagctcaaggacatggtgatgaagctgtccggcacgagccgtcatcacggtcagcagaggcgtggcgggtcgccgccgccgaggggccggacgacgtcggtgtaccggagcgggtactaccggccgggcatggtccaggacgacatggcggtgccgccggcgacgtacctgggcggcggcgggacgtcgatgagctcggcgagctcgacgccggcgtgggacttcgcgcggccggcggagggcgaggctcgggagtgggtggcgcaggtggagcccggggtgcagatcacgttcgtgtccctcgccggcggcggcggcaacgacctgaaacgcatcaggttcagccgggagatgtacgacaagtggcaggcgcagaagtggtggggcgagaacaacgagcggatcatggagctctacaacgtccgccgcttcagccgccaggtcctccccacgccgccgcgctccgacgacggcgaggtcacttcacttgttctttcctgactactactagtacaaatgtcatggtccccatgcatgatgtggccggcgaggcggcgacaaggcaacagcacacggccacgacggcgacgttgcctagcctagcctgtcccgttcttggcttggcatcatgcagtgatagatgctgatacgttcttgcctgcatctgcaactctgcatatggcgatgcttttacagaatattgctttcgtcgttgctagctagtagcttgcatcaaaagatgcaacgacgatttgctagctgctgctagtgctgcagagtgcagagcatgcatgcaacgattaaagctggtgatctatggatatcatattcatatatggccatttctctctctctctctctgcatttgcatgaattaaaattaattatttgagcagagggaatcgttctactctcaagtggggtcgacgagggggagccccgccgccacgccgtcgccggcgccgctcaccccggaccgcgtcaccagctggagcgccttcgtccggccgccgtcggcctcgcgccagcagcagcagcacagcttccggccgctgtcgccgccgccgccgtcgtcgtccaacccgtcggagcgggcctggcagcagcagcagcagccgcagcgcgctggcaagagccccgcggcggcgtcggacgccatggacgcggcgagaacgaccagctgctcgtcgagggacgaggtgtccatcagcaacgccagcgagctggaggtgacggagtgggtcatacaggacgagcccggcgtctacatcaccgtcagggagctcgccgacggcaccagggagctccgccgcgtccgtttcaggtcacaaccttcatttttctactactctagctacctatccctgatgtagtatctattaattacttcctgaatgatcagatgatctgctaattactatagatgattgattaaatgcgtttttgagtattgctgatgattttgttcttgcagccgggagaggtttgcagagctgaatgctaagctatggtgggaggagaacaaggagaggatacaggcgcagtacctctagatgatcactttgcattattggtaaatctgggaattactactagctaagctacaagttggatgcttccattttgcaaggaggaattaaactacataaagtttattttacaagtaaatagagtttgtgttccaagttggagctgggaaagattaagataggaggtgggaggtgaggggaaaagaaagggaaaagtttagggcattagtacctgccccaggtaatctgtgactggtgtaccataagttccacacatcaacatccttcagctttgttcaatccaatttctcttgagtatgcctagcaacttatttcacagcagaaaaaaatgtgtgcattttcctttcttaatttaccacctgtaaatgcaatatagatatagtgaagctacgaatcacacatgatagtttcatacaacagccaaagtgatccagcatttacaccgcatgttggcccaacgatcaaaaaaattacaatgtacataaatcggtaaatgtaagctagcaagattaatacagactagagcatttatcagaggcataagcataaacctgtacaattactaaccaaatgaactgcggtaatgcacattgacaccgccaactgatcgatgtctatgtgcaaactaatgtagggcatctgtagtacacactgtgaatgctccacttcatgcaagttcgcgcacacccttgtccagtggaatcctcaacagcaatttggataaatgtgaagaaaagtgatctaggacacgaccaatttgtgtcaaaacatgtaaccggcaaggagaggagaaaaactctggataggaagttaaaatagacatcctaaaccaatcttttgtttctcctttggttcaaaagaaatcagtgaaaatatcagtatggtctaagatcacttctcttcataccttccaatgtttgcaagaatacctattaagacccaagggtatctgcgatttcacatgctgaacttcatccatactttacctgatgaagatgaattaatgtgccgaccagagtgctctaagattatcatcgaacagctgatgcgtagggagacaaaaagtactcccttatgcgtgatgccccgtcccttgctaacatgccctcaaggtctcccagaattcttgccaaccaaatctctaggctacgctgaatttccttgaagttgttccgaattgaactcagtgctcttcttgtgctcattttggcttctgctgtcagttcatcaccaaaacttccttttgcagtctctgcttgcagtgcactgagcttctgcctagtttcagttgctcggtgctgaaggtggaatgcttccagcaagtattctgtttgcctctgtgttctaaactctgagctcagtgttgaatcacaggggtcacttgtttgctgagcaaaattccaaataaatagaagttagtagtttcccactcctgctgcagctgtctaatacagataaggacaggaccagtaaaaaagatatcatgcataacaggaaacaatatatcggcatagtgagtgaagtagtgtacattcgttttcagaatttatgaatcaccttaagtgagccagcataatgtcattgagtgaagcacaattttaaccaacatagg

SEQ ID NO: 7211 - DNA, 44253 bp, Oryza sativa
caaccgggactaaagatcttcctcttattaaccgggactaaaaatcatttttagtcccggtttttaatggaaccgggactattgtggatatgggtcgaccgactaaagatggtttctctaccagtatatggcatttgaattagggttgattaatttctccgtgctagctcctaacccgatcctgacacttaagcttagtctaaggagctctctacttcccaaacttaattagccaattatacaatactatatattatcctgacacttaagcttaatctaaggattttctacttatggcccctttgatttagaggaaaaacataagaattttagaggatttcaatcctataggaaaatttcctatgaagccctttaaaacaaaggattgaatcctatctaatcctttgaaattcctatggaatggacaattctatagagattttggaggaaatttagcaagaccttcaacctcttgctaactttcctttgagtctatctctctcatccaattcatgtgtttttcctatggttcaattaaacggtcattcctgtgttttgcaatcctctattttatacttacattcctatcaaaatcctacgtttttcctattcctacgttttctcaatcctgcgattcaaaggggccttagcaaacttaattatctaattagaaaggtgactaaaatgagagaccatgattttatctttgcacttaagcttagtctaaggagttctctacttatcaaacttacttagccgattagagttagaaaggtgaataaaatgaaagaccataacatttttcaaacgaccaaatagattgattaacgttatattaatagaagggagtttagctgggatttgggttgggaagacttttccgctaatcgattgatcatcgcatttatactgttggccaacagtggcgactgcctggtatggtcattatcgactcatactccaatatgtttataccaactattatatttaaatggccagcagtggagtaataagtaacaatctattatttaaattatgataagattcactcatatatgtttatacaaacttgttactagtaagcattagatcagctgcagattggttgcatcaggtgtacgtacagaaatccttccaacaaaaagcatatgtaccatatgacaatatgtacttatgttgttaacttgttctagaattaactttccatcgagagatttaatcggttaatgacactcacgttcccctggtagccgttgtatatcattttcaggtcaagaataaactaagatatgaacatcacatccatacccatccgacgattaagttaggtggccaatcactcttaccatccatatatgcatatgctccattagttagtacggagtacttctttccaaaatagtataaacattgtcaagtaaatagccaggaatgcttattcgtctagttgcacaatcagaaatatttatattttcaaatggagggattactcaacttttacttacaggcaggggaagtcagtactgagtagctagctaattaccccgttgatcatgcaactatgcagtgacagattctgccagaatttggttcatggccgctagctgcagggcatgtgtgatgtccccagtttgaacagtagagagcagccggcagtatgcacatatgctgcatttaaggaggagttaggaccggagtaggagtactagtacttgtttattaatcactcatctattagcataatggtccatggtgaaagtacagcaaaattaggtgaaggtaacgtcgatattagttgtatagaatcatagaccatcttcccaacagtggtactttcagatcatctgtccttgtttccgtccctgttggagagcgacaatcggaatggtcactgacaagggacctctctgttgcccggaaacgacgaaacatccagttcagagttgcagacttcagacagttgccaaggatcaatggaaaattgcaactgaaaatgctggagactgcattgagattgaatattaattcctccaactataattgaatttcatccatatttttggaactagatgaatatgatatccataattgtttttaccctgggtaatctttagacctatgttatttgtttgtttttatgtgatgttcacatccatgttccatcaaaccatgtattcaacctgtattagaggttgttatttggttcaatgcttcaacttgccacacctctttagacttgtgtttggttcattgctatagttgtggcttacctatacttttttatcttgtctcgcatatcatagacttaatctttatctaattttaccatacttgtctagaatgagttatggcaatattagtaaagatccaaacaaccctgatcttcttattgggcttctcttaagtttatatgcaactggtcccttttaggcccgaaagcttgttcagtatgtgtgctgggccgtatggaaccatgacttatagaaacttctggcctgctcgggccctgagcccctgagcctattctttgtcgagactaattgggatgtggccttttgggttttcaggcaatagaacagtgtgagaatgctaccctcttatcctggcccatttattccacgaagctgaaatttattttagccttttgggttttcagaaataaaaaagattatgcaagtgtttgaaccctttattttcggtctctggacctattcagattgtagtcaaaataaaccttaccaatttttggcaatgccattctaaaattttggcaggatttcttatgtattgatcaaattttgcaacaaactaaatgtagatatgtttttggtaactttgccaaaaaaaaatgatgtgattgaaaatggcatcaaagtgaacagaccctcaataacggagtaccggcccatttattttatcattttgttccggcccatttattcctcaaagcagcagcctttaacgatgtatggcccgtatgaactttacggccttaatcagaggcacagtgttaagaccgtaaagttaggcccactacatatggttgagtaattcagtgttgccaccagcgccgcataaatatcttgggataaactaacttttgaatccagaaatagaagaaaaaaatagtctggacacatgcttgatggttgatgcaagctgatgcactcttttatctttacagagggagctccaggatacaagcatatgctagaattaatttttatacatacgtacgtaggtataaatatatggtgtaataacttaatatatagattttcctaacttgacaaaaagaatcggcgcaactaataattgaggagaaagaatttggcagctcgagaaattaaccggcctgcagacgagcgatcgcctagctaaccaagcaaccaaggcaatccgatccagcaatgctgatcaacgcccgtccgccgcctactttttataccgtgattctaaaaatcgaacataactattgttgcaattcattttttattttctagaagtcccgtcaaccgtcagcggctctgcaactatactcttacacaccccgcccgctgcttctcctttttattgtcattgagattttaaaattcgaatatgattatcaatgttgttttttttttaactttctagaagtcccggcaaccgcctttcatgtttgcttcacggcctgcctgacgtccttctttttaatcgtcattaggattctatttggtgttttattaacaatttttatatggcgtatcaaccgccaccaactctactcatttataggcatgttatttaatttatctcgtcatgtgttttagatggtcttttctttcaatagtctttatttttatcaaaaattttagttatttataaattttattcataattgaaatcttttttttttctaatttcagaatttactttttttaaaaaaaatagttgatatcgtattgtgttcttttaatgtttttatttttaattttcaatttcagttgtttcataattgtatttctacttgaactctcttttaattttttctaattttagatattattatattttttattcgaaattttaattaatctcgtatcgggttcttatatggattcttctttcaatattgcttatttttaattctgagtttcagttaattttaaattgtattcctacttggactcttctttattttcttttgctaatttcggatttatttttatttttattctgaattttaattaatctcgtattaggttcttatatggattcttcttttaatatttcttatttttaattccgaatttcagctatttttaaattgtatttctacttggaatctcattttcttttctaattttgaattttattttatttttattttgaattttgattaatctcgtattgggttcttatatggaaacttctcctttccttttctaattttagattttattttattttatttcgaattttgattaatctcttattgggttcttatatgaaaacttctttcaatattgtttattttaaattcagaattttagctatttttaaattgtacttctacttcgactcttcttttttttctttttcttcgattaacgtagctgaaattcagaattaaaaataaagaatattaaaagaagagtccatataagaacccagtacgagattaattaaaattcggaataaaaataaaaacaaacccgaaattagcaaaagaaaataaataaagagttcaagtaggaatacaatttaaaattagctgaaattcgaaattaaaaataagcaatattgaaagaagaatccatataagaatccaatacgagattagttaaaatttcaaataaaaaataaaataacatcgaaaattacaaaaattaaaagagtgttcgagtaggaatacaattttgaaataactgaaattgtttcagctaattttaaattgtatttatacttggactcttctttattttcttttgctaatttcggatttatttatttattctgaattttaattaatctcgtattgggttcttatatgcactcttcttttaatatttcttatttttaattccgaatttcagctatttttaaattgtattcctacttggactcttcttttcttttctaattttggattttattttattttatttcgaattttgattaatctcgtattcggttcttatatggaaacttcattcaatattgcttatttttaattctgaatttaagctatttttaaattgtatttctacttggactctcattttcttttctaattttgaattttattttatttttatttcgaattttgattaatctcgtattgggttcttatatggaaacttctcctttccttttctaattttggattttattttattttatttcgaattttgattaacctcttattgggtttattgggttcttatatgaaaacttctttcaatattgtttatttttaatttcaaattttaactatttttaaattgtacttttacttggactctccttttcttctttttctttttattcaattaacgtgagaatttctagtctcaacagcgaacgtggtgcctcctttcaaagctgtctttatataatataatataatagatataatagataggtagataatagcctggacacatgcttgatgattgatgcaaagctgatgcattcttttatctttacagaggagctccgggatacaagcatgctagaattaatctgtatacatacgtacgtacgtacgtacgtataaatatatgatgtaataacttaatatatagattttcctaacttgacaaaaagaatcggcgcaactaataattgaggagaaagaatttggcagctcgagaaattaaccggcctgcagtcgagcgatcgcctagctaaattaaccaagcagccaaggcaatccagcaatgctgaacgctgcgtgtatatgcatatgaacatatgatcgatcgatcgatcagtggatgcagatgccggggagcttccactggaacttgcccgagcgccgctcgtcgggcggcgccgccgtgtagttcctccagacgtcgaggacgcctcggaggtcgtgcatcttggcgccgaggccaacacagcagttggcatggagcgtgcagatcttgttcagatccttgctgagctgacagaagccactgatgtaggtggtgtcgaggaactggatggcgatgcccagcttcgcctgctgctcgtgcttgatcaggttgaacacgtcctgctcgtgcttcccgaagaatcgccacctcccttgctgccaactccggtagaaatcgagggtcttgtcgttggatcgcacgaacaggaagccgccattggggaagttgccgaggctgtaggggtcgccgatgaacacgtcgctggagatggcgatgtctgctcccattgatatgtgcctgaacgggtccctgaaccacatcacgtccacatcctgcaaatgcattcatatggattaattaattactgtcagtgcaatccttttccagtttactgttcattcagccattgattggattaattgtactcctggattagtatgcaattcgcaagtcattctctgaattttgcaatcaatcagtgagagcgccatcaggccaggaaaaccgggcatgagcgtgtctgcttcctcttgctcaacggaatctttcagtttcacaggttcagttttttcggtcgcctgtacgcgaaagacaagccacaagttccaatccaaatggacggccgggccgacaacaacacgagtagagtagagtatagacgaacgtgtcaaagtccaaaccaaacggtttagtccaacttctctcgaatcggctgcgtctctgcttagccgaggacatttctgcccagcaactatgatgaaactgtagtgcacgagagctaagctaagctagctagccaagcagagcactagcagccaatgtatcgcccaatccggccaactcaaccaccacttcgatggaacacatagtatattgcatcgaaaacgacatgaaaatgaatttatatattgcaattgaagcgtgaaaagaagaaaataatttagtactgaccgtgaagaggaagttgtagccgagctcaaggatggtctgctgaaacttgttgcgaccccacatcatctcgaggtagtccttgctcatgaacatcttctcggagcggtagtcgacgccggtggtgcggaggaagtagcaatggcggtgcaccgcctggcacccctcgtacgccgcggggtccatggtgacgatcaccaggtggtccagcagccgcgacacgccgccctccccgagcctgaagctctcgaagaagaggtccagcagcgaccccggcttcgtccacgccaggttgatctgcgtcatgatcaccgtcctgtccttggtcgccgctcgccggagcacctcctccaggtcgccgtaaggggacgccggcgccggagcctgcacattgtatatgcacacatgattcatgattggtttctgttcacatttcatgatcagtgcagatatgagatgactacagagttggatttttttgcttcatgatcactacaaactgaactccaagaattggatttttgctgcatgcatgtgacgagttggttgcgtctctatggttcagcattggctgacaagtggggccatttttttttggaagaattgagctatgggcagcaactaaagctgagtatagcagcaatctaggagaagacacgcccatgaatgccatgctgcaactagcaaatgagctcaaaccattccttcattttatctctttttatgcaagattttattttcaacaattgaaacggccaatgcattttcttctgaacaacgacatgtgctacctcacatggttgaaccaagaatagattttgcctgtcagtaagacatactactctgtcccatagaaaatctaattctagttacaaacttttacacacatatgtctagattcgtagctagaattggttgcgaacccgtcttctctctttagccttagagcaggtttaataaagcaggcgactgccggcggtaaaaaacaccacatcagcgatagagataactatgagataactagaagatgggtgtatgtacagctgctggctatacgcacaagcaccaatgaattgattatcatttttttacgcccaatccgtctgtacccgcgcattgcctcgcgtagacccacacgcagccatgggataagctttttctacagtttctttcttcttgaagttcgtgtgtagtcggcgacaatttaggtggtgtttggatccagtgatttaactttagtccctgtatttagacactaatttaaagtattaaatatagactacttacaaaactaattacataaatggaagctaatttgcgagacaaaatttttaagcctaactaatcaataattagagaatgtctactgtagcatcacataggctaattatggattaattagactcaatagattcgtctcgcaaattagtccaagattatggatgggttttattaatagtctacgtttaatatttataattattgtccaaacatctgatgtgatagggacttaaaagttttagccccatttaaacagggccttagtcgtccgctaacaccctctctcctggttttttccatccagctcatcactttggccaggttggatgcgctatcgccggcttaaaccgtatattgtacctgctcttacgcgaaaaccgccagacagaggcgtcatgggccggctgaacatccatcgccgatcagtcacacatggaccgtccgatcgggagccggactactagccgtttccggtgccacgtgtacccatcccactgcgatggccggtgacacgtgtgagaacatggcagcagtggcagtaaacctgtgggacccatgccgacagcagctacaggtaaaaaggagctagtagaacgcgatgagtcaccaggtctagactagttacatcatgtggagaagaagggaattagctgctggtgttaacaagtgtgattagtagtaatagtgtttacatggggagaggggaaagacaaaagtggttgggagaaaggggagaagatgggagcaagaaagcaggtgtcaatggcgagcattagcatagaggcaggaccgtgtctttgtgttgtaatctagactgactaggtaaataaactattactggtatggtaatctaatcagtaatcacgcgggtttggttaaccggtcgccgtcaggctacgtaacttgttcaaagaggattcctcctcctcctcctgttaatgtgttttgttaattattgctgatcgcggcagcatatgtaaatggcatctctggtttttatttgagcttattaaatatcacaatttgatgccatctccaccaccacgcactacttaattagtattactgtttgattattttttattcttgttactgttctttcagaaaaaaaacggatttgttaactccagggaggtagaaacatctgagggaaaataacctcctttgttttttttttcattttgaaatcttcagaaatgatattggtgccaatcaattcgttttgttcatagcatattgaagcaataaaaaaaatggcaaatatgtgcatacctggacgggggcgggagccggagcagcaacgacggtgacgttggcggcggcggcggcggccagcgagtcgttggagtcgacggcggcgtcctgcaacgggagcggcagcggcggcgcgtcgtcggcgttgctccaggcggagatgtcagcgaggcggcgtcccgggctggcggacatgacgaagaggatgcagacggtggccatggcggcgcccagcacgaacgacaccagcgggctaatgctgctgctgccgctgccgccgccgccgcccatcgtctccccacccttcatcttgccgccgcccagcatcgatcgatcaaccaatcaatcaaactatagctgcttcctccgttgatgtgacgaatggtttcttgctcaaattaagagaggttcttgcttcttgtggcaggatggtggaagaggaaggaaaggcaaagcctttgtctgaagaaaggaacaagaaggaggtatagtagtagcagagaggagagggaatgggggtatttgatggaggagcagcagcaacaggtaggcgaagaccagcctgaaagggaattaacgggcgtgatggaggcctaagagacagatcatcatcatcttaatcctctcccactgattgatttactcgtagttttggctttgctggtgtgatgacaacttgtagtgtgatgcgtgcctcttgcttcagcgtgacaggtttcaaagtcgcaacacacggttgctttgctttgatttgctagctgctggagctggaggtcgaggtttggctgtcaggaactcaggatgggttgggttgttggtgccgaccctgtctgcctgtaggttcgcgtttgtttaggcgtagactggacctgatgcgttgaactgttgagatggacgtaataaacccgatccggggtattattctgatttctgaattctctccctgcatccctgcaataactgaatttttctatgctacttacctgtacatgacattgtgtacgcgtctttggaggtgatttttttagtgttgcagacggctggttggttttattctgtttgctcacatgggggagaaacaatatttctgaatttccctcgtactgtgtaggaaaataaggttcgacatgaagaaaagaactgcacaatcaaacgttggatactgttgctaatttgagtacaaaacggtttcatgctttgaatattgttgcttatttatgtcaaaaaaagtattgttgcgtacaaacggcttcatgctgtatggtaaacaccgccaatcattcgcgtgctgagtcttacaaaacgaacaaacattcactatcggtctatcgccgcatgtagaagaaaatgatggtaatttcgacctgcaactgttagagttgattaattattaatttggtgaagattttttctctaccggaaggaaatgactaaggtgctattagcgacttctagctagctaggtcagacgccatctgatggccaccacaccctatatgctactagtatgatgctgcacttgccgtgttaggtttgctcatgtgtaagtcgcagcaaagctcatgccgctgttgccatcgatgagcaaaccttacctactagctctgctatctcatcgtcaactccatctttcgctacttgcatcttcagaaaaagttcagaaaaactcagcctgcctcttttcttgacaaaataggttccttgttcagagttaaattgaactgtctgcagcgtattcttttgtagtttttcgtgtatctagcttgtcattttgaggtaagcaagtaagcaccaacttctgtcattctcggtatataaacaaattggagaagtaggcatctaaataaagggtagcgtgagcctgtcattctgccgccaatttcgggattgcatgcaagactaagctttgaactataactgaacaagtaatctgatggcgatttgtcggtgcagcgatttggtactagcactgctaatctgaagcacaacagaaggattgttttttttttttacctagctttcactctgcttttgcaatcttgcatgctcttgggtgcaaactaccatccatcaatagctttggccgatacagtgctatatacttttgtgtgtttctgtcagatcagtctatgtgcaacagtgcaagtgttcttctcaactgctgaaaaagccaatgccggaggaactatttttaggtggaaacatatactatgcagtattgcagtaaattaactctccacacgggcgggtgaataaacttgtttacactgcctattattaattatctaaaaacattattcatccattttcctatagacagacgtctctattgaaggcctaaatacatctttgactaactatcttattctaatcattttgggtcagggaaaacaacatgtacaaaaacgtgcatatttccatggaagttagcagcatatgcaacacatattctgttaactaatcaggtcgggttcctgtcccgatcatgattcatgagccgaaatgtctaatagaatggcctagctgactgattgttttgcctaaccatataaagactggccgggttgattattatttatccggtattttgtcttaataatcaccagatacaagctgcttgccaaaccttaggcgcagccatgtacacatttttgcctttcctgttgttggttgaatcataacattagcaccaaactgtctgtttaccagtcttgaggaagaacaacaccgtaaatcacgctggaaatgctgcattttgctagccattcttatgtagttgatgatattatatatgctcctaggtttatggcaagttggcagagttaatttgattagaacgacagatgttaggacgattactgtgttggaagtttcttggattgacctcaaacgtgcaagcagatataaggctggcaacttgactatagttattagttggattctgtagtctggtctgcacatataatattatacaggtaatcagacagcattatatattgatatatactactgaataaaggaactaagaggttcagttttaacgaatccatgattgcgacatgaacaagaattaatctattcatatctagctacttgctacgatacgagctaacatgcacccaaatgaaaaaaaggaagagaaaaaaaagaagatatgatgtgcacaacagtacagatggtatatgtagccgtttgcacatggcttctcaagaacaaaatgcagtggcttgccaaaacttaggacagttggaggctctgcatttgtgtagcgagtataatattgggaaatcttgctgtttaagagtaaaccagctctgcatagctatatgaaaaggagtatcaggtaaccggctttgcaggggacctcacacggagagacgacgacagtggagaggttgctgtttaggtgcatgatgccattgctattgctgtattaggccaaactcaactcgctaggatgacaattattgcaggtgaagcgtgcataattaaagcatgtatagcaccaaacatgcatgaacctatcagttatatatatgggttttcagactaggcaggagaactatttttcagagaatgccctgtggatgtttaaaccaaatgaacggatcaaatcagcagcaggagcaggtaatgtgcctgtgtttgaggttgtaacacgtctcaatagtattttgcagtaatgaggtcacaagatcacataatcatatggattaatgggagatggcgaagaatcatgtttccttgtgtcgcagggcagcacatgcattgcgtcgccgccgttgctgtcctccgatttaacaagtcaaaaggcagaaaaaagaggaggagaaacagtagtttaaacaagaagaaaagtgcacaacgaaacgcggcgttctcgaggcgctttggctacctgatgatatatactaataatccaaattaaggaggtaattagaataatatactaatatagaagaatgggcagctagttagctggtgatatgaaaagaaaaaatgaaatggttggtggttgtaccggaagaaaggaaggttctgcctgcctggatggattacaagaaatcgtcgtcgtctttctgtgctaggctgcaactattgcaaagccaaacacgtacacgggtctctgcttttgcttccgttgccgttgaggttgttgctttggtcgccgccggcacaacgtgctttacctccaccgacacctcatcattttctctgaaaaatttgcaccgactcgttcgtcatattctcgtgtgaaaaaaccaactcccaggtgaaaatcatgtgctgtattttctctcctcttcttctgaagaaaaaaagggaatgcagagaccagtaaaagttctgtggagatcatgtatttatattcttgcgtgctgtctttcgaccgacaagacaataattgggttgaaagaatagctagtcaacgtccaacaatccagtgaggcagtgaccagtctagttttccatacatatatacagtagtacccccatttcgttcttcagaatttcagaaacagcaggacgaggtctcccatacttccaccgttcaatgaaactgccctctcaagaaacgcgtgcatttgtccaagtcggtgccaccatatttctgaattcccctcgtactgtgtattaaagctataaaaactaggatgaagacccacacagattatgcggttagcatgattatattttttttctcacataatagcataaatacttatgcattttactattagaatatattgaaatggcagcataattttaaattatgtactaacttgaccaaattaactaacatgtaatattcatatgtatatacgtgatagttgttaattattttctaattctaaattttagttatttgtaaatagtatttctatatggactctatactcctattcaaatatctcttaatttttaatcctgaagttcctttattcataaatttaatttctataggaattctaaactcttctttcaatatttcttatttttaaattttgaatttttcaatatttcttatttttaaattttgaattttagtcatttctacattgtattcatgtatggattctatactgctttaggaatagctcagtgccaccgagtaatgtataaaaatatatgtatatgttaatattttgttttgtgcaactacattacactctgacaatgagagcagaaaaatagaggaccgcatttgcagttcagatgtgtatgggtaatggaattcattgctattttaattttgtgcagctaatgaaattcgtttgaagacagattatgttaagaaattttagcaatccatacataagagtatagatgtctgtttgggtatctagagaactgaacacatctgatctataattggggggaagagtaacttttatttgtgaaacaaggaacggttgaaatgcttaaggtacagtcacaggactgtgtgtgtctgtattgtggtcataagtgaagaggatgagataaacatgaaaatggattttttgtgttaccagcagtttttaaagagtacgcgtatgttatacatgttggaagttgtcgctattgcttgtgacacaattgcatttttttaaatgttccgcatccttttgttggtggtgaacaagcaaatgtgtttgtctgatatggcaaataagatataaacttgtaagtaacgttctaacaaaagcagataagttttacagtgtttgcattccaaaattaataaagatccaacgctccacaattaaaggtactaccatataaaaggtatttaagtattgttataaatacttccgaagaaagggtaaaaagataattttcttaagagatgaaaaatgatataattgtcataatattagccggaggtatattgataccataatttaccataatgcaaattaccataattgccatcaacagtagggttctcaacattgaaaacatctgcaggttgtccagcaataagaaggcacaacgtcctcaaaggtgatccagatacaaaatggtggtaagccattttcttcactgaagagcctctttccttctaccagaaactaggggattttgaacctccttagcagtagcctgcaatgaaatggttgccacacccagggttactatttttttcccctgaagctgatgttctgatagaaataagaattacctgaatctggttttctgacggaatgtttttcatgcaatggacaatggctccatactctcccttatgagcaccactgctcttacaagatgagaaaagttttgtcactgccatctctggaccagctataccctgtaaccaagaattcgaaagaaattcaatattcctttcaaaagaatataaataaattaaataaaagatagctagcagttatatgacaaacgctgattgaaaaataaagtgatctcaaggaagaatagatcttttcatttcacaggtccagtttaacatgcatacattaattcagtgttgctggttacatgcttaaaatcctgtatggacaggccattttccatgtgagaaattaatgacaaggggatgcttttaactgtggtaatgaattatctaaatattgtagagcagtacaaaaagcaaatacctcctgcgatggatcagacccaaaaggtgaacggagcttccatagtgtcggcacaatattttaagcagtgaaataagcaacttctgatcatctcctccatggaactccctgatagaggaatcatagcctccaataatctcatcaagccacttgttcacatcctttgctgcagcacttccaccaacatgggggccaggaataggttgacaacacaacacatggaagtaactaagtgtgctaccattaacacagggttcagtatacaagatataatttgagtaagaaggaaaatatcaaaaagtaagctgtgcatagcatgggcttgaacacagcctttggggatggaggacgatgttacttgccacagaggaaggaaaccgatttaatgtcacatatgtgtgagataatcagacatatgggaaaactaacatttctgcatatgtttggctcatccagggacaacagttttcctgttcagctgttgtaaagcttgtggttggaaaacaactccaacaaaaatacagaagccaaatattccagttttccactgatcaactgattgagcaacaatttctaagagtcaatccaactgtaaccaggattctttgtaattcttctctcatacatcatactccttatttctgctgatttagtccaatcccctagagaagcaagcccactggacagttgcacatacaagctgggatgtgacgattccatctccatcagcttcttcgccaccttccgcatcatggcctcattgccctgagctttgcatccaccaataacagttgtccagctaaccgcatcagcttcaaagggcatattttcaatgaattcaactgattcctctagccgacctgcgcggactaagagatcagtcacacatgcgtaatgctcagctgatggactcacactgaagtccgcttgcatccggtgaaaccatgtcagtccctctttcacgagtccagagtggcagcatgcagaaaggacagcaataaatgttcgttcacttggttttatgcccttagttttcatcaactccaagagttccaatgcttcatgtccatacccattggaagcatgaccaatcagcattgagttccataagacctcgtctggcttatcgatttcttcaaagatcctgcacccatttgctaggcttccacatttgcaatacagatcaatgagtgaagacgcaacaacatgatcagattgcaaaccaagaacagtggctagagaaaagatctgctctccaaaactgatagagcaaatgctgctcgatgcactcagagcactggctatagcaaccttgtcaagccgcaaaccaagccgatgcatctcacagaataacccaagtgcatccctagcatgcccattctggctcaacccaaccaccatagaattccatgagatcacactcttaccagtgatcatatcaaaaattcttctcgcctcttctatctgcccacagtttgagtaaacagtgatcattgagttgagcactatggtatcatgaaacctaagctctctaaaagctctgcaagcatcctcccagaggccacattttgagtagaaatcaatgagtgcacttgctactattatgtcattgactgctccacattttagaccacacccatgaatctgttgcccaggattcaccatgactgaaaaaccacatacattcaaaatgctggcataagttgaagaatcaggtaacacatctgatcgcatcatccttgcaaaaagagcaaaagcatcatttccacaacaggcaaatgcacagccactgataagagaattccacatagcaatgcttggttcctcctttctgtcaaaaagtcgtatcgcctcatgcaaatgtccacaagaagcatagccatatatgagtgcagaaagtgagaactcatcaacctgagttaaaccattaaggacatagcgagcagaatccaaatccccacatttgcagtacatgttaactaatgcgcaactcaacaccaaatcctgttcaatcttggaaaccaccatccgagcatgagcctgcctcccaaaatcatacttcatccaatcagcacaagcaccaacaattgtcgcaagcacaaaagggtcattccatggagaagaggcatctgcaccactgcattgaccaaccgtcctgagtaatgcaaacgcctcatccgcccggccacgccggacatacctatgcaaaacagcattgcaagccacaggatccttgacaggcatttcaatcagcagtgaacgggccatgtcgagattgcctgtggacacaatgccagttatgattgtattccatgagaaggtgttcctctcgggcatggatcggaagatattaagcgctgcatggtggtctctggaattgaggtgggaggtgataacagagttgtaggagaagcagttcttgacgggcatttcgtcaaacaggcggcgggcgtcgtgctggtggagtggggagcagcgcgcatacatgaggagcaaggagttagagggcggcagcgatgatgggacatggccagacttgagaaggagctggtgcagctgctggccggccacggcactgcaggagcggaggagttggatgcagttgcggacgtcgatgatgacagacatggagaaactgaacaggacaggaggccctggaagcaagctgttgttctgccttcactgaatcaccatatccttagccactggccaccaccttgtcgagatcatagctgccatggaggacctaggacaaaacattacttatgatggactcttgcagtggggaagtgcactaagggtgtgtttagttcctgaaaaaagttgaaagtttgaagaaagttgggagtatgaaaaaaaagttgaaagtttatgtgtgtaggaaagtttttgatgtgatatgatatgatggaaagttgggaatatgggggaaactaaacacggcctaatgcattatccctcgctctctgacccctctcgccaacagagtccctacacacagagaaaaaaaaggaaagcaattgccttatgtccacaaattatatatcaaaaccacagtaagaaagtaagttggaactgatcagcatattaccaagtcctaaagtattatcaactcaagaaattaaaatattagagcccagtgccacatttcattttaaaaaaggtacttgataattgataacccattattttgttctgatagtattcctaaatatctactcacaatgaaaaagaaagtaaacacatagctttgattagttttcaagtttataatattaacttcccaaatgccaggcttactgtccatatttgatctgaatatctgagaattgataatgtttaggagaatacatacagctctaaggagcagtggcgtggccaaggaatttttggttgggtagtcctacttcacatcacatgccagaattttcaaacaccgcaaatcccatatatgagaataaatttagttaaaaagttatacaaatatagcaataacatcttataaaatcaataatcgactaaatttgacaagcaggttcaaaatgtgcaaacattacaatatacatagttcgatagcaatatccctattcctcaaactacaatggcagcaaatcaacagcacattcagtaactacaaattggcaaatagtaaaggcaagtggcagaaagttcaaacacaataactcaatgagaataatgaagctatgagctagactgctagaggtataacctgcaagagctgggtcgtcgtcttcccaagaggacaggacttgacagtgacaggaacagcaggtcggcagccaatggcgacgccgcgacagccaggggcaggaccctcctggtatttgggttgaggcagaagtggagagggaggagaaccctgtgggctgtgagggagacggtgcaggatgaggatttgagagccggagggcacggtaggccttgatctgtgcttgtcaaggacattgtcctcatccttccatgcctgcttctttccaaccttttgttctcgtcaagtgtatggttcttcgatctttattcaattcgattgaaattcaacttgtgtgtttccatcgagtccaatctcacatctatgtatatggttcttcaatttttatatctattttattctgttttcattgggacatattggaatgtgcacaggatactaacgatggtctcgcgtagtagagtccgttttgctcgaacaaaaaatcgcgtactgtgcggatgacaaagactacggatgaaaaatctcccagaaggcttacgcattttttaattaggtatagattgtttaattttttgaactaaaacacgaagttagtagttagtactatctatgatgcttgtcacatttcagccaatagagcaatattactcaaccaagtaatactaaacatttcttgagttggacaagggtaaaactctagtctgggctgctcctcatcatgaatcaaacttgggctagccttgtaggttggcccttaatcaaaatttgtcttggcaggagctatattgggggctcaggttgctatgaatttagcggggcttaaactgaattgaacataggcccaatttggtccctaaaaagatcaagtctgaatgattgcactataatatttacaatcagattagttatcctttgtttaggcgctctacctcaagataggtaatgtatccagtcagacagtttataattgtctcaaaagttgcatttctgctcattgcaacgcaaatcagtatcatataagagatgtattatcccatatgggccccaaaaagaaaacgctattgtcctacaaagcaaaagagtgtcccagttaactgaacttcacataacatcattgcacaaaaactcgcactcgatcgcacgaaacacatatatggtatgatgggtttcctaacacaagcagtcaagcacaatgccatcaacacaacagaaccatcagaagctttataaagctaaaagatcaatgatttacagaataacaagggcaaaaacaagtattgctcaatccaacaactgaaacctccccgaaacaaagcatacagatatgcaggaagtacaaggaactgtattacaaaatcacataaaagatttataaatatctaaccacagcaacagcttatgaactgactaagaaaaagtctggcaattaacagcataataaaaaatgtaacgctaaaattaggtttccacaagtccacccacaaattcgaacaagcattctaaagctacaaactaacggaacaactgcaaactgaaagaccgtcatatcaaatgtccccctccccacaaatcccctaccataaattccccaaactaaagctcacccagctgaaatgagcaacgagaaagcccctaaatttccgcgaaatcagcaaccgaacacagattagtcggggaagaagaagaagaagacgggagggagcccgcaggtgcgcacctcgactgtccagatgaagaaatccccttcctctgcacacgcatacgattccctcaaaacaagaaccaacaacgaaagctaccgtttcttggatccaaccagcgaccccgacctccccgagcagggaaggtaaggaggagcgccaccgtggggagcttgggagggtgactgaggcgagcggcggcgggcacggctgggtggcacccctgcgtgcggcaacaaacggcccataatttcaagcccacgaagagaaccgggtcggcccataaaactagcaggccaaagcccgaatagaaagcggcgcgcgcgagcccacctcggcgtcggtttcttcactctccacccatccccagtagaggaggaagcgccagatctccacacccacccgcgccgcagatccagccagagccatggcggatctcgccgtggcggcgccgccgccgacggacctcttcggcgagcccatcgaggcgcacccgccgtggttcaagcccgactccttcctccgccccgacttcgacccggacgcctacgtcgccgacctccgctcctacgtgcccctcgacagcctcgccgccgagctccgctcccacctcgcctccctccgcgccgagctcgtcggcctcatcaaccgcgactacgccgacttcgtcggcctcagcgcccgcctcaagggcgtcgatgccgccgccgcgcgcatgcggcccccgctcgccgagctcagggacaaggtcgcctccttccgcgccgcagcagccgccgggctcgccgcactccgctccggactcgagcagcgcgcggctgccacggctgcacgggagcttctcgagctgctgctcgacacctcccacgtcgtctctaaggttcgatcctactccgccgctcctggttaaacgcgaatgtagcttattcctattagctaaatttccccatcagcactgcattggtagatccgactttatatgggatctgtgacatctgtctggaggtcaaccatcaaccttctgaaactgtgcccttccagtccccttcccatcgatgttcgcctgttcattttcatgaatcatatgaaagcttatagtgtttgactctagttcaaactaggaaattggagaggtttagcacttccattttaatgcagcaatagtacatcatattattgctgtgaacatttttttgtccctgtatgcggatgatccatatgctaactctgagtattattttatccatgaatgtagatgcaatgatgcatgtacatgaagaaattggcgtgattaaacctgtcatagtgctattttctaccatgttagaaaaattgccctatcttatgactgatggtcttctcagattattttgtcaaggtttccattggttcacaatttgcaacatcattcaattgtataaaccatcacctaaaggtgttactgtcaaggcacctgaaatccacattttcctgttgttcctccaggttgagaaactgatcaaggaactaccatccgccccatctgattcatcaaatgttgaggctgtttctggtgataagggctactcaggcaacgttgccacaccaccaaacatggatgatgggacagatgttagggagacacaaagcattctcttagaaagaatcgccagtgagatgaaccggctcaaattctacatcagtcatgcacaggtttgtgacactaactcaccaataaatactggtccatttgcacctctcactcacataccttctctttttctgttccgttgctgagaaaaaccattagggaaaaattgtaacacaaaaatgacattagttgtttctccggaaaggtttatttctgtgtcacaattgaccattgaaagtgtagtatacacagcaatacaacgatgtgatataacatcttgattaataactataagaaaaatgtctacccacatgtcatagatttggttgtcgcaaactgctgaagtgtcaacatggtttcatattggtagcttttgttttattgctacctgatgctaccttttgcatctcagtgccacttatatttatgattcttatcctgttacattatggcagtacagaacctcccttttattgaaaacatggagaagagggcccaaggtgctacaaaactacttgatggtagcttggagcgttgctttgtggatggtctagaacatcgtgatgacaaagtaatatacaactgtttgcgtgcttatgctgctattgacaacacatcttcagctgaagagatattccgtacaacagtggtgtcgccgttgatccagaagattgttcctcaaaactatgcaaaagtggttgctggggtatcttctgatgacctagaagatgattatgagcagataatgcaatgcgtagaaaaagattgcaaatttattttggagatatcctcgttgggtaattatgatagacgaatttcattaaaaagctgcatcattgcttagtattttttaagttgaatactaaatgctgcataaggacttagattgacacatcatctaattttctatcgattgatttgcagcaaactctgggcttcatgtttttgattttctggccaattcaatactcaaagaagtccatttggcaatccagaagggaaagcccggggcgacctctcctggaaaacctaaacagttcctcaaaaactacaaagcaagcttaagattccttgattttctggaaggtattgctaaattatgttgcattgtgattattgttttgtatttaaccagctaagcctactacaataaatactatgcttgctcgcaagttatgctggtttatacatttgggacagccattatataggactaacaaggaatgtggttagactgggttaaagatatacatatatgactattgggagttgctattgattgaatatttggtcctgtaggttactgttcatctaagcctgctgtaacaaagttccgctccgagcctgcttatgccgatttcatgcgacagtggcatgttgctgtctacttcacattgaagtaagcataaatatttaggctatgctgctgtcaaatgctcttcagaacttcatttctaacttgacttcaactggttcaatcataagatttcaggacattgctggtggtcttgattctgtgcttacagccacaattactcctgctggaatgcatgacaatcaagcgaagccgcagacactgttgttgaaacaaagcgttaagctcttagaaagtttgcaggcctgctggagtgacgatgttcttgttttctcccactctgataagttcctccgcttgtctttgcagcttatttcaaggtatagctactgcagaggattctttgccttatcttttatgatttaacctatggtgattgaccctttttgtattctacattttacaataaggtatacaacatggctttcttctggtttggctgcacggaaagcttctgatgggggctcaagttctcctgcggatgctgaatgggcactatctgtacctgtggaggatttcatttatgtatgtcatgtctacaatactccttgaattccaagtgtgttatttcagtcatctgaacctactgcttttcatccttcatcatgaactttttggcttaagactgaaatagtattgtcatcttagccagtgacattgagatggttgcatagattagcaataatttgagactcacactaaggtttaagactataagtgcttaggagggcatcccaaagatgacaccttgcacttctagcccaacaaacattccaggaacacatatactgtggttactggttagttagaaagtctacagttggtagcggtgtagcatatcaggtatgacttgtcccttttttttcatgtgtaaactggaaatagttgttcggcttgttcttcatgatgtgctctagattggaagctagtcaatattgattattacgtaatcttacccattattttgggccctgattctcatatttcttataaaatttgaaacatagaagattatggccatcaggcatattttgtgaattgcatttaaattctgtatttgatgcacaggtaatgcatgatgtaaatgctgtaataagcgagcttttggaatcaggccaatttgtggaacatgtaaaccaattgctagcatcatgcccaaccgaagtacttgctctcgtgaaacacagtatactgcaagctgttgagcctttaaaggagttgttgcctgctataatgaatgtcatgattatggtgatagttaaaaggtctaatgaggtgagtacacctaagtcagcagaagagaagcaatgtcatcatttcttactgtatctgtggttcatcactcgtatggtacaataagacaattttgagtcatggtccttctgttcttaccaactatatttctggttgattgtaggacttgaagcacctaaagggaataacagcaacatatagaatgaccaataagcttccagtaaggcattctccatatgtatctgggattttgcatccacttaaggtgaatggacatcctgttttacttctctgctttatgatttatgtttctcaaaagtgaagcatcaaaagttaactacttaactggtagcgtctatgtcctaatggctgcattcagtatgtgttcttggcgatttttaagtgccatggtcagtatctagtacccattagtctgatcgttatcaccctcaagaataacttatgttttgccattttgcaggccccgatatttagaaacatgtgtttatgctctttttgcctccatatttcatatgtgatgttcctctgttcttgtaggtttttcttgaaggtgaccgtattcactatttatcagaagatgataaagcaaagctgcgccgtggatcgacagataagatcacttcaatttattatgacatggtgtctgaagtagtcactgtggtaagtaaggaatgcttaactgcttatgagagctcatatctgcttattggtgaattaaaccatttttattgaatataaaggcaaggaaaactgaatcatcattgcaaagactacgtcaaggtgcacaaagacgagtaggagctaataccgatacctcggataacatcatttctgatactgacaagatctgcatgcagctatttcttgacattcaggtttgatatctgtcctttaattttatgctgataagggacatattatatataacggatataagatttattttagggtgtaaattttgcatcaaatgattttttttaagagggtcattgccttttggtttcatcaaagacccaactagtgcttatggttggcttattcaaccttaccattttctgtggaaaacaactttagcatgtaatctgaatgtttctatgttggccatccaatacattttttttttgcaaggaccaatgggtattagttatatgatcaaacatgatacctgtttatgatggatgcactgcaccacatctgacatttctttttttttttttggtttttcttattatgcaggaatatgcacggaatcttcgtgcaataggaatagatgcaagggaaatcgaaacattcagagctttatggcagtgtgttgctcctagagacaaacaggataacatccagttttgatgtaaagatcaatttgagtacatagaagaaaattgccttaggtccctcaatatccgtagatacgtctcgtgttgttcgtttaggatggatgttggaatgatttttatacatagagctctggattttgattgtttcattttggacggtctcctccggattatacaagggtcaagggtacatccaaaatttgagaagtgtatcaaacctcatgttgttggaaacacaccgattctgttgaaagattgttttagtgtcttggtatctaacctttttcttgttcacgcatatctgaagagaacatctattcctttatttttcttattaggcccttgcagttaccaccgtctttttgagtggctgcgtgttcatataggctcgcttcttctcaagtgaattcgataagatgcacatagataattccatcaaccgatctggatcaacagaagacaaatttctaattcagattctagagttcatgacagcagagcaggacactacttgacagaggactgacagaaatttttatttgagattacgagagtacatcgagaagctcagccccgagggagagtatgggttagcgagggatgcggtttgggcggctcagcgcatttccggcggtccggcggcggagggaaggcgcggttcgggcagcaaatcgcaaatgcggcaagggcggcacggctccctccaggtccggtacgcttcaaacctcttcatccccgccgccggcagtcttgtcgataatgctggtgcatggctagtcgtcatctcggtattggaatccggctaattcagatcctgcaatttgacataataatatattactccctccatatatttttatagtaatatttccaaatctgacaaatttatttttgataggtatatttcaatccaacaacctatcatcttaatgactttctcggatttaatgcatgactctctattcttccacacaagatgggcattgagaaatgtaaatattaataaatcgcttgtttacgaggaatgactagtagcatgtttaaatggatgataagtagaattatttatccttgatctgtgtgtcaagataaaaatatgactatcaaaagcagataaagggagtaactagcatggtgcctcgcgtggctagcgttcgtcgaatttttaatttcgtattttagttatttctaaattatattttttataagctttaaactctacttttaattttattattttctaattcaaaattcaaatagttctaaattgtaaccggtgtgaactttaatctcctctcccattattacttattttttaattacgaatttcagttatttttaaattagatttttatatgtactctattgttttatttttctccgattaatatgataatttcaagactgtgagaaccaaacgtgtagacttatttttctattgttttaataaaataataataatagatactccctccatctatttttgatatttatattttcaaatctaaaaaatttattttttgataggcatatttcaatccaacaatttatcatcttaatggctttcttaattaaatgcgtgactcttcattcttccacacaagattggctatatgagcattgagaaatgtaaatattaatgaatcgtttgtttacgaggaatgactagtggcatatttaaatggatgataagtagaatcacttatctttagtctgtgtgctaagataaaatatgactatcaaaagtagatggagggagtagtatattaatagggcaccccaaaatgtccccgatactacctgcgctgcgctcgtctcacataaacaattactcccgattgctgagtaggactgtaggactagttgacttctagtatcgatttagaccctgtttagatgggactaaaacttttaaatccctatcacatcgaatgtttggacattaattataaatattaaacgtagactattgataaaacctatctataatcttggactaattcgcgagacgaatctattgagcctaattaatccatgattagcctatgtgatgctatagtaaacattctctaattatagattaattaggcttaaaaaaattgtctcgtgaattagctttcgtctatataattagttttataaatagtctatatttaatactttaaattagtgtctaaatacagggactaaaagttaagtccatggatccaaacaccatcttaagaactttacagaacaagatctacaaatctattatataattaaaggaatagaaaaaggagcctccacgttcgctctcatggcctagaaattctcacattaatcggagaaaaagaaaaaacagagtccatatagaaatacaatttacaaatagctgaaattcggaattaaaaataaggaatattagaagaggggactagagtccatatagaaatacaatttacaaatagctgaaattcggaattaaaaaataaggaatattagaagaggagactagagtccatatagaaatacaattagaaaataactgaaattcggaattaaaaataagaaatattagaagtagagtatagactccatatagaaatacaattaggaaataactgaaattcggaattaaaaataaggaatattagaagtagactatatagtccatatagaaatacaattaggaaaaaatagaaattcagaattaaatatataatttaaggaatagaaaaaggagcctccacgttcgctctcatggcctagaaattctcacattaatcggagaaaaagaaaatacagagtccatatagaaatacaatttaaaaatagctgaaattcggaattaaaaataagaaatattagaagaggagactagagtccatatagaaatacaatttacaaagaaatttggaattaaatatataattaaaggaatagaaaaaggaacctccaagttcgctctcatggcctagaaattctcacattaatcggagaaaaagaaaagacagagtccatatagaaatacaatttaaaaatagctgaaattcggaattaaaaaataaggaatattagaagaggagactagagtccatatagaaatacaatttagaaatagttgaaattcagaattaaaaaaaggaatattagaagaggagactagagtctgtctatatagaaatacaattaggaaataactgaaattcggaatgaaaaaaaggaatattagaagaggagactagagtccatatagaaatacaattaggaaataactgaaattcagaattaaaaaaaaaagaaatattagaagtagagtatagagttcatatagaaatacaattaggaaataactgaaattcggaattaaaaataaggaatattagaagtagagtatagagtacatatagaaatacaattaggaaataatataaattcggaattaaaaataaggaatattagaagtaaagtatagagtatatatagaaatacaatttagaaaaaaaaatagaaattcggaattaaaaaaataaggaatattagaagtagagtatagagtccatataggaatttaaaactaactaaaatttggaataaacataataaaattaaaagtagagtttagagtctgtataaaaatacaatttacaaataactaaaattcaaaattaagaaaaacattggaagaagaatttaaggtcaatataggaatacaaatattggaatataatttagaagcaactgaaattcgaaattaaaaattaaagaatattgaaagatgagtttagagtccacatagaaatacaattagaaataataaaaattcataaataaaaatgaattaaaaaaagaaatattaaaagacgagtctagagtccatataggaatatatataatttacaaataactaaaatttgatattaaaaataattaataactaacacgtatataaaatataatataaatattacacattagtagttttgtaaagttattgcaaaatttaaaattatgttgtcattttaatatatttgaataatataatgagaaaacatatatgctaaattaataataaagtgaggagtatattgtagcaatcgatgcaaccaatcaaacccatccacttagatccagaaagtcaaatagtacttacattcagtctccattttgcacaaaagcatttgctcatactccttgccttctccacccccacccagcaactttgcttccccctgtgttcttccttagctcgttccttccgatggcggagctaatggccaccatggtggtcgggccactggtgtccatggtgaaggagaaggcctccagctatctcatggagcagtacaaggtcatggagggtatggaggagcagcacaagatcctcaaacgcaagctgccggccatcctcgacgtcatcgccgacgccgaggagcaggcggcaaaacacagagaaggggcgaaagcatggctggaggagctccggaaggtggcctaccaggccaatgatgtcttcgacgaattcaagtacgaggccctccgccgcaaagccaaggccaattggcagtataagatgctcggcatggatgtaataaagctctttcctactcacaaccgtattgtgttccgttacaggatgggcaacaagctcaggatgatcctgaatgcaattgaggtcctaattacagagatgaatgcctttaggtttaaattccgaccagagccaccaatgtcgtccatgaaatggaggaagacggattctaaaatttctgaacattctatggacattgccaacagatcaagagaggaagacagacagaagattgtcaagtcattgctttctcaagccagcaatggggatctcactgttattcccattgtaggaatgggggggatgggcaagaccaccttagcgcagctcatttacaatgaccctcaaattcagaagcattttcagttgctcctgtgggtgtgtgtctctgacaacttcgatgtggattcgctggccaaaagcatagttgaagcagctcgcaaacagaagaactgtaatgaaagggctgaatttaaagaagttgtgaatgggcagaggttcctcctcgtattggatgacgtctggaaccgtgaggctagtaagtgggaagcgctcaagtcctacgttcagcatggtggcagcggtagctcagttttgacaacaacccgtgataaaacagttgctgaaataatggctccacctaaagaagttcatcatctcaaggacttgaatgaaaactttataaaggaaattatcgagagaagtgctttcaattcagaagaagagaaaaggcaatctgagctactcgaaatggttggtgatattgccaagaaatgttctggttcccctttagctgcaacagcattgggctctacactgcgtacaaagaccaccaagaaagaatgggaggctatattaaggagaagcacaatttgtgatgaggaaaatggaattttaccaatactaaagcttagttacaattgcttgccatcatatatgcggcagtgctttgctttctgtgctatttttcccaaggatcatgtgattgatgtggaaatgttgatccaattatggatggccaattgttttatcccagagcaacaaggagagtgccctgaaatcagtggtaaaagaattttcagtgagttggtgtcaaggtcattttttcaggatgtgaaggggatcccatttgagttccatgatataaaggactctaagattactgctaagatccatgatcttatgcatgatgttgcacaatcttccatgggaaaagaatgtgctgccatagattcagaaagtattggaagtgaggacttcccttattccgctcgccatttatttttgtcaggtgatagaccagaagttattcttaattcttccctagagaaaggatatcccggtatccaaacattgatatattcctcgcaaaatgaagatttacagaatttatcaaaatacaggtcattgcgagcattagagatctggggaggtataatcctgaaaccaaaatatcatcatcacctgaggtatcttgatctctcatgcagtgaaattaaagcacttcctgaagacataagcatcctatatcatctgcaaacgctgaacctttcccactgtagcaatcttcatcgacttccaaagggaacgaagtacatgactgccctccgtcacctgtacactcacggatgtgagaggttaaaaagcatgcctccgaacctcggacacctcacttgcctacagacgcttacatgctttgtagctggtgcttgctctggctgcagtgatttgggagagctgcggcagtcggaccttggtggtcgactagagctaacacaactggaaaatgtgacaaaagctgatgcaaaagcagcaaatctcggaaagaagaaaaaactgaccgaattgagcttaggatgggctgatcaggagtacaaggaggcacagagataatcataaagaggtgctggaaggtctcacgcctcacgaggggctcaaggttctgagtatatatagctgtgggagcagtacatgtccaacttggatgaataaactacgagacatggtaaagcttgtgttagatggttgcaaaaatctcgagaagcttcctccactgtggcagctgccagctctacaagttctttgccttgaaggactggatagtttaaattgcttgttcaacagtgacacacacacacccttcgcattttgcaaactgaaggagctaaccttgtcttttttttttgccgggtcggccgaaaggttcggtcgaccaaatttcattaaggaaaaggggaacaaattacaaatgggctttatatcgacaataggatgtcgagattaggctggggacaggtcccccccaatcaaagccatacacaaaagcccgaaggctacaaagaaagtatgatgtctctattacataatctgaaaatagcctccagacttccacatccaaacttcttctttgatgtcttccagtaactgctccacggtctgctgcttgtgctgaaaaattctggcattgcgctccttccaaatcagccaacaggtcaaggcgaaaacgctgtcaaagttgctcctgtagctgcttcgaaaatggcatcgtgccaccatccaccagcctatcagcccctctcccgcttgtcctggcagagggaaatccacattgacccatgctcgcagcagctgccatactcgcctggagaaatcacaggtgacgaacaagtgtaggcaatcctcctattcgcgttggcagagtacacagtgatcttcatggggccatcctctcttcgccaagttgtccgccgtcaagcatttgccctttgttgctagccaaagaaaaaatctgaccttcgacggagcttttgtctgccaaattagctgtccgcaaggagaaatctcacgagccatgaaaaagagatcataagctgaggacactgagaaagaaccatccggagtgagcttccagcgaattgtgtcctcctcctgactgagattgatttgttggatttcgtcccaaagctgaaaatactgcatcattgctatatccgagagagatccttgcaaatctctcacccatcgatgtcccaggagtccctgttctactgtgagcttagttctaccaataaaagtcgcaagggtgggccatctccaggcaatgcttcctccacctagccaattgtccgaccaaaatttagtgtctctaccattgcccacacagaattcagatgcagattggaagattttctcgtcatctgcgctcagtctgaagtcaacaagggtccagggcctatccttctgatgtaagcgattggctggccatttcaggcgcagcgctttgccgaagagctccaggtttcgaatgcccaagccgccattttccactggtgtacagacatctttccaggctacaaggcaatgtccaccactcacctcctgctgtcccttccaaagaaatccccgacatttccgctcgatgtccttgattgcccactttggaagttgcaatacagacatgaagtgaactgggagggccatgagaacggatttaatcaagcagagccggccatcaggggacaacaacttgggcttccaacctgccactttgtttgcaagcttgtcgagaattggttgcacctcagcttttgttggctttcttgtggacagtggtaatcccaggtagatgatagggaataattgaatattgcattgcaactcattagccaccacctgaagttgttcctgactgcattgaattggagtgattgcacttttattgtagttggtcattaatccactggctgcaccaaaaatctgtagaattgccttgactaccttggcttcttgttgacttggtttgaaaaataatactgcatcatcagcatatattgatatacttggaactgggcgtcttggtgctggttcagatatcagtccacttgctttcgcttgagctacaactgcttgcagtgcatccattgccagaacgaataacagtggcgataaagggtctccctgccgcaatcccctagccggcttaaaagggtttgattcattcccgttgataaggatgctggtttcagccgtgaggaacagagataccaaccataatctccacttggcaccgaaacctctccacttcagcatatccaatagaaaacaccaagacactgtgtcaaaggctttggagatgtcgagtttgagtagaatcatttccttgtgttgcctgtggtattgctgaacgagccctttaacaaagatgaagttttcatgaatagatcgacctcttatgaatgcattctgtgtgtagggcacaagttcattcattcttggggctagcctctgtgccatgacctttgctgctaacttggcgaagctatgtatgaggcttataggcctatagtctttcagcagtgtaggggagtctttcttggggatcagagtgatcaccgctgtgtttaacatttcaaggagccatggtgggacacaaatgaggtaaaaggagaagagctgatatttcctgaggttgaaaagctgtttatcgaaagttgccctaggctaactgccttaccaaaagcgtcaaatgtgatttcagaatcgtctagcggagttagcaccgtgtgtcgttctgcatttccagcattgaaggaaatggaattagatgatttggatatctttcagaaatgggaggcagtcgatggaactctaaaggaggaggtagcatttcctcagcttgacaaattaacaatcaacgagtgcccagagctgactactctacctgaagcaccaaaactaagtgtcttaaacatacatgaaggcaatcaacaaatatccctacaggcagctagcagatatactacttcattgtccagtctccatctgcatttgtcaactgatggcacagaaacaacatcggtggccaagcaacaagattcgagtgaattggtgattgaggatgagaaatggaatcataaatctccccttgaacttatgaacttaaatgggtgcaaccttttattctctcacccaagtgcgctggctctctggacatgttttgttcagctcatagatctgaatattcggaaagtcgatgcgcttctctactggccagaaaaggtgttccagggcttggtttccttgaggaagttaggtacagtatttatcaatgcaagaatctgacaggacacacacaagctcgtgggcaatctacaccagcaccaagtgaactcctgccacgtttagagtccctacagataagctgttgtggttcttttgtagaagtccccaacctacctgcgtctctcaagctattagacattagggggtgccgtggcctggagtccatcatattcaatcagcagcaggataggacgatgttggtgaatgcagaaagctttgcacagccggataagtcatcattaatatcaggctccaccagcgagaccaacaatcgcacccttccacgcctagaatctctagtaatatggaactgtgatcgtttggaggttctccatcttcctccgtccatcaagaaattggatatttcttgctgcgaagaacttcagtccctctcaggaaagctggatgccgttcaagaattaaatatagaatcgtgccagagcttgaaatcactggaatcttgcttaggagagctcccgtcgctgcaacaactcaccctttttgattgcgagagcctggtatccttgccgaaggggcctcaagcatactcatctcttacatctcttacagttagttattgttctggtataaaggtgcttccaccgagcctgcagcaacgtctggatgacatcgaggagaaagagctagatgcctgctacgaaggtaatctccactttcttcatttcttttaataataagaactagctgggtggtccgcgcaattgcgcgactagcacccgtataaaatcatatatttttttaatatgattttacttaaaatttattaaaagttatctcaccgtcttaagattttgaaagaccaaacattatcatcctcgggtttctaattttgtagtttttaaaagtcacatcagttgctaccccttacttttatcatattattttttattagctttttcgatctaccattgtttctattcattctcattgaaacctttaaaaattggattaaaaaattatagtttttagagtttatttgtcctgttgggctttttttataatttctagaagtctcgtcagagctgccattatactcctctacaaccatccattgcatcttctctttattgtcattgctattttaaaagtcgaatataattattatttaggtttttttttactttctagaagttccgccaaaacgtcagcgactttgtcactatactcctctacggctcgcccactgccgcccttctttattatcattgagattttaaaatctaacatgattattattggggtttattttctttactttttagaagcccgaacctttaaaaattgtaccttatagtttttagagtttattgtcttgttgggtttcatgttttttataatttttagaaatcatgtcaaacgctgtcaaaatactcctctacgacccgtccgccgcataatctttattgtcattgggattctaaaaattgaacataactatcgttggaattcattttttactttctaaaagacgcaacaaccatcgacgactctgccattgtactcctatacgacccacccgctgcctctcatttttattataattgagattttaaaaatcaaatatgattatcattggggtttatgtttttactttctagaagtccccgacaaccgccttgaccgattgcttcacgatctgcccatcatcctttcttttaatcgtcattaggattctatttactgttttattaatagtttttagatgtctcatcaaccgccacaactctgctcctccataggcctgttacttaattaatctcgtcatgtgttttagatggtcttttctttcaatagtcttatttttttatcaccaattttagttatttataaattgtattcctagttgaaatctttttttctctttctaatttcagaatttattttatttattattatgttcttttgatatttttattttttattttcaatttcagttgtttcaaatctttttaatttgcctaatttcggattttattttattttttattctgaattttaattaatctactattgggttcttacatgtactcttatttcaatattttttatatttaattccgaatttaagttaattttaaattgtattcctacttgaactcttatttttttctaatttcgatttttttatttttttattccaatttttaatttatctcgtattggattcttgtatgcactcttctttcaataatttttatttttaattctgaattttagttatttataaattgtattcctactgtcggtgacatgggatcaggagtatcatgactagaggtttgaggcagacacaatcgcccacgtggcctggcaccctcgggggacgtcgggcccgagggtgatgtgttcgccctcctcttagtccccccgagggggtcgggccgcacccgcctcggccccgagggccgaggcgccccgacccctcgtggatttttgctccgcgtgtatgggttaggtgagcacagcggggctcacctaaccacatttattgtggtttggctgagcgtgtcacgccgcatgtaacgcagtgcagtgcactcgtttatccggtttgtgaccagtcacagaccggtcagatcgcgggttaggtggcgacaggcgatctgacgcacgcctcgccccatcccgtcaggacgagggcttctaggcgcttgtccccagctggagctagcgtgttacctcccagagatggcacgttagtcctggttagatatatgccaggcttcatcctaaccattacaggcaagatgttgtgtgaagaagggccaacatgtagattgctaaactgacacgtggtggacaagaatgagcgatttgtgaccagtctgacactggtcatgtcgtcagcagacagccataatcccacgtcgcacctgcttccggcggaagtggaggtaggtatgggccgtcctatcagaaggtcattcggacggcaactatacaaatctccgtccatttatgaaaaggtagagtaagtccccacagaagagagggagatggtgcatgtggtatccccttaagatataaaaggaggaccttgcccacttagaggaggactggacttttccagattcggaacccagaacaagggaggggctggctcatactttgtagctccttcatacacagatcccccaaaacacaggagtagggtattacgcttctcagcggcccgaacctgtatacatcgcccgtgtcttatgctctttcgacggtcgcgaaccttccacatacagagagcttagaatttcaccctgagtccccggccgaaccggcaaaggggggcctgcgcggtctcccggtgaggagccccacgctccgtcacctacgtactcgaactcttctttttttgtttttctaattttggaatttattttattattattccaaattttaattaatcacgtattgggttcctatatggactcatctatcaatattgcatatttttaattccgaatttcagttatttttagattgactcttcttttctttttctccgattaatatgggaatttcgagcatccacagcaaacgtggtgcctcctttcatagctgttttgataatataatagatagccaggagctcaatttaatttggtgggtgccctaaaaggcaactctcggcttaagcatgtaccgcgatttattgctaaaagtttgcagtgtggtgtatagaatctctagtcaaccattaatacgattatatgtacagagtacaatgcacatcgataactcacttgtgcagtggtgtgacctaaacacttcaaatttttgaattgcatttgggggtacaaaagaatttagttatatctactgtagccattactattatgcaagctgaatgcacgtgctttactacgaataaataataaattataatattatctaaaataaataaaaaaatatatattaatgcgtctgatatggacagcagcttaaatttgtagaactaactgtcgcggtacttgaattgtattaacatttctctggaaactcatagctccattgcatgtagtttgagtatacgtagttccttctaatcatcttatgccaaacttgactatggaatgctgtggtctacatattatccaaccaatacataacattttttattactattatcttttgtttgctagaaccaaaggcccatcaatctgcagtcgctaggctgctgtgcttaaagtaacagattcaggaccagatgagtcatcatggtttgtaacatcattatacatgattgatttcgaatgaaatgctaaccactatccttatgctgactctctctgtggtgtgacttccttgcaggatcgttaccaaatctgcaactgatgggttattaattgtgtgatttgtgtctcatggtagaatgtattacctacctaccctttctcaagataaactccagtaaagtcgatcgtccggttggtgtgagctgctacaagaaggatgaagccgatgatccaaggccttgactttaagcagaaagctagtcccaggttgtaagctaaagaataacatgctggagcttaaactgcttcacttttttaaaatcctttttattttcgtgtgaactgcgatgtctttgatctcgttcatgctccatcataagagaatcacagctagcacttccatttcaatgatgtttttcctacatgacatgactgcagaggatacttgtgattgatcaacaacattttgcagcaacgttatctctcccattgttgatcaatggaattgatcaattgatgttcctacttattggaatgaatttcccattgtggaaaaaatggaaagactggtacaagctgctgaaaaataaactgtcgctactcaagttgaaacatgtgtgtaattatctgtcagctgctgcagttagaaccttaaatctgtaaatataattgtgtgttatgaaaatagatgcacaacggagacacgaatttttacgtggaaaacccttgcgggaaaaaaccacgggcgccgaccggcaatgatcactattgaggagttgattacaaacgtaggggaatcacaatgggaacgtcaccccttcccgtatggcttacaagagtatatataggggataatagaaggacacataataggatagacatgaagtcctactaggaaactaatccgaatatattgtgggcccaaaattcggatcacatatttaacaatctccaccttgagacgaatttcctcttgtagcataaaaacatcaatcaccaaagatacctcatgtaggtaaaatcaccgcgcgccaaatagtctctaagactatactgtaacaccaaccaaacttgagcaaagctcaaacttagtagtaggaactggctttgtcatcatatcagctgggttatcatgagtacttatcttgcataccttgacatcaccttcagcaatcacacctcgaataaagtgatttctcacatcaatatgctttgttctctcatggaacatctgatactttgtaaggcatattgcactttgactatcacaaaatatattaatgcaagacgtaactccacaaagctcagtgtacaaacctctaagccaaatagcttttttacaagcttcagaaatagccatatactctgcttcagtagtagataaggcaacagttgcttgcaaacttgccttccaactaacagcacatcctccaatagtgaaaacataacctgtgagcgatcttctcctatccaaatctccagcaaaatctgaatccacataaccaacaagtccatctctagatctcccaaactacaaacaagcactagatgtaccacgtaggtatctgaaaattcattgaacagctttccaatgctctttgccaggattagccatgtatctactgacaacactcaatgcatgtgataagtcaggacgagaacataccatggcatacataagtgaaccaactgcacttgaataaggaactctagacatgtactcaatatcataatctgactgtggatataaatctgaagataatctgaaatgtgcagctaaaggagtactcactggttttgcatcatgcatattgaaacgacgaagaactttttcaatataacctttctgactaagatataacttgccagaatgtctttctctagtaatttccataccgagaattttcttcgctgcacctaaatccttcatatcaaattcactactcaattgtgccttcaactttgctatctctgatttgtcttttgcagcaatcaacatatcatcgacataaagaagcaaatatatagctgaaccatcaacaattttgagataaacacagctatcataattggatcttctaaacttctgagaaagcatgaaagagtcaaatctcttataccactatctaggtgactgctttagcccataaagagatttcttcaacctacagactaggttctcttttccaggaacaacaaaaccttcaggttgctccatataaatgtcctcttctaactccccatataaaaatgcagtcttaacatccatttgctctagttcataatcatgcattgcaacaatactgagtaaagtgcaaattgaactgtgcttcacaacaggggaaaagacatcattgaaatcaatacctggaatctggctataacctttagcaactaaccttgctttgtatcttgcctcatcacttggagatataccttcctttcttttgaagatccacttgcaacggataggtttcttctcctttggcaacttcaccaatttccaagtatgattcttttcaagtgactccatttcatcatgcatagcagttatccatctattgcaatcatcagaaacaatagcctcaaaatatgtagaaggttctgcattaccttcaatttcttctgccacactcaaagcataagcaactatgttcgcttcttcaatatatcttcgaggaggtttaatatttcttttgggcttatcttttgcaatagaacgttttggagactgctgaatagtagaagaatatgaatcttcaatcacaggtgcatcttggtagatagaggcatgttcatattttggcgcatgccgtgaagtgatctagtgctccacgagcacactggatttgtcatgactctcaccaggaacattagtagaaggtttgttatgtaacattactgattgcatggaagacaacatttctactaatcgcatcctttttggtttcaggacaccataacttatagcctttcaccccagccggataaccaagaaaaatgctcttaacagctataggctccaattcaccattatcaacat

SEQ ID NO: 7212 - DNA, 69039 bp, Oryza sativa
  unsure (1)..(69039): unsure at all n locations
ccgccgccaccgccccaccgcgccgccggccgcctcgccggtgccgttgacgccctccggccagccggcgaggcgggcggcggcgcggtggggcggtggcggcgggggatcgcacgcgagagacgggagtagcggtggcggcgcaatctggatgggggaggaggagaggagttagggttaagggtctgcatgaatcttgaagcatatccaatggtccaaaatttgaaagataggaggtgggattttctgtcaacagatgtgtagacagtcccagtaagtaaatattaggctctaatagtaccccttctcttcctactttaaaatatgtattcccttctccgtcattctcactctccacgagtcggaaatcattctcgccgactctagcacaagagaaatggcgaacaggatggtggcaccaaatcgtgtgatcttctagcttaggtacggatggagggagtccgacttctattgctatagctaggactcacgttttatagtatggacctaaaaactaggtcctgatctttcaatagatattgataactctcaatttgatagaaacttgacacatacgatcccgttttcgatcaacacgatccgaaccttgcaatcacagcaccacgtctcctctggttatcaaccatgcgctgttcggttgacctcgctgagaaggctaatccctacgggtgtttcacctaggcctctgaactctcaaaatgtatttttgggtccctcaacttgtctcgagtgtcatatatatccaaacaggcttcaacccgctccatgtgctgacgtggtatgccatggtggcgcgtacgtcagtagaacccatatatcagtcacatatagaaaaaatcaagaacatatttttctcctctatttttttatttttttaaaaaaaataaaaaaaatccctttctcttctctttataaattttatttttttttctatatggctggcatatggatcccactaacacgagcgtcactgtgacatgccacgtcatctcacaaagcgggttggagcccgtttggacatatatgacacttatgacaagtttgagaacccaaaaatatatttcgagagtttattagggatctagatgacacatccgtatacaagtttaagaaccgtacgtgtacttcactactcttaatgtttatgatatagctactactgtctgcttccaccaatcaccgcgtctatttttttaccaatcttacttctaatcacccctccttgctcccactgatccccaaccatttctcatgcattcaaggaacaatgatgcatatgtgtagagatgcatctattctcgaaataatttagagctatatatgtcgatagggacaagataaattgatgatttgccattttttggatatatcttagtgtttatatgcatgtgttgtgttaattacaaaggttctatgagttgataaactagcgtgtaggttgtacttgtttgagtttgaccgctgagctcaaacagaattaagatgcatacatgatgggcatgcatcaattagctaggttattgctttgaaaagtaagttagactttggtaggaacgtactgggtgggtatatatatatgcaataattcgaaacacggatgctacttccactaattgaagaatgaatcagtaggcgcgtcttcacacacttgcttcaatcggtcggatatatataggcatgttattatgattttatcctggttttcgttagcacattcaaattattaaatagaataaaatctttctatataaaagttatttaaaaatatcatataaatatcatatatatcgtttgtgcttgtctactcccctcccatctcctctgtcacatatggctagagggaaggagcccgacggtggaaagggtggcggagacggcggctggcagcggaaggtgtggcagctacggtttcggccggcctcctccactcccctatctcccttccctctcctagatctggccggatgggatgaggtcagcggcaactgctggggcttcggtcgggcctatccactcccctcactctcccaaatctggtcgaaagggaggaggtcggcggtagcaaaggggtgatggcggcggcaacaggggcttcaaagggctccttcattccactccactcccctccctttcccagactagctctccctctaccagatctagctagaggggaggaggacgattgtagctgcggccggcagtgacaagggaagaggagcaaatggcggcagcgcagtggagaatgatgacctagacgacgacaacgacgatggcctcgatagtgcgcaacggcgacggcaaggctcctggatctagtccatcgcggtcgcttgattgtagttgttgcttcttctttttcttgtgaatttttgttggatttgtaaatacaaaatattttggagtagcttgatttgcaaatctgatgaaacgttcttcccattttctctttgatttgtggattgttctatgaaaattgatgtggcaatgggcagacaaagggcaattgtatgcccccccccccccatgagccaagtggggaaattgatttctacaggcaaccgaaaccatcctctagaaatacccgatttttgtatgtcttaattcgcaaacaatgtatggccgaccgtgtgcgaaaacctgttttgttcgcatacgaaaaccttttctctcgtagtgatttctacagccggctaaaatggcatgtgtccatgcgtataacatttttttcctactgtccaagaatatataattaggagaaacgtacttaacagctagctagcattgtttcatgcatatattagttgaagaaaaaaaattgcatgcgtgcgtgcatatagggatcgaaattagccagtgtcaaattaacatacatgaccgatcgatcgattcccgaccacgatcgagctagcacatatatgtccatggtgtatgtatctatcatgtttaacgacctcagctagctgctggctaacgtaccaacaaccagctgctgtccaagtcaattacatgaagctgatgttgatcccgatcgatctcgcatgcatgtactcatctttaatttattccgatccctacccggccgctgctgtccattaattatattctttggttagttagatgatgattatccaaattatttcagtctcttctctagctagtatatattacgtgtgccaaattaatttaatcatgtctgagtagtaaaaaaaactgatatacagtacataattgtacttgagcaaaagaaaactaattagtaattcattcagtctatatttttactacggtcgacatgcatgtatatatgctttcaattttaatttgttatattagttatatataacaattatatagcaaattataaagaaattaaatttagtgcatcctagttcgttttccgcccggccctccaatatacgtagtatatatagtatatgcttggcattgagagttatatatagttggggtgcaatgcaaggaggccgtgcacgcgtgcttgcaagcgacggatgcatgatcgagatggatggatagatagatagatagatagatagataggagtatgtgccaagaattcaacttagtagctagccaagactacctccggctcaaaatatttatatttctaaaaaagagacatattagctgtacaaacaaattaccataataatcctaaaaatatagaataaagtaaatattgagacaaatggagatggaaatataggagggggtagaaggtaggatatttctaattgggtactacctccgtccttcccagaatataacaatttttggctaaatgcttatattttgggacggagggagtaggttttatcttattacaaatacaattattttaggagaaaatttaaaaagtagaaatacaattattatactccctacattctaaaatataagggattctggagggatgttatattatgcgacagagggagtaagaagcagtagtcttctttatagtgaagcttaattaggaacatacatacatatatatatactagcaaaatgcccgtgcgttacaccgggtattagcggggtgtttgaagtttgatattaatgatttaccaaaacaccatagtatgattattagcatcggttatatgtacagtgataaaaatgatgcccgtgcgttgcaacgagtgaagataattttaatcatgtatagtgttggacaaaaatgataaaggaatcgtaatcataataataataatgaaatgaaattgcagtgacatttggaaaaaggataaaaatatataattaattttccgttaattccattagctaaaaataatttaatatgaagtaggaaaagttattctcaaattttagcaattttcaaaaagcttaaatagagcaaactaattttgtaaatgaaaaaaaatttaatcgcctaaataaaacaattagacctgtaattgaaaatctgttggccatctcgtttaaacatgagcctgcgggtgcgtgtggtcacacaaattggaaaataacatctagccccatgccccatctgtcagcgcatttgatgctacctgcgaatttatacatcttttcggtgttactgagcaaagtgtgatcattgaatgctgggagaaggggtggagttgtaattatcagcacctgtgtgcaaaatacaaatgttctctcctctattggaaaatttatttataggaaagcgatacaagctgagtagctgatacatttatttttatcttcactaaaaagttcatgtgtgtgatacatttatttttatcttcactaaaaagttcatgtgtgtgatacatttctttttatcttcactaaaaagttcacgtgtgtgatacatttctttttatcttcactaaaaagttcatgtgtgtgatacatttatttttatcttcactacaatgttcatgtgtgtgatacatttctttttatcttcactaaaaagttcatgtgtgtgatacatttatttttatcttcactaaaatgttcgtgtgcgcaatacatttctttttatcttcactaacaaggtcatgtgtgtttataatgcttcctatttgtttagttttgccttttgcttttttcacctttctttctagaagctaaatataatataaacaacttttcttgttttcttcaagcaggtttctttgtctgatggcattattcaggaaggtcctcagagaatttcagaggcagctatacagatctctaggtgtcgtgtagcggattttctgaatggacaaactgggtatgatttactcccagattctggcaaggtatggaaaatgagctcgtcttgtatgaattttagtgctctaatggttattcttattacattatatttacaattcaggtcattgctctagacgttaatttgcctgtgaagcaatcttttcatattcttcatgaacaggtgactatgccttcttctgctagtttccctccaatctttcattcttcttctgctctgtagcctgtttccctccaatctttcattagttgttctgacattgaactagtgatattttgctttgatctgtaaatatagtggaataggtacatacctttttagtaaatatgttggcctgttgttgcgtacaatgtttggtttcattggcagcttcaattcatctgagattgcatgaaaatggaaacactgcagcctcatgccttaaaagttgcagctacttcacctacttcacacttcttgtacaacccaatgttgcatccttcctcttgtacacatcacctagaatgcatgtggtcaacctttaaaagcttgaaagagcactatatatgtaaaaacattcactttaatttattaatcgatacatcatcaatggggtctaatttttgttaagatttgattagagcaagtaattgtcaagggtgatgattgatgtgtcagacatccaatacaacaattagaagaggttggaggaagtaggttctattctgtttgcactccacaatttccatataggttataagaaagttcagctctgtgctttcttagctgccatcttgattctgatttaattatttttggcatcttgatataactggaaatttcatagtttctttaaccatatatattgaagtacaagaaatattggctggttttgggaacatacattaaataaatagtgtaccttgcagggaattcctgtggcacctctatgggattcattcaggggccagtttgttggccttttgagcccactggattttatactcatattgagagaggtaatttattctgtcacttactgtttggtgttagtattctttaattatttttttatgtgtcattgttgttctctattgtatattttttattgttacaagtgatggtttaatgttcatttcaaatatgctgccacttttagtggccctgcaaaacgaaattgcgcaattcttgttttttttttttaaaaaaaatctgaagcagtgtaatatcattctttgacagtattaagttattgacctagaagcttatttcacatgaattataaagacgactggttcattaatggaatgtgggagtctatgcatttgaacaatgtacctgcttgtaatcccgattctgctgtatcacttagtaaccatgcatctcatggaactttgtttgggtgaccacaagaagttcagccaagatagtgatcatgttgaactgtttttcccttaattggaagtgttcagttagtagaacctccaaaaatttgaaatcgtatcttttggaaggtggactctagaaaatagaaataaatatgctagtagtagcgactgcatcatgatactttatttttatgctgtttgaattgtttctgcttccaggtaaaggattattaatcctgaccatgtgatttgttacttgaaacaatttgtgagcatattccaacagagtagcatttaatatcttgtttatattgcagctggaaactcatggctccaatctgacagaagagcagcttgaaacacatactatatctgcgtggaaggaggccaagcgtcaaacttatgccagaaacgagggttcttggagggcaaatcaccatttagttcatgtgagttgtccactgtgtttgtgaaccaattgcaaatctgtatgcactcaccacaaattgagactgctgccatcaacttctatctatatttactggccaaattacactccagtgaattttagaattcatgtattgcattctaaggataatattttaccctttgatttatttgcatttgacaaattgttgtcaacaattgttgtgtgagtaccacataacagtttttggcacaccatgacacacatttttgtcataacattttttggcacactatgacacattttactttttgtgttacaactaagttatctactggatgctgaaatatattttgcttaattagctttaattgccatgctcaagtgagttacttagtgaactgcaatttgtttggtgtgaaatttcatcgaaccccttgcatcaactgttccttttcatttccatcctagtattttataacatgcttagttttataatgatcatgtgtctcatgcacttatgctggagtgaatctattgtttaggccaccccttatgaatccctgagggaaattgctatgaagatactgcaaaacggtgtttctaccgttccaattatgttttcctcatcaccagatggctcatatccacaattgttgcatcttgcttccctttctggaattttgaaatgtaagtgtttctatgtatttgcatgaaaagtgtgctatacacaaacatattacatgatagcttaacaacatttcattttcaggtatttgtagatattttaaaaattctcaaggtaatttacctattttgagccaacctgtatgcacaattcctctgggtacctgggttccaaaaattggtgatcctaatggccgtccattggctatgttgcggcctaacacatctcttagcgctgccctgaatttgctggttcaaggtatgttatctgtctgttttaccataaccaatgcctgggaaagtacttgcatttctgtttcttggtgcaattactgaagtttaatactaattccactgagatctcttacagctttcgattatttacgctatcttgttgccaaattaatgtcttattacaattactctgtactctaattgtttcattcagctggtgtgagctcaataccaattgtggatgacaatgactcactgcttgacacatattccagaaggtgcccatttgatactcaccattctttgtgtagtcatatactattctttggtccatgtattcattgtgttttttccattatgtagtgacatcacagctcttgcaaaagacaaggtgtacacacacattcgcctagatgagatgaccattcatcaggtatgctagtaaatatttaatgcgtcttgatttagtttgtgtctggaattttagctgggatacagttgtacaataatttttgcagagtttcttttggtcttgaagactggttaacttagaaaataataactttactgatttatgtatatgatagggaaatctgtatcgatacctgcatcacacatatatactatgaggacatgcctttgtggttctggcatttattagccctgtgtctttttgcacgcagagcatggagcatgcacacacatctaaaacaaaggctgtaggctgtagtttgatgtgttttgtccatttatcactcttactttccataccggtcaaacaaacatatactataatagaataagtagtgcaatgctgtttaaagcaggctttctcgtgaatttgtgtatatgttatccatcgagctggtgtgatttttggtgtgaacctactcatttttgttgttatgttcaggctctgcagcttggacaggatgcaaattcgccctttggattctttaacgggcaaagatgtcagatgtgtctccggtctgacactttgttgaaagtgatggagcgattagctaatcctggtaattatctgtgcctagatatgcttcctgaaagcaacttttcgggttcaacttactaatattttttttttgcattttatattgttggtaggggtgcgccgtgttttcattgtggaagctggtagcaaacgtgtggagggcataatatcactgagtgatattttcaagttcttgctgagctaagtgaaaatgcccgagccatctgtgttttgttctcacaactgccggagttaacaatagcagaaaaaaattgtgaatctccaacatcgatctctctggcttttggatcagacaggtgtcttttcccgataatggccaaccagagtctgtaaagtcttttttttttcccttgccccttcgttaccaaaatgtctggtgatttttatttattggattgttttgctgcttgctcggtttctgagccccccaaggagttagtagctctgttgaaagggtgggatgggcgcttagagacatattttagcatgaatcatcatcacagggaagtaagaattgaaggaaagaggggatgctctgaagcaagaaggatgaattcaatgtgttgtttttgctcaacaaccgtttttttggcgggcagtgttgcaaccatgaaaggagaaattacagtcggctccttgcttgttagacaaaaaaaaaaaagaaaaaaaagaagagaaaaactattggatatctgatgatgtagtgactgagaagcaggagtggagttgtgtaaaacctgtaccacctgatttttatgtctaaaccgcagcttactcattttccttgtctatgattcttgcttgcttgtgtagtgaatagtagtttttcttgtctggtatctctctctggtagcggcgccgacgtgcggaggctgtttgtacaagttgagccgcatgcaatgcatgttgaggagcaactggaaatcgatttggaacttcattgatgcgtgcaggtgaaggtgaaggtgaaggtgcaggtgcagcgtgcggtgcgtccttggtccctgtcgagtaacggcgacgggcttggcgtcgagcggaaagatctagagagggtgggttacgtcgacagacactggataagatcaatccacatcgccacattactccgcccttttagacgcttgtctgctgctgctcatcagtagttcatcagtagtagtggtaggggagataattcgtcgttcgttttgtgcatccatccagaattcgttccagatccagccagccagccatctcaagcttctctcttctcttgttattaagagcaagcaaacagtagtctagcgaagcgagactgcgagagcagagcattgttcttcttctctagctattagtggtggggaataatggctcccgccaccaccgcagcaatggccctcgcgccgcctccttcccatcaccatcaccatcaccatgtcaagcagctgcagctccctccgtctgtctccgtctccgtgcccctccgctccggtttccttggccgcgcactgcctgctgctgcccacccacagccgctgctcgccgccgagagccgccgcagcagcgccgtgtccgtgcggatgtcgtgggacgggcccctctcctcggtccgcctcattatgcagggccgcaacgtcaaggttctcctctcctactgctaccactagtttgcttccctggaatttccttcgtttcatattataaggttttctagcattactcatattcacatatatatatatatgataatattctagattcattatcatatatatgattataggtaatgctagaaaatcttataacctgaaacagagggagtatatataattcggtaatggaactagagtatttgttttattaattggacctttatgaaatactagtagaattcaacgaaactacattcttctttattggttatattagtagtaatttgcttcactagaattctattttatactagagagattaaaaattattacaaaactaactgtatacccgttgcaacggaatagtaatatggacctattacttattactacctccatattttaatgtatgacgccgttcactttttgtccaacgtttgaccattcgtcttattaaaaaaaattatgtatctattatttattttattatgacttgattcgtcatcaaatattttttaagcatgacataaacattttcatatttgcaaaaaaaaaaaacgaatggtcaaatgttagtcgaaaagtcaatggtgtcatacattaaaatacggagggattatatgggatagctacagtagcagagtcatgataaagtagtaatgtgttgggaggagcggtagagcgttgtgtggaaaaataaagatgggaatggaatggaatgaaaagcgtacgtgcgtggcgtggcggtgcagctgaatgagaaggtgaaggagcacatcgaggagaaggcggggagagcagtggcgaagcacagccagcttgtgaaggaggtggacgtgcgcctctccgcccgcggtggcgagctcagccgaggtcccaagatttgcaggtgcgagatcactctcttcaccaagcgccacggcgtcatccgcgccgaggaggacgccgagtccacctacgccagcatcgacctcgcctcctccatcatcaagaggaagctcaggaagatcaaggagaaggagaccgacgtccgccacctcaaggggaccaagccccccgtctccgactggccgccatcattgctcgacaacaacgacgacgacgcccaggcccagctcaaggatctggaggaggccgtcggcgccgaggacgaggacacggtgctcaccaaggtctgcagtctgatgcatgatcaatgcatataaatcaaatcattcatgaaccaaattaatgcaactgtgaatgcaggtggtgcgcaccaaggtgttcgagatgccgccgctgtcggtggaggaggcgatggagcagctagtgaatgtggaccacaacttctacgccttcagagacgagaagaccggggagatgaacgtcctgtacaagaggaaggaaggaggcttcggtctcatcgtccccaagggagacggtcatctccacaaggagaccatccccaactctgaccaccaccacccctcccttgctgcctagcctctacacctcctgcatcaccatcctcatttgctaattatttctatgcttgcccaagagtctctaaatattactagtattaattaatccaagtgatgagagaggtctttgattttgtctccgtgtacatcgatcgatcgactcttgactactctgtttaaccaactgttttcgatatatttatattattaatgatttttccaaggtttttactctgctttatttctggaagctgcatgtatagcttgtgcttttgctgtattattgcaaattttaaaaaatatatcctacatcttagccactcgatcgagaaacaactgaggaagtccatttgtacctgtttttgaagataggagaaacgttatattcagtttttactgttgacagagttgattcgatccaaatcgaagaggtgaggaatgtacaatagacttattcatgggtgtgtaagttaataaataggaataagttcaccagaggtcccttaacttaaccgcgagatttttcgaggtcccttaaccacaaaaccagaaatgtgtacctctaaactcactgaaaccgttcaaaggaggtcccatagcagtatttttgcccggttttggtgacgtggcattctagtcagcaaaagaaattaaaaaaattacatgggacccacatgtcatcagctgcacatttttttcttctctcttcttctttctctctcctctcttcaccggcagcgggcggcgatgggtgagcacgggatgcgggcggcatgcggagagccagcggagtgggtggcgaagctggatccgcatgtgctgctggcgccgccgccgcggcagatgaaacaactaaccgaccatcgctgcttccaggggcggagctagtatatattagggggggtgcccaggaacccggttaagaaaattttttagctataccttatctatttttaccatgtatgcacccccctcaatgtaaacttaggcacccgcataagcttaaactcgatctaaagtagagtaaattaagcaagtggcaccaccctccatttcgctctagctctgcccctggctgctccgcctgtctgctacgcccgtcgaccgctcgccgccgcgctcgcccgcccccacccccgccgatgggagcgaggcggccggccgcgccgacgtgagaggggcagaggcgacggtggcggcgctgacgggttccttcccctgtcgctggtcgctgaccggtcgggggacgacattgacgccgtgttcaaccccgaatggcgccgtacgattctactgcttgctatatagctcaacgattataaagcttgaaggatgaattgaagcttcgcttttcttgagctatatggtgtttctttgggttttcttctttgtaggtaggtgaccaggcgctgtacaatgggttcggggccgccggaatgcatggcgctgccgtcatgcagccgccgacgttcgggcaggtacgcggccaagaaccagtactcccgtgggttcaacttcttccccaattcattctgcttctttaccagcgttggaaacaactgcctgcctgccgcctccgcggcgctcgtccgccgtcgccgcgctcgcctacccccgccgctcatgcctgcttcgcttgccaccgctgcgctagcccgccgtcgccccgcccgtctcggcccgtcgaagaagagagaagagaagaaaataaaggagaaaagagaagaaaggggaagaaaaaagagatgtggggccacatcattttctctcactgacatgtgggcccccacatatttattttattatttttactgactagaatgccatgtcattaaaaccagccatctatactgccttagaacccaaattagatggttttgtatagtttaggagtgaagatttctggttttgtggttaagagaccttaaaaaatctcgctgttaagttgagagatctccggtgaacttatttctaataaatatagccattagtgggccgcctatacgaggcttattttaggctataaacgggccgtcattatgatcaacacggtccatcgccacgcatgctaagcaggctgattatgtgtcttctatacgttatgttactgcacgctcactttaaactgtcaatcatccatcattatagttaggcttatctcatattctcatgcaaaacaagaatgttcaacatcacccactgacaatgtactcacaaaacacacgtacacgcgcacgcccacacacaccaacacacgcaacgcacgcacgcacacacgcccccccaccacacaacacacacgcacgcacgcacataaaaacacacacacagacaattgcatgtttcaaacattacaatcaatccgcaaacgtttagctattattttctacaatgaaagcagcatttaattatcatgaaagcaatagtcaattcataaacactttattccagcactggtagggtgtataaaaatgggacaatagctaaaggtaaacaatgcactattattcgtgcaatgcatctactccctcagttaaaaaatgagaagctttatccttcaataccctttacctaccatcactcttactacttttattaatgattaagggcattttagtcattctcactctccactatttccaccttgggatgctaggaatggtttttttggacggacggaatataaggttggaacagtgagatgtgatatagtaaaatgttggactacgcacgtgcctgggatgcgcacaaacgcattgagaccagcccacgtgcacccgactcgacccatgctctttctcttccgtttctaatcacaatcatcgaccgatctccatccgagtccacgcaggcatttagggtcgaatacaagaaccaaatctattagaggagggtgaatggtaaaaacattaaaaaaataaatccttttatggaattaaaagaacctcaaacctaataaagttgtgtccggtcagaccgcgttgtagctgtcggtcagaccgctcttggttaacaaatctgccgacatgctcgctgtcgctagtgtgatcgcccatttatcgtcggttagaccgctcgcatgatgccggtatgaccgttgggaccaaaaaataactttattgcatcaaaatgtgtttataaagtgcatccaaaacacttagctctcaactcacgaactagaattgaagcctcaaagcaaaccctgactttcctttccaaaaagtcaagatacttaagccacatcccctcttctatttataccaaaacatagttgtattttgccacaaatcgaactataattaggaatcctaatgacaaagcaaacccttcaaatcaaggaaacaacatccctatacaactccaaactcagatctcctcaaacttggaccacaatccaaatttgactcatctttccatacgcacgcaatctcccttatatgccatacgaaaatctttatcctcacgtgcattgttctctagccttagtatcccacaaaatctcgttaaccgtctagacctcaacttctcccaagctagttcagatccatcactagcgatactatctgaggccttaagcaatatatgcacatgaacaacaagagaccatatccgagcataaggtcgcaccaacttaattcacatcagcacacaacaatatcatatacgtatagaaaccatctacaaatcataaacatgaaacaatatagaatatccactaaaataacccgaaattgactcaaaccatacatcaccccggtctgaccgttaggctgcccggtcataccgcacaaacacctcatgtccgataagtgatcactgccggtctcatttagagacgtataccctgttcacggtcagaaaacacttcaccgtgtttttcataaacacttacctttgacaattattcatcacaaatattaaaccatcatgatttcacatagtagtgagctcagccccacgatgtacctcattccgatggatctatcccaacgaccagatttgccccctcccccccaacattgggcataccccgccttacctaactggtcgatcgatcactggtgttatttttttaataatagaaatggttattagtggcgctgtttccttacatgcatctcctctctcgtctctgatagtttactccactagataggctgccgccacacttgcctactaaccattgtatcttcctttcctcccacggaccctacacatgtggtcgaccctgcccaatttccttctctctcctcgtagctccggtactccgtccatcacatacaagtacattgtagcctatccatctccgccacccacacctacagttggccaaaaggcccgtagtccgacggtccggcccacaacacggagttttggtccggtccaggcacgacacgactcgactgttgtcgggcctgtgctagcctgactcaaccgttgggtgttggctgggcctcttccttggcacgacgtgccagcccgacacggccaacactcccgcatgccatagcccgtcgatggctggcccaaagagatgagggaggcaaaatagacttattttagccatataagacacaatccaaagatatgagggagacaaaatagacttatttcaaggatgagcacagtaagctagtcatgccttcgggccggcacggcacgtcctgagtcttattgggccgtgcctaggccataggtacagcccgtgggtggacaaggcacgacacggcgtatcagtcgggccgtgcttcggtcgtgtcagaccgaaccatgtctggtgatctatttgactatagttagctctaattaagcctcaaagtctcgaactttctttcttcacagaatcacaatgctcccctctctaacccgctatctaggtagaatcctaatatgtccaaatcggaatcgggcggtcgtcgaacgaacgcataggggccggcttggcgcattagcccatctttctcatgaaattgaccacagaggcaacacgtaggccagcgcacgtacacaagttccaaattatgtccctgccaccacttaatacgcagtggattattatatactccctccgtttcaaaatattttttttgttttctgtactttatcctttttttttacagtttttgtctcctctattcaatgaaattgacggcctcattgattcgttcaaaaaaaatgtttgacaccgttgactttttagtacatgtttgatcgtttatcttatttaaaaaaaattgtgaaatatgtaaaactatatgtgtacatgaaagtatatttaacaatgaatcaaatgatatgaaacgaataaataattacttaaattttttgaataaaatgaatggtcatacacgtactaaaaagtcaacggtgtcaaacattttaaaacggagggaatagtatgtaattgtaaatacagatggaagggtgggtgtgcatacatggcaagtagctagggaggcttgcacatggtgggcaagagatcgaaaagaaacactgacaattcataaggcccctagctagctatcaatgtgaagtactcactccatccgaaaaatacgaatctagaactgaatgttatgcatcttaataccatataaatctggatatattatatccggatttgtgtcacacatcagtactagattgattttttataagacgaagagagcagtagtatacgtttagctagtagcctctctagctcagcatacgtacatcgatccatccatccattatgtgctagctccaaacataagatcgcccatggtattaattaatatgttggttgctagtattagctaactcttgtccgatatattgtttctcgactcttgttgcggggacaataattagcaggcaaattataaaagcagggggaagatccaagctaggcggccagtccgtccggtatggaacatgacatgacatatggtactaagcatggatatatatgattgcttgctagttgcattcgctagctatatacacaggcctggatccatccatcgatcatatgtatgtatgcctgccaaacatgcacctacctgcagatcttctacccttccttgtcttatttgttgtcgtttttgtcagagatatatcgatcaatactactgctaattaatagtagtattaccttagctagtcgatcgatcgttctagctcccgcagaagagttaatttgtttgtcaacaaatcagggctatagatgatgggtattcagagttccaaagtagctttcttagatataacaatatcaattgatatgttgttagtacaatatagtaccatttttatggattacttttactacgatttgtatgcatgtacgataaaattatattgaaatcactatagaaaatgatttttcacgacgtcacccaattattctcggtggcggctatttgttcaaaccgccagcaaaaaatgtaactgggggtggggggcttcgaatcgcaagcgaaaactgatcttcgctggcggttgaggccgacggggctcggcagcggcggcggtgatggtggaggggacttcaaggacgacgacggcaacctcgagtgcgacgacgccggcggcggttctctgtatttgtgatgtttgtaatatttgtgatgcactctatttggattgatgcttgatgttcaaatttttgttaatttggtgatatttgtgatgcttgaatgcttgtgtgaatgggaatttttggctgtaaattgtcgatgtaaatttatgtggatttgtggatggagcgctgatggaggtggacggagcagtgttttcttttcatattttttcttttcaaatttcctcttcgctggcggctagggtagctgcatggttttgattttcgttggcggtcgttttaacacagccgctggcggtcgcggtcggtgtaagacaaccgccagcaaaaatagatctttgctggcggctgacttaagacgaccaccagcgaagattctgatcttcactggcctttgctttgtggcggctccaaattccgccagcgaaaatctaaaatggccgtcacgaaaaatggttttcgtagtagtgagttttgtaattcattataatcagcatcaaactataaatctttaaaataaaaattagtaggatgttatttctttacataaatttcactttggaccaccttttattactgatgtttgattcattttggatcacctttcaaccaatgtttttattttatattagatgattttacctttatggcactttggactatcctcaactcttatattccatctatatctaatttatcatatgtcaaatatacggtctacatatagctgagggagtttattgatgagagtgaaccagcgtacttgagtatatattcatgcatgcaactgcagcttattgtttataataatttatcggtgagagagagagagagagagagagaaccaacggaagtaaggttgttaaaggtgtactagtacaacagatttggggttgttctgcataaacgattatgtcgtactatcgctaaacgcagtaaagctgatcgatcttacatgtcagcaacttgactacacccggtccctgctgcctaactaactaattataatttactagttcgtactcttgtacttgcaactaattacttactcctaattgctactgctctcgatctagggttacaagccaattagatcttaaactaactagcactaatttttcatccatactacacatatatataccaatataaaaaaatataatatcataactttattaaattctaatacaatcatttttctctttatctattatcaatgcactactaacataatttgataaaaataattacttaaaataaatttattttgaaataaacgtgaggggtcaagaaataagaacccatctcctatacacgaaaaatggagcggttcattaacacatgattaattaagtattagctaattttttttaaaaaatagatcaatatgaatttttttgacaacttttcgtaaaaaacgtatcatttagcagtttgaaaagcgtgcacacagaaaacaaaaggagagtgttgggaacttgctcttgcaaacacaccactctgggaccgagggagtaagttcttggagattcgtcgaattaaatgacaagacagactggttggctgttggtcctctaattgtgcgcattgatctaatgtgtgcagtacttaatccacaaatgattgcatcagtacttccgagctggtttccttaattccaaaaccaaaagggaatcccaagcacaacttgctactttacatacatatgcttgctcaagaacatatttaaataattaagggcaaaagagaaaaaagacaaattgatcagctagctagagactagccagacaccaaattaaagatggctagaccgtgaactcagcgtcgtgaacctccggatgactcaacaaattcataccacctcaaattagagccgttggtgctgagccattatagcttagcgctaaggcccatggcgttgagtccacggcctatttttggtttaatttttttataggaactagtttcaaaataagtttttaaaaaggaccaatttattaaaaggacggctagttttgtggctaaatactttagtattgtggttctttatcaaaaagtcagtctattattttaatatttcctcttcacatggagagataaaactttgcaaaagacgattttacccttggttcatctagtatggtcaaatccaaacaaattttagttggttctaaatatttgcaaaatttaaaagctatctcaaattacggaaatcaaaactattctacaaaaaatgtcaaaactcaaaaataatatttcaaatttcttttttagaaaaattgaatgaatttgatttcagtaattctaggcaacttttgagttttgcaaaatatatttaaattataccaaaactgtgtttaaatttgaattaagctaggttagccgagagtaaaatcgtcttttttgtaaagttttatctctccatttgggggaatatattaaaataacggataaagtgtcttttggcaaagaaccataaatagatagatcgattggtagtaatacacacacacacaaaagaaattttgcatagcttatgctaactttcttctcaaattaaacttaatttgcaggttcctatatatagcaagctagtattctggttggatgcattgtacttattttgcaaagattaagggattgaattgagcatatatgtagcaggtggatcgcgctcctctgacgtaaagtcggagggacgtgggtcactgacgtgtgggcccaacctttgtgggtcccacatgtcagtgacaaagtccctctgactttacgtcagaggagactcatccgtagcaggtgtacatacatatatacaggctgctactagtagtattacttttttttaatatatgacattattaatatttttattaacgtttgatcattcgtttattcaaaaaatttatgtaaatatataaaaaaatttaagtcatgcttaaagaatatttgtcattaattaagtcaaaataaaataaatgataattacataaatattttgtgtaatatgaatggttaaacgtatctcaaaaaatcaagaaaagattagcatatattgatctcttaattccaagcttccctctcacagttgtctgatcggatccaatccggaaaaccgtatgatcgattttggattcccttgttgccactctaccctagctactgtactttgctagctgtatagtacatattccaagcccttaaacatgcatgcacggttgatatatactttatgttaatccttctatgcaaaatgatcgacgacgaaaatactgtccaactgctaagtaaacacaatcactagctccatcttagaatatagcaatttagaatggaatgagacctattttagaacagaatctagacatgaggcatatatccagatttatttttctagaataaaatctattgtagattgctacattctaagatagaggtagtagcttacaactaaaaagcaaaatccaaaaggatttttgtaatgactggaatattacatctacatgaatgcttgtgtcatgacagcaaatgcttttgagcaaactagccaaattgctaggcggcaccaagacaagaacattactgtacagattaaggaacagcggaaaataagaaccctcaccacgacccaatattatctctccgtgtgaagtcttttattttttaaacatcttaagggctccttaatttggaacgcaggatctgaaaaaatgcataaaacatgcatgaaaaacacaatattatagaatgtcatgtatgggtaaatccaacatatgaaatcaaaacatagaaacttggatggttaataggaatataattacatgaatttaatggaattaagagagagaagatacattgaacttctaaaaggaaaaatcaagagaagaaattttaaaaataccgttgataaatgttctatttcaacgtttaccattgacggtagctacataagtaatagctaactcggcggagacacaatccctatcatgacattactattttttacagatcaaattaccatttgtgaccgttcaatttagactactaagcgtattattaccacgtattatgatcacagagataaattaaatactactacatagaagtttagaacaaacggtctaaataatactccctccgtttcacaatgtaagtcattctagtatttttcacatcatattgatgttaatgaatctagacatatatatatctctctagattcattaatatcagtatgaatatgagaaatgctagaatgacttacatctgaaacgagggagtatagtggaagaaagatttttagaaaacatatttagacatgcataaaacatgcaattaatttaatttaatacttcagttaattatgtctagcctaatatgtttgcaaattatgtctgaaccaaatgatctttctaccggccgccagcagagattgatcacaatcaagtgattctatatattatatatagctatgggtacgtcgtctgcgggtgcgtgtgtgatgtataaattgcatgtatatgggatgtctagtcgacacgtatgcaatctaagtacctgacctgtttatttcgtcgttacatgatactctagctaactagctagcaccatatatattaattacccctgtgtccttttaaatcaaaagatttatgcaaaacttcataagactttaaatcttaatggttttttttctatttggccctttgtgtatataaaggatacgactatatagaagcttttcaaatcttatgaaatttctatgtaatggtttattacatataaatttttgaggaaacttagcatgagcttcaatattttagacaattttctttgagcctatctctcttacccgattgctgtgtttttcccgcagtctaattcaaacggtcgatattaatttatgtgttttgtaatgctttgttttacacttgtatttatgttagaattatgtatttttttatattcttgtaattcaaagagccataagtgattttgtttatgtaactgggacggaggtagtacgtacatgtttgttgttagtttcacagttctgttcaagtgttcatcgatctatatatatctacagaggatggctagttatagccgcaatatgcaagcacgatcgatcgatcgacttgttgaacgcactgtgcgtactgttatgcatccatgcatgtggtagctgctgttgccgaaacaaacaaaaaattgcctgattaattaagaaattaataaccctcgcagctatgccaggagccaagtaatctgatcgattagctagtcgcagctttttgctagctgctatacctacctagctggctagcttaatttaggtttaacgtggaacatgcctatgattgtgcaaattccaacaaattgatttggattttgccaaatatccttctatttgagagatgattaatagatatgcggatcatatagtgtaattaaatatcatatatatctcacaaaaatacattttaatgccagaacaaaatactcataattaattagctatatatacgtgcgactgtgtacaaactttttaattgtacatacatttatacgctcgatcgatcgcagttgatccatgcatacagtagctgcgaccattcgctaatatgcaagtacatcgtgctaattaatccgacaagagatgtcatcgtcacctgttaattaattgttagactagctagtaattgcacacaagtgtgctgtgtcagtggtgacaacaacattagcagtccagtccgggctagtgggtgataattaatgatatgatcctatacatgcatatataaaaatgcacgcacttatatatacacacacacacagatacattcgtctcatattatagatcgatcgacgtactcttataaagcgagatagttatcagtggttaactaagagatcgaggctgaaaatgtaatataattttactatcttcaaatctctcaaaaattgaagagaacaaatattattagccagactggaaattgtaatatattaattactacattgcgccaacgaatagctaacaaattaacatacataataatagtagtatatatataaaaaaaagatgtagccttactttgtatatccattttggctaatatatatagctactagctagcttgtttgcatatatagatcagcttagatgcattacaattaattgtatgcataaatggtaatatcgttccaactaaatagctgacatcagcatggtattaaatttggtacctacggagtagtatcatgtttgataccagagacactagccaattaatcccgtgtggttccggtgcaccgcggcttctgagaggagctcggggaggcatgtgtggctgctgttgtggtgccgacggcgaggggcaagttcttgtcgtctccggtgcacgggcacgacaacgaagctcgtgctcctgtgggtgccagaaccgccgagcaaggtgttcgttgcggccacctcgatcgccaatatcaacaagcagctcatcttctccatcgcgtgccaaggttgaagcgcctcgatcggtaggtggatcgctcgctgctgaaggaggatatgatggttgtgacaggccggcatgctggcggccggcaccgacgacgctggtggccacgaaggtagatgtcgactgagcaggctccttgccatcgcccttctccaataagcggcacacctgcctagtccctccttcctatccatgtctaccttacacattgtgtgctccggccagctcgtgagccagaacgagctggctggagctttgcttccgagccgagccgaactccactttttgctcatttagataacgagccgagtcaagccagctcgttatctaaatgagctggagcgacatatacccctatctgtatactgaaggtatcatatccgatacttagggtatcatactgacatcatcatgatacctaaatactagatttgatacttgtggggtatcatgtttggtaccagaggtatatataccagatctgatacctatttggtatcgtgctgacatcatacgttattctattgaaacggtataccactacgtagtctcactcaataatatactatatatgtacgggtaggatggaaggtacaatgcaatctttgcgtaagagaagaagagcgatttggtgggtagctagttatctatctatctcatgctgttttgtcttgattgctggaccacatgcatcaacatgatgtggcctggctctggctgtaatagttctatggaagagagagccagagccagcagcatcagcatgcatgatcaaggagagagagagagagagagagagatgcatgaagacgtactagctagctgtgtgtcgtcttctagctcgatcgtgttcgctgattctagattaggatgttaattgcgtggttgacatgcgtactgccaaaaccatccatcggtacgccagattaattaacaatctctaattccaagatcgatctacgctgtagcatgcagtacattttatatatgtatagttaacttattatatctgacatatatttgtttgggagccaacagacaaaatacatgaaagacaaattagttgaggctagctagctgcgctgctgcctagctctatgtaatggatcgatcgatcatatggcaccagctagcagctatcttcgtcctcattaagtttaaaccaactgcttgatatatatgcatgcatggagcgtagatatatatatatatatatatatatataaaagctgttgcgatggttgagacgattcaaacacacacagaaaaagcaaaaaagtatcgagcaataatccatatatgagtaaatatttaaaataaatccagcgtagatgctaagggaactcgagtcctcctatcccgctagatcaccatttaattaaggaggaagggagggtagaagaagcgggagaagaggaagagtaggaagggtagaaagaaaaataagagttcccctctaatttaattctggatatgctccttaatgcaacaaaagaataatattctctagagatagaaggccaaattattaatagagagaatcccttatataccactctaaattaaccggttcccttatatgccacttcaaattggcttctctcttctatgccaccagttcaagtttgttatcccttttatgccattgccgtcactccaccgtcagttgaccgttaacttcatagtaaaaagacgcatttgcccttgagagttggtatacaaccaatgataggtattttaatactaatatagctactggatacaacatatgaaaattgattcttttttgcattatatgcaattttagccatcaccatcacaaataaattttcaatataagcatgaaacatacagtttccaacaatatttttaatacaaagagcattattcattggtttggacaaaattttgttcactcaaaacggatttaaaataaaatagttatgattttttgaagtttacacatttttttagttgagagggcatattggtcatttacgaaaaaaactaacatgcgactaacagtcaactaatgctgcagtgctgaggatggcataaaagggtagaaaaacttaaccagtgatatataagggagaagccaattttaattggcgtgtaagggaactggtcaatttctagtagcatataagagattctctcttattaatatgacagttctcagcttgtgtatggcctctcaaaggccatgcttttatatattttcaccctatcaaaactcttttcatattagactacctcagtttatggtcaattatatagatcctattcgaagccaaccctcaatccatttttttcgcaaatttgtgtgaagctggatttaaaatatataattcttgaattaaatataaacaactctcttatttctattagcctgttataatttatatacaactatatctattaatttataatctagaccaaccacaatctaggaatgtaaatctttctgtttttcttattaatgtagtaataatttctaggtttttgtgaacgcgcaataatttctaggtctctctagagtaacatgaccttattgcggagttgtttgtccagtcatcaatctggtggtggcacaggcgctggggtgttttgtagtttctacttgagtaaattgcataaacgtgaatttcacgttttaaaaatcaaacatgtgaagtggttgtctaaatctcgacatagcgtcatgtcgcagtacaacaacacttctgcaacgccagccaaagaaaaaaaaacttgcatttagataacccttgcatgtccaagataaaattggcccaagtgaaaaactcagaactacataaataattttcgcaaatggccaaaactcatttttggatgtggtattttgacgtgtgggcatcacaggtgcacgtgaaaacccattttcacatatggatctgttgaggaggctgcttgcaaaactgatttttgcaggcaggcaagtaaggactttcgactagaacgatttttttttttaaaaaaaagaataaacactacagatccaagaccctatagctagggtaagccgcatgtggccgcggccgtgtggtccgttggctgggtacaaagagcagagtgggctaagcaaataccgggttgtggcaccatccctttcacattcactcgctcttgatatctttctctctcatggaaaagaagagataagtaattttaattgatgccgggatagagagagagagagagttaagaaggtagctaggggagagagcgaggttgatgccgtgatcgatcgatcgatctgttggcgcagcgtgtatataagggcgggaaggggagtgagagagagcagcagctagctagccgcggtcggtcgatccagctgctggggatgagtacttagttagctcggagctagctactaatggatgatatacttatgctagttagttaaatacagttattagttagttgtaggttgcatctatcatatctccatcggttaattaattgattgatagctagattatcaacaattaatgagcatggtggtgcagcaggagcaggaggtggtgttcgacgcggcggtgctgagcgggcagacggagatcccgtcgcagttcatatggccggcggaggagagccccgggtcggtggcggtggaggagctggaggtggcgctgatcgacgtgggggcgggggcggagaggtcgtcggtggtccggcaggtgggggaggcgtgcgagaggcacggcttcttcctggtggttaaccacggcatcgaggcggcgctgctggaggaggcgcaccggtgcatggacgccttcttcacgctgccgctgggggagaagcagcgggcgcagcggcgcgcgggggagagctgcggctacgccagcagcttcacggggcgcttcgcgtccaagctgccgtggaaggagacgctgtcgttccggtactcatcggctggagatgaagagggcgaggagggcgtgggtgagtacctggtgcggaagctcggggcggagcacgggcggcggctgggcgaggtgtactcgcgctactgccacgagatgagccgcctgtcgctggagctgatggaggtgctcggggagagcctgggcatcgtcggagaccggcgccactacttccggcgattcttccagcgcaacgactccatcatgcgcctcaactactacccggcgtgccagaggccactcgacacgctgggcaccggtccgcactgcgaccccacctcgctcaccatcctccaccaggaccacgtcggcggcctggaggtgtgggcggaggggcggtggcgcgccatccgccctcgccccggggcgctcgtcgtcaacgtcggcgacaccttcatggcgctctccaacgccaggtaccgcagctgcctgcaccgggcggtcgtcaacagcacggcgcctcgccgctcgctggccttcttcctctgcccggagatggacacggtggtgcgcccgccggaggagctggtcgacgaccaccacccgagggtgtacccggacttcacgtggcgggcgctgctggacttcacgcagcgccactacagggccgacatgcgcacgcttcaggccttctccgactggcttaatcatcatcgtcacctgcaaccaacaatatactcctagctcctagtcctagctatatactcctattatccatccatccatccatcttacactactataccattagcatcgatcgatcatccattaattaattaattaattactagttccggcttagatatatatctggcgattatttcagttcctagctactcctacatgcatgctttgcttaattagatctatctatctaatctatcccggccggcctgttttaattccatatatcatttggtttgcacgtacccatctatgatctatatatacatgcatgtcgactattgttggtcgtacgatattatattatatatagatgtaatacatatgttgaaaatatattgatttcttcttgctgtaggagtaattaattactccagttgttgctgtcactcgatcaatccatgggatatggggatcgatcggacgatatgcaggaagctcaaggacgatatgaatgatgcatgcatgtgtaaatgtgttgttgtgtttggtttctcttttgtcgtttcccctgcccgtccgttcgtccctcagctttttacctatatactatagctacctacacaaacaaacaaacaaagaaagagagacatatgaatcgattactagtaacatcgatctatcaatggttgcttcaatttctacttctcaaaagaaaatggctggctaaaccttgggtggggcgggtgacgccatgtgatgaagtagataggaacctcttcgccgcctcaacaaacataacaatatgggacggaaacacggtgcgatcttgggagtccgcgtggattggtgggcgaagacccaaagacctcatgccgcttgtctatgcgatctcaaaaaacagaggaaaatcccttcggcaaggaaaggaggaggacgcctgggtgcaagatttgaagcttgattcacaatcatctatcacagtcgacctcgtcgaacagctagtcgcactgtgggaagcggtccgaaatgtgcacttagacgttggagaaccggatcagattatttggaagttcacaaacaacgggcattacacggcctcctcggcttaccatgtgcagtgctgcgggacgccgagtacaaacttcaattccttgatttggaaagcctgggcgccggggaaatgcaaatttcatgcttggctcatcattcagaacagagtctggacttcagaccggcttgcgaccaggggatggcagaacaatggttgttgcgctctttgccgccgcgagactgagacggcattgcacctcgttgccacttgtagatacaccaagaggatctggcacctcatctctgcatgggtgggctatcagcagatggacccaacggaatgggaggaagcccagtcagtcaaacagtggtgggagaacattgcaaacacgcctagtgtcccgaaaaaaggacttcgatcgctcattctgttagtcgtctaggaaatttggaaagagaggaatcggcggatttttgatcacaaagaggtggcaacgaacttcctactaatgaaaatcaaagaggaggcgagcctttgggctttagcaggagctaagcggctgcgtgagttaataatcccgcactctgtatagtgtacagctatagtggttctccgttttccttttacgtctaggggtttgtattttctcttgctctattcaatgaaaaggcactctagtgctgctttccgttcaaaaaaaaaaagaaaatggctggctagctgctgacctatatatactgtatgtatgctcgatgcttctcctttcagacaggcaaaggacataggtacatactgtacgtatatactctacagatagtatttattatgtagtactgtagatcagacgacggcggcagcaggacgtacaaaacaaactggtgactagtctcctccagctacctatagctccattgcatcacgtgctaacgctaattaatgctaatgctaatgcaattctctctgctgcactgtgtgtgctactgtacgttactgaccaatctctatagctagcttttcatgcttgcgcctcagtggttacggatagagatctggccgggagagatcgatcagctcagcttaatactagtactgaaagaaatatcagatatcaacttcaagggattgattataatatactagcatcaaaagtaaattaattaagcaaatataattaatactactccctctgtcctaaaatataacaacttctagcctttaaaatttattccaaaatataacaacttcttctcaactaatcaaaatcctctaccattcaattttcccacctaccttcacttatcctaccatttaatcttaccaactttcttaataaccggaccatctctaaaaatacttatattctggaatgaagggatatgaatacatatatagagcaaatattaagatgccgatcaagatgcttagctagctagtaatgtcttggataattacatggtctctaaaatatatttttattattatactaatttataagaaaaatatatatattattttagtattttttaaaaaaaattaaatattttaaagctgttaaccattaaatttataaaagtttaactttaaatttatctaaaatgtcaagaattatgaaacgaaagaaaatacaatgcaattagaaaagaacatgggaagggatgggcatcggcatggccggattagatatagtatcaccattttaagatgatcagtatacatgactagtcgtatatactacactatgcatatgccatgctacatgtatgctgctacctccgtcccaaaatgtaagcatttttagctatgaatcattttaggacggagggagtagctagctaggaaacgatcgatcggcatttcagctatactacagtacttacatcagatcgtttcctagctatcagatcagggtcgggtcgatcagagtgatgaaaatcaatcgatatatattgatcgaggccgcttgctgtcgcctatcgacctactagtataacaacgacattttctctaaaaaaaaaaagaaaaacaacaagtacctagaaacactccacttagacacaacggcttggctatttcttaggcaaatctcaatcatctgatcgcgttcgttggatttcaatccaatgcgcttctctccatgtatatattcaacctctgcatgctcttaatctctccactcaactaaactctcagttaattactaattatcctcttctccaccaacagagtacgtttaccacaatactcctcgaaacagactttcagccccatcgttttccttgtacttatacttatccattagtactacttgttaacaaccaaaaaaaaagtcacgagtaaaacttttatgtgtgtgtatccttagcgatttaaaagcaaatgcggtagaataaattatgatgaaaaaaactaaaaaagtaagttttgaaattaaattttggcatataggcattagcataagtgaaacgatagggttgtttgttcttttttttggggaaaaggatttcatcattcatgaaccttagagcataaccaacatatgcccagtagggctttctaatcttaaaattttggttttctttaaagctggttccaattgaaccacttgcattatatccatcagcattcattttggtgcatccttggttaggacagcttcatcttttgtccattttgtcatttatcatcacgtgaattattgcatatagctagacagttctagtatcacccggaaagattgaccattgaagacacacttccatcctcatttgtggccataagttcagcttctagagcatatgaacagacctctagtgatctataggcagctcatatgaccggccattactatcccaaataaccatttgcattacaacattcagttaatttgttccatcctatgttaggatagcttcgtcttttcatgccaagatccttcttcgatcagcttcccacttatcaaatgcaaatcttctccatgatagtagttgactactttcttaattagcgtgtttacatatccgtcactaagatgttttgcacaactagccaacatatacttacatgtgcataatgcacacacatgtactagtataatatcatagaagatagactcattttacgtccttcgttataagttattatatatatatatatatatatatatatatatatatatatatatatatatatccttcagtattggtagtaataatgatcgagtagcgagcattgtaaagagagtctattaactaacacaacattatctttttacgagttactcatatgtggatccattatgttatagcctctcaaagtttctcaagcattggaacagctaatcatagtttgtcgcgacttgggcatagtatagggagggcagccagctgcaggaaggatcaagagagaaggcaggccaactggaactgtgggcgattccttggtgccgctagccgccgcgccgcctgctttattttgtcgattgtcgatcagtctgcccacaaacgtcacccatgtactgtccatctactgtacgtactgtactgctacaatcaccgttactcagtggttctacgtactactagtactatacacacgcgtgacacgttcctttgcatataggagtactactgtacacaaattcttactgaaattaatagtacagtgtgtgttcctttgcatatattccctccctcccccataaaaaaacatatttttgagtttatatgttcaacatttgaccatccatcttataaaaaaattttaaaaataaattatacataaagtattatttatgttttatcatctactacctccgttccaaaataagtgcagccatatgcatgctcagcgttttgaccatccgtcttatttgaaaaatttatgaaaaatattaaaaaaattagtcacacataaagtacaattcatgttttatcatctaataacaataaaaatactaatcataatcttttttcaaataagacgaacggtcaaacgttggacatgaacagtgctaaaactgcacttattttgggatgaagggagtaataacaataaaaatattaatcataaataattaaataaaaacaaagagtatcaaaaactgaaaaaaaatgtacttttcatgggacagaggggagtacgttattgaattccttattaatttgtactgtactactgtggatgccacatcagccatccagcaagaataacctgcagccacacgtaccaatcacactccaccctgcaacctgtgtttcatgctactatacagtagtgctgtcagatattctcttgtcaagtgtaccatgcacctatgcatgcacgcttctttcttgcagccgaatcgtacgagtacaacctaatttagttttgtttttcgtcactcagctggatagcaaagaatagaactgtaaaaacttctaaggcatcgttcgtttaggggtgataggggagattggttctcgttttccgcgcgcacgcttttcaaactactaaacggtgcgttttttgcaaaaaatttcaatagaaaagttgctttaaaaaatcatattaatccatttttagaatttaaaatagttaatactcaattaatcatgagctaatggctcacctcgttttgcgtatcttcccaatctcctcaatccccttctcctcaaacactccctaagcgatcattgcttggcagcttgggtgaaatcaggttctaggaaaacacgttttagattatttttttccaacttccaataaggttaaatcgctaaggtagcttaatttgctcaatggatggacggaaggatcggtcctgcatgcatccatgcgtggtgaggtttggtggggaaatctgatctgatcgacgatcgagtagatggatttggacatgcatgcatatatacagcaaattaaggaccacaaaacctaatcgatatcagttagttttatactagctatatcgaacaaatgcccatcagctttgcattgtccacaccaggccatgcacatatatctgtggtccctcccggccgcccccgccccgcgaatgcaatctaatcaaatactattgtaatctaatctaaatttatcagtatgtgcacccatgcagcagatagctgcccggccggcctccatccatcaatcctttctcaaacctgcacgcgtggatcgaacactccttttattttgtttgcctgacccggcccatatatctctctctagctataacgtacggtacgtactaatagtcaaaagtaattaagatcatgaccaacagtttccccccccccccttccaataccaaagttttaagcttttaagtaacggaattgctacacttcagttgacaaaaaacctacctccaaatcttgcaaattttggttcactggatgtgcttcacgattcgtactccagctgcttcttctccaactccgacgaactcctcttcttctccggcgccggcgacaacccaaactccggcgaagagccgacgaattagggtcctggagtggggtggggtgggaagggtgggagggggagggggaagaagggggagttcgccgggcttagagggatgactgggtgaggcggcagcccggcgatgggcggcgaggcgtcggagccgcggggctggaggatggcggtgggccggcgttggtggcgagggcatctcgccgcagacggctcgaggaggaaggagcgcgcagccgcagccgcagcagcgtgcccgcgggggcctcgccggtgccgttgacgccctccggccagccggcgaggcgggcggcggcgcggtggggcggtggcggcgggggatcgcacgcgagagacgggagtagcggtggcggcgcaatctggatgggggaggaggagaggagttagggttaagggtctgcatgaatcttgaagcatatccaatggtccaaaatttgaaagataggaggtgggattttctgtcaacagatgtgtagacagtcccagtaagtaaatattaggctctaatagtaccccttctcttcctactttaaaatatgtattcccttctccgtcattctcactctccacgagtcggaaatcattctcgccgactctagcacaagagaaatggcgaacaggatggtggcaccaaatcgtgtgatcttctagcttaggtacggatggagggagtccgacttctattgctatagctaggactcacgttttatagtatggacctaaaaactaggtcctgatctttcaatagatattgataactctcaatttgatagaaacttgacacatacgatcccgttttcgatcaacacgatccgaaccttgcaatcacagcaccacgtctcctctggttatcaaccatgcgctgttcggttgacctcgctgagaaggctaatccctacgggtgtttcacctaggcctctgaactctcaaaatgtatttttgggtccctcaacttgtctcgagtgtcatatatatccaaacaggcttcaacccgctccatgtgctgacgtggtatgccatggtggcgcgtacgtcagtagaacccatatatcagtcacatatagaaaaaatcaagaacatatttttctcctctatttttttatttttttaaaaaaaataaaaaaaatccctttctcttctctttataaattttatttttttttctatatggctggcatatggatcccactaacacgagcgtcactgtgacatgccacgtcatctcacaaagcgggttggagcccgtttggacatatatgacacttatgacaagtttgagaacccaaaaatatatttcgagagtttattagggatctagatgacacatccgtatacaagtttaagaaccgtacgtgtacttcactactcttaatgtttatgatatagctactactgtctgcttccaccaatcaccgcgtctatttttttaccaatcttacttctaatcacccctccttgctcccactgatccccaaccatttctcatgcattcaaggaacaatgatgcatatgtgtagagatgcatctattctcgaaataatttagagctatatatgtcgatagggacaagataaattgatgatttgccattttttggatatatcttagtgtttatatgcatgtgttgtgttaattacaaaggttctatgagttgataaactagcgtgtaggttgtacttgtttgagtttgaccgctgagctcaaacagaattaagatgcatacatgatgggcatgcatcaattagctaggttattgctttgaaaagtaagttagactttggtaggaacgtactgggtgggtatatatatatgcaataattcgaaacacggatgctacttccactaattgaagaatgaatcagtaggcgcgtcttcacacacttgcttcaatcggtcggatatatataggcatgttattatgattttatcctggttttcgttagcacattcaaattattaaatagaataaaatctttctatataaaagttatttaaaaatatcatataaatatcatatatatcgtttgtgcttgtctactcccctcccatctcctctgtcacatatggctagagggaaggagcccgacggtggaaagggtggcggagacggcggctggcagcggaaggtgtggcagctacggtttcggccggcctcctccactcccctatctcccttccctctcctagatctggccggatgggatgaggtcagcggcaactgctggggcttcggtcgggcctatccactcccctcactctcccaaatctggtcgaaagggaggaggtcggcggtagcaaaggggtgatggcggcggcaacaggggcttcaaagggctccttcattccactccactcccctccctttcccagactagctctccctctaccagatctagctagaggggaggaggacgattgtagctgcggccggcagtgacaagggaagaggagcaaatggcggcagcgcagtggagaatgatgacctagacgacgacaacgacgatggcctcgatagtgcgcaacggcgacggcaaggctcctggatctagtccatcgcggtcgcttgattgtagttgttgcttcttctttttcttgtgaatttttgttggatttgtaaatacaaaatattttggagtagcttgatttgcaaatctgatgaaacgttcttcccattttctctttgatttgtggattgttctatgaaaattgatgtggcaatgggcagacaaagggcaattgtatgcccccccccccatgagccaagtggggaaattgatttctacaggcaaccgaaaccatcctctagaaatacccgatttttgtatgtcttaattcgcaaacaatgtatggccgaccgtgtgcgaaaacctgttttgttcgcatacgaaaaccttttctctcatagtgatttctacagccggctaaaatggcatgtgtccatgcgtataacatttttttcctactgtccaagaatatataattaggagaaacgtacttaacagctagctagcattgtttcatgcatatattagttgaagaaaaaaaattgcatgcgtgcgtgcatatagggatcgaaattagccagtgtcaaattaacatacatgaccgatcgatcgattcccgaccacgatcgagctagcacatatatgtccatggtgtatgtatctatcatgtttaacgacctcagctagctgctggctaacgtaccaacaaccagctgctgtccaagtcaattacatgaagctgatgttgatcccgatcgatctcgcatgcatgtactcatctttaatttattccgatccctacccggccgctgctgtccattaattatattctttggttagttagatgatgattatccaaattatttcagtctcttctctagctagtatatattacgtgtgccaaattaatttaatcatgtctgagtagtaaaaaaaactgatatacagtacataattgtacttgagcaaaagaaaactaattagtaattcattcagtctatatttttactacggtcgacatgcatgtatatatgctttcaattttaatttgttatattagttatatataacaattatatagcaaattataaagaaattaaatttagtgcatcctagttcgttttccgcccggccctccaatatacgtagtatatatagtatatgcttggcattgagagttatatatagttggggtgcaatgcaaggaggccgtgcacgcgtgcttgcaagcgacggatgcatgatcgagatggatggatagatagatagatagatagatagataggagtatgtgccaagaattcaacttagtagctagccaagactacctccggctcaaaatatttatatttctaaaaaagagacatattagctgtacaaacaaattaccataataatcctaaaaatatagaataaagtaaatattgagacaaatggagatggaaatataggagggggtagaaggtaggatatttctaattgggtactacctccgtccttcccagaatataacaatttttggctaaatgcttatattttgggacggagggagtaggttttatcttattacaaatacaattattttaggagaaaatttaaaaagtagaaatacaattattatactccctacattctaaaatataagggattctggagggatgttatattatgcgacagagggagtaagaagcagtagtcttctttatagtgaagcttaattaggaacatacatacatatatatatactagcaaaatgcccgtgcgttacaccgggtattagcggggtgtttgaagtttgatattaatgatttaccaaaacaccatagtatgattattagcatcggttatatgtacagtgataaaaatgatgcccgtgcgttgcaacgagtgaagataattttaatcatgtatagtgttggacaaaaatgataaaggaatcgtaatcataataataataatgaaatgaaattgcagtgacatttggaaaaaggataaaaatatataattaattttccgttaattccattagctaaaaataatttaatatgaagtaggaaaagttattctcaaattttagcaattttcaaaaagcttaaatagagcaaactaattttgtaaatgaaaaaaaatttaatcgcctaaataaaacaattagacctgtaattgaaaatctgttggccatctcgtttaaacatgagcctgcgggtgcgtgtggtcacttgtacgtcgtggtcttttttttgacatagaaaaaatgtccgtgcattgcaacgagtaaactgatattataacaaatataaaaatattatatgattaaggtttagctttacatgatatgagctctttaagaaaatatattcataatgaaataaaaaaggttcaactgaagggacctaaagtgaacttattccatacggagcatacacgcggtccatgaggcggcccaaaagtgtgggtggcctgggaacaaaatcagggacaacttaagggacctaaagtgaacttattccatattggcggcctgggaatggcgttcggcccgacgcgggagatgttggagccgtccgatctgatggacgatcctgattgatcccgacttatataaaagttcaactgcccaaaccctaaccataaaatcatttcccctcccccctctctctctcaaaacaatggtggcggcaacgcctctctccctccatcattcctcctttcccaaccccatcggcggcacctctcccccctcccctcccccacacaggcggcacgctcccccttcctctcatcccaccggcggcaccgctctatctcccccacttcccttctggaggcggcaggcaggggcggcgccttcccctccgtcggatctagcgggaggggaggcggcggcagcccgacgtccctgcgacgacggctctccttccgcgggcagtggttcctctccgccctcacctcctctccctcgccatggggccgcatgagggttcgacggtggcgggcagcaccctccactccgtcggatctaggaggggaggcggtggcggcccggcggccccctccaccggatccagtgggaggggagcagccggcagcaacggagacaccctcccattctggcgtgttttcttagtgttcttgaatctgatattgtgttattgtagtagtgttttctctagtatttaggtccaaatttgacaacggacgaaaactctaacccggaagctttacaaattttttaattattagaaataggtatatagatagattgaatcggactttctttttttcatgtttttttcaccctgatttcgctattacggacgacggaaacatttttaattttttaagtagtagagatagaaatagagtagtatttaacatgatattgaaaacattcattgctagtaaaatgccagtatactaattaaaccattaatactcagtgagaaaaaagatataataggtttagttaatgttagctttgatgccagcaatttgcccttcatgcgtcgtggactcgtggcacatcccagccatccgtgtcatggcaacaacgacctactcactcctgaacgccaaaaaaaccgtttttttgacaaattgacccttttcaaaaacttaattcgaaactaacccctgccaaaaacttcaaccaaaactagcccgtcggctcagcgccaagcgcattggcgctgaggttggccgtgtcagcgctaacgggactggcgctgacattgtgccaccgtggcggccgggccgatcccctagctgacgtggcagctacctcagcgccaaccgcttcggcgctgaggtgcccaacctcagcgccaagtaagttggcgctgaccttggctacttagagcccggccgaggccgccccagccagttcttcctccgttttttccccagccgcccacctagggttcggtcgccaccgcgttctcctcgcccaatctcccccaaaaacctctctaatcgaaggtgatttgtgcggcattgagtttggaatcggaagagaaggtaaacccctctataaaccctaagttccccaaagttttattggatattttgcattgttttggttgtagacgtggtttgataatagttggctaaggatggattattagatggataatatgggtggggatgaagtgtggaggtggcatatctttatccatttggttgttattgatacatttgacaaaatatatttgggatggatgtttggtgatgcactagggtttgatgggagatggatgtgtggtgatggcctaggatgtgggatggatttgtggtgattgagagggtttgaaaggggttgatgtgtggtgaagggtaggtaatttgtaggagtagagtttttttttatcaataatgtgtagtatttgagtaatgtacttatttattggaaaaattagacatgttgttagcttttgaagtattggtattgcaatggtaattacatattattttcaagtaattaatgtttatgcatgggttaaaaattgtagatggatagattggtccggcttcattatggtggttgtgtggtagatgaaagtacacatggaagccaatttgagggaatgacagttagacaattagtgttttttgcgaagcctacctttgaggagttaatgtctcgcatcaagcatgaattggattgtaatgatgagtcggttggtatgcaagggagatacgatgtgggcggcggtgtcatgtcacataaatttatgttagacttgaatggagagatcgaatggcaaacatatatagatatagtattggggtcacatttcaaatctcttgaggtgtttgcatggaagaaagatggtaggatagggaagaaagaacttatagaccttaatgaaagtcaactcatagaatcacccattagctgtcacgaactgtcggagaggtgtagtaggaaggaagaattgattgaggaagacgtggagggggcgagggagtaaatgatatggcggatgtggaggtcagggaagagaatgacccggtaagggaggaagtacatgcagaggagaatgtgccgttaagggaagaagtacatgcagaggacaatgtgccgttaagggaggaagctaatgtggaggagaatgtgccggtaagagaggaaggagatgttgaggatggtcgggaggtaggagatgatgtggagttacctgaggaagaagcgaatgctaagaatgtaagtatgggcctaagggagttggctaggctgaaattctataccccagaggagtgtgaggaggctatgatacgcagtggattgaacccagcctggttggagtatgatacagaggatgaattggatgagtccgctttcgactcctatgatgatcgtccagtgcgtaagatgtcagagcatgaaaggactgtgtttgcgaaactggtgggtagaaacccggaaataacacaattcgaggatcttaccagatctgggctagcaattgctgatggggatacacaatatgacggtgccttcgaaccaatgtgtgatgaaccaaggaaggggttggagtttcgatcgatggatgatctgaaaatatggctacagagttattctatccgtgtccaccggccgtaccatgtgaaggaatctaacgcgtcagtaaagtatactgtggcttgtctcgatcgccattgcaaatggcagattaatgcaaggaagagtggaggagataggtggcgggtgactagggtgggcgaagaccacacatgctgtagtgcggaagtaaccggcaagcatttgcaacttacttcaaggtttattggaaacaggttacaggcatttgtgcgagctgaaccaactttatctccagcagcgattgtcgaggcagttgagcaaatatggcactatcggcctacgtatggcaaagcatggcgtgctaagcaagttgctatgaaggtcatttggggagattgggacgaggcgtatgttcgcttgcctacactgatgcgtgccatcaaagcaaagaaccctaccatgcatttccgtattgaggctcatcccgagaagtccaggatggtggatggagtacagaggcgagtatttggacgtgcatattggatatttggccagtccatagaagcattcaagcacttgaggccggtgctagcaattgatggcactttcttaaccggtaaataccaaggtacattgctcacggcaataggggtcgacgccgggttacatcttgttcccttggcgtttgctctggtagagaaggagaatacatccaactgggagtggttcatcaacatgttgagaaacaagttgatcggtcctaatagagaagtgtgtataatttctgatagacaccctggcattttgaactccatcatccacatcatgcctcatcacctaaccattcaccacaggtggtgcatgaggcacttctgtgctaacttctacacagctggagctacgactgatcagatgaaagatcttgagcgcatatgtcaaataaatgagaaagcattgttcctagatgagataaaacgcctcatgggtgtggtcggagagaggccaaagaagtggctagaagaccatatgccacttaaagtcaaatgggcaagagcatttgataccaacgggcgtcgtcatagcatcatgactagtaatatggccgagagtttcaataatgtattgagaggcattcggaaactgccggttacagctattgtggcatacacattttcaaagtgcaatagttggtttgtcgatagacacaaagaggcaactgtagatatcctgtgtggaaagaagtggcccacaaaagttaaggacattttggaggagcagcaaagacgaaccttggggcaaagagcagcatgttttgatttcccttcgatgaagtatgaggtcagcgagcaaggcggagtcacggcggctggggttcaatggggtggacgtcactacgtcgtggttgcgagagataacacatgtagttgtcagttccctcagctccatcacttgccatgctcccacatgataaccgtttgtaagttgcgaggtttggatgtggaggtggccccccgaatgtgttatgaagcttccaataaggctgtgcaggactcgtactcccctaggtttgaaccttacctagatccatcgcagtggccaagttatgatggagagttcttcgtgcccgacttgtcgttaaagaacaacacacgaggaagaagaaggacaagaaggttcaagaacgatatggacaaagcatacaaaggctcagccaaccgacggtcacaaaagccgaacaatacaaattcagagccggtcatgcaaaatagatgctcgctatgccacgaactaggccataagaaaactaggtgcccgaagcgagacaagtctaaggatcgaccgaaaaagcgccgtacgacagggggaggtggtgagggtagcacacaggtgggattggatgacattcatttgctaagttcatattgttgcttcaatgtttactttctgttgtcctcctttccgttctcattgtgatttttccatttaatattttttcaattactaatgattccattttcatttgcaggatggagcactttccggggttagaggatttctacgaggagaagcaccgggccccacagattgccagcggagaggttagcatcaacaatattccattttttttatgatcgaatttattttttcttctttgattttagtttgtacagatagatcatccatcatagagatatctcaaatcaaagttcaggagcctcaaagcagagcatgtaaacacacagatcttcttttcagttttcttgctcaatcccaaaattaaagttcctagttgcatgatgtattttccacaacccttgtatatgatatattgtcgctaactttatgttattatgtttgtctattgatgcagcacttgaagacccttcgagtcagaggtcacacggcgcacatactgttcgacgatcggtacgtcccgtacctacggcgggcgaagctcttggcgttcgtgaccatggcgcagcgaccggtgcctctgtacaacgccgctgctctgacggccctagtggaccggtggcgtccagagacacacaccttccacctaccgtgcggggagctgacggtcactctggaggacgtcgccatgatcctgggtcttcctatccggggtcaggcggtcacaggtgacacaacgtcagggaattactaacgagtcttcgtattcatttgttaatttttttgcaattactaatgattccatttaatttccggttacaggtgacacagcgtcggggaactggagggagagggtcgaggagtaccttggtctggagcctccagtggcacctgatggtcagaggcagacgaagacatcaggggttcctttgagttggttgcgagccaacttcggtcagtgtcccgctgaggcagacgaggctacagtacagcgatactgcagggcggatgcggcaattcgggaggcttcaaacaatcccgcaccgtttctccacgagtatcgacctacacaagttagtaatttcacttaacaatttattttgcttgcccaatcagtcacttcaacatttactacatatttgagttggacattttgcatacgtgcagggtggaccgtcgaaagaacaagaaggtgactgattgggcttactaccatcaggatcatatcacgcaatgggagaagttcgaggagaatggagtaccagaccagggtcagcacaacaggacggagttcgacttgtacttggcgtggctccacaggacctaccgtcttgtcctacgtccggcttggacactagccgacatagcggatgaccccgaggatgttgaggagcagaacaagtacgatactcgtacccgtctaggtaccacggtcgagacgggacctgttcgcgacagagtggttagtttctagcattaatgttgtatattatttcatttcaatgccatatatgttgtgacttacttcatttcaatcctacaggctcgagagctcttgcggaccgtcaacgacgcgggagtggcgctaggcacggctcctggctccgaaggagagggcggcaccctccgcaacgccctacaggtaatcgttggaaagagatgaaactacggtgttttcttccaaaagcgataacttaacatggattattttttatgcagagactacggcagcgatgtcggaagttggcagcaaggctcggctgcaggtcgactgatgtggtcgaacatgctcatgcccaccaagagggggatgaagaaggggaggtgggtgacgaggagggcgagcaagacaaagaggcggaggaaggagatgaggaggaagaaggggatgaggacagagaagaggaggcggatgagctcggtccctcgcagctagaggacgcaccagagtcgtcacagccggatatctcgcagcccggcccgtctcgaccacgacgccggcgggctccttcgcaggactggaggtacacccccgacgtgcctcgtcctcgcactagaggtaggaggaggtgagtgcatggttcaatggatggatggatagatggatggacttgatgcatggttcgatggatgtatggactggatgtatagacgaggatcgatgggatgtttttatttcttatatatatggacttcatatatggatgtattgatggattctatggatgtatggaatgatgttgggattgatggatggatgtatgttttgtatggttctctggatatattactgcctgtaaatttctgtgatttgatgtttgcctgtgttgtgtgcaaagttttgctaaagtttagcagggctgggacgttacctccatgctaaatggctctgacatgtccaaactcaccgccagtgcacctggcgctgaggtcccagcccagccatccataaggcttgttgcgctgcgccacggcctaaacgctcaaatacaacctcagcgccaggtggactggcgctgagtgtcccacggtcagcgccattatggctggcgctgaggtcccagcccgcaagccatccagcaggcttgctggtctgggccttgggggttgcggccaagtcccaccctcagcgccaggtgggctggcgctgagtgtcccacggtcagcgccattatggctggcgctgaggtccaagcccgcaagccatccagaagccttgctggtctgggccttgggggttgcggccaagtcccacctcagcgccagtccggttggcgctgaggtagctgccacgtcagctggggatcggcccggccgccacggtggcacaatgtcagcgccagtcccgttggcgctgacacggccaacgtcagcgccaatgtgtttggcgctgaggcgacggcctatttttggttgaagtttttggcaggggttagtttcgaaataagttttccaaaagggtcaatttgtcaaaaaaacggccaaaaattcccacaaccaacgaacccgagtggataaggccaccgatggagccacttcttgcctcttcctcgctttctccacaatccctcttttcctcgctttctcgctgccctcctcacccaccgcccctggccacgcctccacagtcgactccaccgcccctggccacgctcgcggtcgcgctcacgcttggctggagagccgccgtgccgaggcggaaggtggtcgtcgcaccaagccgatgtgctggttatctccaccgcaccgtcggccatggagataaaggtcgctgccatcggcgacaaggcggtagaggagcaccttgaggattttttttttcatctccagttaggtagaggagcgggtgaggtgaagcaaagatttctttgattggggtggtctgattcgattggatccagctcttcgcttcactaatccagccactgccgcatcttgattgattcgagctggactacacatgtgaatttcttgggtaagggaatgatgggatggttgatttggagggcttggatcggtttgggatttggggtaagccgaaaattgggttatgtaaagggatatttggatttgttcatgcgtttatgcttcaacttttgtccaattttttttagctttggttcttgttcttgcttgtgttgtggtgtatccgatttggttgtaatggggatagatttgatacagactggatggtatatgctgtgattcggtttttaattgatctttgatttgtgatttgcccaccgtacgctattagggggcgctcggttggacttacggaccaaaatttttggtgttggattggaaagatactgattttttttctggaatcggacattttaacgcacgaaaaaacagcacacggagaggtgacgattggaaaaatactaatcttatatatataaatatatatacacacacatacatcccgtgcttcgttacggtgtattaaaagtaaaaatatttgtccaataaaaaaactaaccgttctcaaaatattattcaatagtgcgttgcaacagggaaaaaaactaatgttaaaataatgattatagttattttatagttccatcggagctataggagatagttctggacataaacaatgctccttctctcccaccgacagcagctgcgcatttatccaccgcaggccgtgaaataatattatatggttggattttatttttattgaaataatcatgattaataacgctctttgaattttaattggaattttcgaatcttaatttgataacacaaacatcattttagcatttatttaaataaaaatgtaaataaaaaccacaatttctctatgggccattttcagtccttttactgtctcagcccgtaaataaaatctaatttacgtcccctaactcctcctcttctctgattgcgcaaacttgttggcctatttggaggcccaatagtccggcggcccgagcggggtaagccggagccgtccaatcgaatggacggtccagattgatcctaatctatataaatatctacagccaaaccttaaccctatcacaagatttcatttccctctccccatgtctttataataaaccggtatctataagaagagataggaaaatcggctccacttataatggagttgaaccaaaccgagtaaaccaggcttgactatggtgcaacatggatagagctcacgcaatgtctgagctcgagccactcagcaccagtagcgtgtgcgtgccctctagttcccagctagccgggttttgggtggggatgaaagagatgaacagcgaaggtggttcaagatgcaaacaaagaaaatgttgtccaatccaaagtaaaagcatagcttaacatgtgatccaaattaaaacttttgtagtaaaatgcacgtgcattgcactgggtaaaattgattgcgataaattttacatcttctttgtttttaattcgaaagcccattacatcatttcttttcagccccgcctagtccgttaccttcctccgctcggcctgcagcccacaagtggaactgcaggctcaactcgcatagattgccaataagagtgctgatactcccaatcctatccgaggctgccgtcttcaacctagatcgacgcgcatacacgctaaggttgcgcacaccgttccgcatgcaaaaataaaataaacgacttaagcgaaaaaaacgatggaaaaaatcgtaaaaaaaggacggtcaaaaaaataccttgaagccttatgtattttttttattggtatatagatgtagatatacaaaatttgttaatcacaaaatatataacacacatatatattttttgaggttaatgacttctatggccagctcaatacgcagagctataaaaggtagtttgtacatcagtccagtcttgtaaaattaaaactgccaaggtcctggatatcaatgtgtgagtactaatctgggggtatttttagaaatattttgtatttactgaagtatatgataaaatatactattaggagtaaatatgaaaagagagaatccattatataccactgactttgtcatacgtctatgatttgccactgactttatcacgttttataatgtgccatcgacttttgcttaacttctacaatttaccatcgccgtccggttagtccccgttagtaatgtacaaatttatcaaaacgaccaaaatacccgtaggacaaaacttttaaaattgggataaaatttctgaaatataagattttaagtttttggccaaattttggatgtttacactcttatgtttataatatgatattttgaatttttttatccaaattttggaagtttttgttctaggggtatttcggtcatttggacaaaattgtactgtactaacggaggctaaccggacggtgatggtaaatcgtagaggttaagcaaaagtcaatggtatattgtagaacgtgacaaagtcgatggtaaatcgtagacgtgtgacaaagtcagtggcatataatggattatctcttatgaaaaactgctaggagtcatatgccacgtgcaggtttcttgaggcgagaattgtgtggtgggcggtggcctggatggagatcattatcctctcaccctgtgtcactctctcgttctttctctcccagccgtcgtttctgttctccctctctgtaagactgcaacgcagcggtgtggcagccggcgggagagccacggttggagcaaagcgaggcggaagacgggcgaccgaggcaggtgggcggggagcgaagcgacgacttcctcccctcccacacgcatcccgtcatctcccttgatcccctcttgcgtggatcctcccctcttgcgcggatcctccaccagtgactggatcttgtcctctctctggccgctagcggcggccgcggccttccccaccgtgagcagccacggcggctccctccactacttccgatgggtggatccggcggtggcggtggcggcggccgagggcggatccggcggcagtcggtggtggtggcgtcggtgacggccgcggcctctcttctgccttcggtggcggtggtggcgttgggtggatccggcggcagcggtggcagcggcgagtggatccggcggcgatggcggcagccgagggcgattcggcagcagtcggtggtggtggcgtcagtgatggccgtaggtggatccggcggcggtggcggcggccgagggtggatccggtcgccttttttttcgcccgaatttgtttctttttcgtgaattggacattgggatcaagttcatgagctttactcggattaaaattgctcttttatgttgtttttggttgtctcattgtttgattcatttggggatcaagatgggggattttttttttaaagaatcggactcgaatcctatgagtgtttttggttgtctcattgtttgatttatttggggatcaagatgggggattttttttttttgagggaatcggactcgactcctatgagggacgacagacgaaacggatggtatttttgaacaaaaatcacgggtgaaaaggaggtgatgattggaaaaataggaatcttttaattagttaagatataatttgagttgttttgttgataggtgtaggtataaatcgaattcttataactaggtatatgctcataatttgaaaatttaaaaaaaaaattgagtgattttgtgcatttgataccatggtgcccgggcaccatggtgtcccatatgagtgtcatatatatatatatatatatatatatatatatatatatatatatatatatatatatatatatatatatatatatatatatatagagagagagagagagagagagagagagatgtgatgcgtgcggtgcatccgaaccagcaaactcacgagtgcctgtttcatttcgatcgaccggccggatatatatacatatattcgataatgacgactggcgagatgatcaggagtgcacatatccaccaacctaatttggcatccatcgaatcgtatcggtggttggaatcagatttatttattatggtactagttagatgcccgtgcgttgcaacgggaaataaaatcatcaactttaactcatactactactactcataatttctaaagaatatatttcacccttgtaggtccatgtacaccagctatcttctgacccactaatatcatgatttccattttgaaagaaaaaaatagataggatgcaatataattcagatatgtggattcagaaagattttcactcaatgtcaggcgcaattaagttacaacagaaaactgagaccagaaccggctagattcaggcttggtttagttcccaattttttcttcaaactttcaacttttccatcacatcaaagttttcttacacacacaaacttccaacttttccatcacatcgttccaatttcaatcaaacttctaattttggtgtggactaaacacaccctcagcaactttttactccatcacatcgttccaatttcaatcaaacttctaattttggcgttaactaaacacaccctcagcaactttttactccaattaaaatacaaccttggcaccaggctactggaaggcaccgccttcctcatggccacgtcgtttcttgcatatttctttgctgcacatatttgtccacacaagacataccaaaataaaatccaagcaatcacagataaagaaatactttataggcactgcgatttatggcagcaataaatatacattatggaaaaggatcaagcaagaatgatcataacttaaaatggacaattatattttagactacgtttcatagtggagttgtactgcaagctattaaatgggctccttgaaatagagcaaaaaaataaggcacgagtggatgaaaatatggatgaccaaaaagtatgttcttcggaatagatgaaaatatggattcatcagaacaattacaaattattgcaatagtagttttcaacagtaaacctattgaattcgcaaaaatcaatgagcatagttaaattgccacctcaaaaaggcaattaacagttatacataaactttttcgactaaaaatgcaaaataatattaaatacttatttccatttactccatcacatgagtaacatggtacaaactgcctacatgtcggctaatccagaaggaagtaccagttccaaagagcattaaagaaagtttactacttatttttgcattgatagaatgagacatgaggtgcaggaaatatgcttatcaatatttggttgggggctgggtaggtcgagttcgggcgtgcctccatatcaatatgcttatccaggcgacgaacagattacaagataatccctctaacatgttataaagaaggatacatatttacacctattgggtcgagttgggtgaaagaaaaaagaatgttctaaccgagaaacctatgcatacagatgcgccgttgcatacctcttgtaagaaactgtctgcagcctcatcctctaattaagcaaggtagcaggctagcagccaaacagaaacctcttctgtatctgaaagtgtaaattgaatgataagccacgtgatgagtagcacacatattgtttagatcttttcgttttggcacagaggcagcaaacgtgggcgccatccgtaaccttattatcaccaggattagccctgtcctacagagcaagattaaaaaatatggtgggtggttgtatgcactccgatgaaaagcatgaacctatttgttgagctaggaagactctcacttgttaggcagctcaaggatgtacgctggttttctagcagcttcaagcctccaactgtgtctctgttcagcagtgaggatcccgaattcagcagtgacgataacatgaacacatcatgtagaactttatggatagtaagttaaaagaccataagcttgttaactggcagtgataaatgaattttgtttgtggagacgcttttttaataccttttcatgcaagaattactgagagtttttgtccttcagcatatgcatttttttggattggttttgaaaattatacttcatcctttagcatattactttcagtttttcagtttgcagactactgagagtttgtgtccttcaatatatgcaatgaagtaataagaatttatctttggttcctttaatagtactttcagtttgcacagttttggaagaagagttctcatagtgtgaaaaatgaacatcaataatcatcactgcgcatttctcattgtgaagaacaagtgcaaaatatctgctcatatgaatcacacaagggaaaaatggaaaatagtttgtttaccttaaattcagatgaggagttactgaggacgtcgaatggaaacaacaggatatgggcacaagaggtctctgattggtgaggtcacgcatggcggatcgctgctgccaacgttctgaaagcagacgttgagaccttcaggggattaggactaaacctgaagcagatcgagcactggaccaccttagtgaaagatccacggctgtgcatgaaaaaatggacctgatcatctaaaaacccctgtgctagataacttggtagcagctacacccatcagtggaacaatagaatacttaatagtgctaacaacaaaccacccaaagtttacatctcaataaattgtacgtttgcactcagttttttttttccaaaaagcacacaagctcatctagcatgaagatttcaccagcacagacaagtaagcatctttacttattcaagactatcttgcaaaacttaagtccaatgcacttgtttatcaatgcaacaattattaactaccactgagtattcaattagaaataagcacctagaagatagtgctaattatattctagtatatcataaattatatagcaatttaacaatgtcacattttctcagaatttcagatataacattctcagaatttcagatagagcagttcattatagtgaggcgcggagggcggagtcttctccctgtacgacgaggaaattctgtaattagagtaccagttaaggactttagctagatatgtattgaatgcaaacgataacatcaaaggtatggacgtttcaggggacaagggagttgcttggttagtactacaaacacgatcagcacagacattataatagtaatgaaaaacagatgtgcacttctaaaagaactaattatgcaattaatgatgatgataacagtagttgtttcttagcatcttacatattaagctatctgaagaacaaatatggcaagttagcagccgacggaggtcagtcgacggctcccggtgatgatgcangtggagcggtcggcggctcctgtcgattcggcggctgcgcagcccatggaggaggtcggtcgacagctcccggcgacgatgcatgtggagcggccggcggctcccatcgattcggcggctgcgtagcccatgggaggaggtcgtcgacggctcccgacgacgtcgcaagtggaggcggcggcggctcccgtcaatctggcgcaggcgcagcccatggaggtcgtttcacggttcccgatgacggcgcaagtggagctgccggtggctcctgtcgatctggcgccgacccagccatggaggctgggctccgcagatcgtggcagcgcgacggcggtctggcggcggcgaacggtggtggcgagaaggaaccggcgaggagtccgacgatgttttgtcggcggagatcgggaacggtgcggaggagaccgacgagccgggcgacggtgatttggcggcatcagcggagcaaggcgtggcggcgcgacggtggtatggcgatggagaacgatggcggcgaggaggatttcgcgagggcgagggtggtgcgggtctagggtttcggcagtggaacgagtaggggaaggccgatgagggcggcgtcgggtgacggggtgagtgcgagagagaggagagcggcgatggcggacggtcgacggtgacgatgggggcgccggcgcggcgaggtgggaaggcgggaggcgggaggcgatggaggcgcgggcgcggcgatgtggggaggcgctgtttcttttttttcttcttcttcttctttttgcgttgattccggatctcgcgcggcgcgatggtggtgcggaggtggagcgtgtcgctctgatcgtgtcgatgtaccttttttttttttaaggttgaatggtgcgtggtttcatcatcaccactataaattttttaattttttttttaggtagtagagatatttgcatgatcgatcttgaaaaagaaaaggcagagcacacgcattttctggctgcttgcaagtcaaaacggagtgaaagaagatgggccggatagctatctatacaggccgcgcgcgtacgtttttgggctgacagggccggcctgcttcgtctttttgtgaacatagctatgctgctgcttctttttcctttttctttttttgagaactaacattagctatgctagctccaccaacctttccctcaaagaagagacaaaacagtttctatctccaacacacatatgtgtgtagtatttcagttgagtcagatatcagtaaacatgtatgtactacattttatatactgtacacaacagcgcttaatagttagtagtatagaagtcgatctacatttcttactgtagtatatatacactctgcatgcaatttgtgaacacccatccgttacaataattccattttatttgttgtttcctacctgatcacctccttgtttgcatctctccatctggcatcgtaccttgaagaattcaccattcatttcattgcgatggttctggaagggtgatgagccgagatttcgagtcatataccatctccgtgctacaactgcaaaacaaagagttgcacattttcagattgacacaaattgtagtattatatttgtaactcgaacagtactatattatacacaatcaacaatgatggaatatgtacatataaaagtataggagaatataatacatactctgcacatttcactttgtttgtttcaccgccactagacactgacaggatagtcccgaagaaggaaaggttttcagcgccacaattcggacatggcccctggattgcccagagaataatcatcacttcacttgaacaaataatcatatttgatgtctaatgtctaatgcaaaaaagcagacaagcagagaggagactaaaaataataccttgaggattaagaagtcgttcactatggcattagttatcgactgtgctatgaacaatattagaggcaaagcagcaaaccatgtgaaaatgaaaccgaaaggctctggcagctgcatttgttcataaagattaccgagtggggaaaaacatgtcaaatagtcagtcgaataattaattggaagaaaggaaaaagaatttacctggaatatgttgatctcaaagccagtcaactcatcgatgaagaagaacctaaatgcatgcaaatcgaaattagaggtgacaaacataagtaaagtctgataaaggatgaattcgtcgcaaccagttcaaatcccaccaggacaatggacagtaaaaggtatactgacagtccaatatttatttcatactagctaggtatattggaaggaagcaagagtgagatgaaaagaactcacagtcctagagcaagagtagttgctggaacatttagcaggaacatctttaggtagtcaacggtcaaatcactgtacacctgcgccaggtagcataaataaataaatagtcagaaaaaggcccttttaatttgtcagtaaatttaaatgagcaagatgcatggagatgagtgttgtatgtgtgttttgacaggtttgttgtatgaatggtggtggttttggtcatgaatttgttgtacaggattatgtttccatattttgttgctccagaaagcccataggcaggcttagaatatagtgttgtatcagtataagaggatcggagtaatttttattacctttcggctgcgtagactgcacctgggaccttcggtgacaatgtcacttccgtctttctagcatataatataataagagcagccagtcagaaaagaaattaaactacgtagcagctagtactggtaaatattttagtgagagtacagtagcagtagcagtaagagtagcatggaaggaaggaattagttagttgaattaagcgaccttcaatctgagtttgagttggtcgaattcagcgtcagacatgatggggttgccggcagcataggccatggaggcttcgagcaggcgttgttcgtcagggcctgaaaagatattagtgttaattagtgggcaaagaagatactaacagataggtatccgcagaagagatggaaggagtagtacttacttagcatgacaacgctgctgccttcccacatgagctcctccttgaggttgtcgaactcctcgttggacatgatggccttctggtcgtagtagaaggcctgaagagcctgaaggaactcctgctccatctcacccagcgacctcttctcggccttcttccccttcccgtcgatgctgcagtactggagcacgttgctgtccacaacctcatcaccatcttgtttgccttgctgctgctgctgatcggtggcgccaaggcggaggcgccgcccacgcgtggaggttgcgagtgcacaggaggagcggcgaggcaggcgggggagcccggaagcggagaagaaggcggcggtggaggagcggggagggtggaagaggcgggaagccggcgacagccacgcctcggaggccatcagcattaactcttctcttctcttctctttgatccaaccgaggagctagggaagcagcacagccagcagtggcagaagcgagagagagagatgtgcaaatggccgcagcagcagcagcatcaggtaaacaaacgaacaaacaggaaaacattttgtgtggacgaggacgaagatggagctagggaaatcctttgcttcgctcacattcagagatagatttcctccctcccatctcaaaaaaagagagagatttcttcttacacctctcctctccacaccctttggacctactagctctccatttggctccttctcagatttttcttcccctcctccttccctttctcatacttacttctgggctaagcccaatttcacatggcacaaactatagcccacacaaatttcccataccaactccaaattggatcggcctgtctcaatcaggcctaagggcaaaaaatatatagagaaaattcatttgcctcgctctttgagggtgaaattacattcgtttcctaggattttttttttttggtaccatcctgacactcaactgactagggacaaaatgttcctctactcaaggtggtgtgcttgtaatggtccccagttattattatttggtatcttcctttgtatgatccacataaaattcatattatttttctccatataaaatcgaatatttttttctgcatcttagtatgccctcgagattgaacgttctcttttgactcatattagtaatacggccggagtatatatatttaactcaagcgcaagtttacagtggctgggtactatgccgaaaaatatatgcagctccacatcaatccaagcaaaacactagttttatacctaaagtagcatgatatagtttctctctctcaaccgcttctttaatttcaatgtatgttagcatatatagcttactcgctatgtattgagtgcatatattcacagatgtatcagtttttgctgttcatgtaatgttgttagagttacgcaccagcatgaaccagcactgatgcattgtacacttgagccaactcctaatttggacgtgccaaatggtaacaattaatgttgaagagcacaaaatacactgagactaggatttttatatatgtaatgagagggagaaaatcgtgtatagtgtatggaactgatctatcacctgtctgggaaagaatttgtgaatgtttagtctgctttactttacacaaagtgaatcttctaacagcatcacgtcaaaatgcttgtgttgtgtgtgtgttggtatatgattatgtgcaaaaggcctaccagtttcttcttcagctcctctgtctggcatgatcatacatgtgcacggttcccgtcagagaaatatgaagcagcatgccaacataatttgcagccaccatgatataggggattgagaatgtgcatgccctaccaccccaggggaaaataaaatggagaaataaatacggtgctgaatgaattaccatacaataaattgtaccagacttaatgcggttttatactttctgcatattatcatgtctccactgtatgttgagacctgaaagttgtagtaaaagttttgcaacatcttgagaaccattggtcatttggcattcaatttcactccacatcctagattattttccttcgtatttgtccttgccgatttgctatgcacaatcattttgatgctatcattctcaaacacaaacacaagaaaggggacactacactttccatcatgaaaagtgtaacacactaatggtcatccgtactcattgaatatgatgaagttgtactgggctaaattggaaaatttaattataccaagccaattcaataatcataagaatgagtggtccatgaaactaaataagaaaagtagaacataaggtgcgtagtctcttagctatttatctgataaaagaaaaacaacacagagaggactagagcgtggaagtaccatagttcaaataggcttgagccaacatatgtccaagctggacttgcgcttgggtgctaaggtgcagatggccatcttctagtggcaaaccctttgcatcaacaaatctcacgtttcgaagtttgatccctttctgagcttcccttactacttcagtatattgcccaagccctgatgctagtcctacctgaaacaccaaacagaggaatggggattgcctactgtattatgtgatatagcagcgaagagtctaatttacaagcgatttgacgaataccacaaatagttttgtcttgcattgcctgggtggtttgaatgaggagaagaatatgcaatggtccatagtaagatgacagtagttgtgcatgtagaccttggacatatatatgcctattctatacagatatatatagggattgtgtgcatatcatgcatgattgagctgaggtggcggtgggttggcaacatataatgcataccatcatctcagactttgaaaaccaacaaatctaaagtaagatggaatgccttaaactacaatggaatttattttggcatgtctacctgacggaatgtgatggtatgttattacattaggagaagaccagaacagaccagaccagaggaaatagtagcttggaatataagtatgttggagtagtatagctgaaatcttgatgcagacgctattaacaactctctattccgtatggccaccctccaccttcctttattattacattttgttttctaattggaaaaaagagtagatgtagatgtagcaacaacagaagaagaggaaggaacagcaagcatgcccaagtgacaagtaaagctaacaaatctagggcaggcattgcatagaaggtcagcgtgtattggattggagagatatggattgataggagaaaaagaagagaataataataagggataatacctggatgaggagaaggtgtggcatggcgagatcggcgcgcaggttgcggacgagcatggccatccggcgggcgtactcgttggcgtcggcccagcgcacggtgtcgctctccccctggtaccagaggacagcgccgatgcggccgccggtctcgagggcgaccctggagcggcggacgagatcggagtagaggtcggtgcccttggcccagtcggccatcctggtgccgccgacggcgcaggggacgaggccgatgacagggaactggccggagcgaaggagggcgttagcgaaggacatcccgggaccgacgccgcaggtgcggttggagtcgatgccgttgtggagcggctcgtgggcctcctcccatcggagctgcggggagaggcggaggatggaggggttgggggcgcactccgggggaaccatgccgtcccagtgggaccccaccacgcccccgcgccccgccatgttcgactgccctcccaggatgaacaccaccttgttcgacggagggagggacacagccgccgccgccgccggaagcagcagcaacagcagcagcatccgccgcattgctgcttgctaccgttgggcttggggcctggggggttgggtttgggacaaataatttgaaatctactcctcctcactactctactcgtagtcaatttataatgcagctagcggcatgtctgtttgagtttgtttgacccaaccaaaccaaaccaccaaagaaaggaaacaacatccacccatgtcgtgcgctgctcttcccttttcttttcttcttttttttttgggttttgttttgcgcgagtatagcaggaaggaaagtagtacgatgggcctagtttgttggatggccgtgggctccttatcctagggctacggcccaggtgcatcggaggagcgagccaggctcgttcgccgtcgctccggactacagtatactggactggactggaggtcacggtcgtcgccacttctgcccgccccgatcactcttccatctggattcaaaccatcttcttctcctccgatccttgccataaacacatttcactcagcaaggtcatccaaaggttagctaggccggaacatccatcattcacggtacggtcaactaaattttactgaaatacactactactagtagtaccaccacctaggtgtctgggcaccaagcctgatacttgtggttatcggctgtgattttctgacgtaccaggcctaatacttggtatcagccgtgataatcaccttataccagtcaagaatgacttgcctatgcacaatgaagaggagcagcatgacgagctagcgacaagtacaatgtaacaacctcgagacctccatgaactccgagattgccctcacaccgagaacgaccgacttgcttttatccttggtgcccttgacctcatctccctcagcctcgcgtcctccctcttgtccctccccagccacgacaaatggtgacctcgctgtcgcagttacctttctacttgccgatttcaccgattccaacagctacataacctcgttagagtccacatgcccattgatgtggtgtggggaaggggaaagaggatgtgggatgtcatcgtgttggggatgatggcgatcggtcctccagcaaagggaggtgggattgattggagtgaaggagggattgattggagtgaaggagttgggaggagcaaagtggacgacggagagaatgagtcggagaggaagaaagaggagaaacagatatggagaataagaaataaatctagggtgtttgttgttaagttgtatcccattctacgggatctagggtgtttattgttaagtaggtgtactagtatcctaattcacgggactccatccactagtttctgtaataaaaatatggcctctttgaccgtatcgtactagtaggtgaaaatggaccattgtcgtatgaagagaagagaaataggatgaatgatgatgagataaaaatatgggaaaattggttccataccatcgaaagttcctgagttttgctttataccatcgaaaatttgtggtgcactttaataccattcaaagttttctccgttaactctctataccacaactgtttatttccgtcagtttttttttcttttcaatatttggctggaagacaaacaggatatgactgtattgcccttccttcactcatctaaatctggcccaaattttctcgttttttcctctttggctgacatgggcacatcgctccatcgatggggatcgggagcaacaagagcaggcagcacaggccggaggaacattgtgaatagaggactgcacgagcaccggagcacggcgagtgggttacgagcgcgcgcgccggagctgcacggccgacagggacgggctgtcgccctgtcttctgtctatcttctccccgccattcgccaatctacacgtccctgctactgatctcttccctaccggtgagctggtccccaccatttcaactctcaagcaccattcatcccatcaatccgcgtaatctcgccgccggtggcccaatttgcctcaagctcttccaagccggccccctccaggaattgcagcgtcggtcaacatcgtgctctcccgcgccaaccccttcctcacacagcggatggctggccagctccgacaggtgcggtggcaagaggatgtgatggagctggcggcgatgcttggtgaagaagatgctgcttttgatctggatgcgtcggggaccggagacaagggcaagcaatgtcatgtttaacgacagatccactaaagttgacggtgatggtgaaataagtaacggagtaaattttggatggtattaaagtacgccacaaactttcgatggtataaaacagaactcaggaactttcgatgtcgtggaaccaattttccctaaaaatattcctctaagagcaggtagaatagtactccctccgtctcaaaataagtgtagttttagcactattcatgttcaacgtttgaccattcgtcttatttgaaaaaagattatgattagtatttttattgttattagatgataaaacatgaatagtactttatgtgtgactaatttttttttaatattttttattaatttttcaaataagacggatggtcaaagcgctaaacatggatatctatggctacacttattttgggacggaggtagtaggctataaaccagctataaacatattttaaagagataaaagaagagagagaatagcagcggactatatatttgtagccagctacagcacggactcaaagacgtaatgtgtgtatatgacaagtaggaccaggtattaagagtatagtaagcaactattgtatgaattagctattacattaactatgatgatttggagcgctctaacgagcgtgtatatttttattgagccaatcctctcactctcctctcctccatatatacggtagtactcctatattggcctgcctgcctgcctacctgtcctgtccgtccaccttgctgtgttaaatgcgtttctagcgtagcgtagcagatccaacaaacacctagcagcagcagcattggtacgtactcctcctagtcctagctagtgagtgagcgtgaggagcagtgagcatggcgtcgccacagctacagctgcaggtactagcgctgctgctgctgctcgccaccacggccacggccacggcgacgccgacgccgacgctgatattccttttgggcgggcagtccaacatgggcggtcgcggcggcgccaccaacgggccgtgggacggcgtggtgccgccggagtgcgccccgtcacctcgcatcctccggttgtcccctgagctccggtgggaggaagcgcgggagcccctccacgccggcatcgacgtccacaacgtgctcggcgtgggcccggggatgtccttcgcccacgccctcttccgcgccatcccgccctccaccgtcatcggcctcgtcccctgcgcccagggaggcacgcccatcgccaactggaccaggggcacggagctgtacgagcggatggtggggcgcggcagggcggccatggccaccgccggtgcaggtgcaggggccaggatgggggcgctgctgtggtaccagggggaggcggacaccatccggcgggaggacgcggaggtgtacgcccggaagatggagggcatggtgcgcgacgtccggcgagacctggcgttgccggagctgctggtgatccaggtggggatcgcgacggggcagggcaagttcgtcgagcccgtcagggaggcccagaaggcggtcaggcttccttttctcaagtacgtcgacgccaagggcctccccatcgccaacgactacacgcacctcaccaccccggcgcaggtcaagctcggcaaattgctagccaaggcctacctatccacgctctaattatatcatttgcgttcactgctggctactaagtactgattcattcctccccttcccctctatgcaaaatctgtcatatggagcgcgtgctgtatgtaggggatgagtatcttaccacttcttccttcattccggattaaaatataatgttactgattttctttttcccacaattattactccactactttggttattacacacacacaggacagacacctggattgatttctggactaatgcttctttcttcctacttacattactatactctcctagtactcctgaaatgtgtactgtcggcagctccaattgtactcatgctgtgatgatctgttatgtaatgtagtatgcaaccatctccctccctccctgtttcaatccttcgagcggttcggttcggtactcactttgattggccaacatatgcaatgcatgtttcgggcagacaaaaggcgccaagctaaaataaagatgttggtctgtctgacacggtgactcggggccagagatgtcttattctcttgtttattactactacagtacacctcaaatcagctttaccattcattccatatcttaatcaaatctacttctacagtaatccaatatagtactccctccgtcgcttattaggatcccgttcttttcttcagaagaagttggatgaatattaatattttcatgacacgctttttaaactgttaaacggcacgtttagtgtaaaaaaaatacataaaagttactctaaaatatcatattaatctatttttcaagtttataataattaaaacccaattaattatatgttaataccatctcatttagcataaaaaacttaatctttatcttcgtatattcagatgaaaagaagaccatctaaagggcgtactttttctttttcggagatcaaggcgtgggtgtaggtggtagtttcctccgcatgcacccctaattaaacgcccatgcagaattaatcatatggctcatctaagggtctgtttggcacagctccaactctaacttcacctctgctggagctggagctggagctcagccaaacagtttcagcttcaccaaaactgagagtggagttgggtggagctctctcacaaaatatacta

SEQ ID NO: 7213 - DNA, 55273 bp, Oryza sativa
caccaaccgtgactaaaaatagatttttactcccggttttttcacccacaatctttagtcccggattgatagtcccggtttgaaaaccgggactacaggggggttacgaaccgggagtaaagccccgttctccaccagtgtaagccaaccctagaaactacaaaccaccataaaaccaagcaaagcaaaaaattaaaccaccacattaaagcattttcttcatcttatttttcaccagactaattcattcatttttctcatgtgcaaagtatgaaaacttgcagcagatggaatataactacctcccaaattaagtactactaatggggactgcatgcagttcatatatgtacatattagtagctagaatatgcccgtattttgttacggattaaaaagagaatcatatggtacggtattacatattcacgtgggaaaaatatatagacgatatacaataatatatccacttctctatctagttgaatcaagctgtttctagtagtcttcttattgtagagtacatttgagaacctgcatgtcattgataggggcggtggttgccaccatgcaccattgccttcttttaaagtggtataggtatttcaaatatccgaacatgaaagcacaaatatatgtacacgtttttttttaactaattaacctcccatgcgagattttgtgcagaaagaactagatttaaaagtagaacgtactgtatttaatatacatctctatctgtttacatgtatacatctataactatcttgatcgatctatcccgttataatctaatctagacctagagacggagacggagacggcgaaggggccaactcggcctccccttgtcttcaaattttacattgaattttatagctagctcgaggaaattttgaagaaaaaaactaacactattgccccctccaacatagattttttagtgtttccagcccacttagcatgacaaccaaatgatgcaaattaatatagatccttttatcctatcaatgtgataatttttaagccatccagaaaaagatgtggtacgtgactcctttttgccatctatctcttcttaatatagcacgcatgtactaatgacataaattagctaatatattgcacatatatatggatcagtcgatacaggataccaatcaaaagcatctagagggatatggatattttatttatcttcttgtaaatacagtatacctcagcgtgatacatataagcgtaagtacacgcctatatctctgacaatctttaatttggtcactaataatcgcacaggcgaccatcatatcatatatatgtaaattttgcatagtcatgatgtattaattgtacgtgctagaattcaatttcctctgatctcctctctcgaatattgaagttctgatatatatatatataggtactgcatggtttaattattagaacttgtgccactgatgatcatagctgcttacccctggcctgctggtggtggagtacacctgcatgtttgcattgatcatagtaggattatcaggctccaactcctccagctctgcaaagacctcatcagctgctgaaggttggatgccaagtccagcgccggcgccctccgtcgtcatcatcatgttggcctgttggccaccgagcacgacgtcggcgtagagattgaatggggaggaggaagaagacgatgagcttgtgatcagtgcaggctgcagctggttggtctgctgctgctgctgttgcttgtggcggctgctggaggcagtagcatgagtactgtgatgagaacgggcatatccggcgagcacattacgttgcatcggccatgggtggttgtgctccgccgcgtaggtgatcaccagcatgttggggtcgctgcggctgcgctccacctgcttcctcgccatacatccctttgagctgctgcatctgtagtaacccctgcatcatcaccgcccacaaaatcaactcatcagtgaattattattttttaattaatttcctgatcaaccgcatatatataaaattattgtgcctagatatatatatacccttagaatgcagtgtatgaatggtttgatcaaatttgaagatggcacagtaatgtcaaactgagtccactaagccagaataattgttaattcatcgagaaatttaattaattgtgagtaaattaagcttatcgatccctgtacttgaagtttcatttttaccttttaaattaatttgaaaacggcaaacatagctattttgttccaatttttgcctcaaaagtaaaagcaacttaatttgtggcagtcttgcaatatctactatttcaacaattaataatgtttgatttacgcaatttgcaattgggagtattagtttctcacaaatgacactacattgggtcataattgtgatgaatcacttattagatccccatgtatatatggaagaattcattgatgatagatttacattttagggattgcttgggcataggtgtatatataaccttcagacggtacaatgttgaaactccgacacaatctgaagtgattatatacgtttgattaatccatacatatccatccaaacccttattaggtcgttcaagtgccattggaagtttgaaacccaacactacacaaataattaatcaataatagacaagcatattgtctattatgatgctgtcgaattatttttctaaaagaaatgttttgtatacttgatttggatcattggagatttggtatattaaatgtgtattgtgcagtaaattaattttgggttctattcacgttggttggctttggctgataagttatacaaaagtaaacgaagcaaccgaaaataattttaggttaggccttttatatactatttataccattagtggtaaaaagccaaggttggaaataagtttaaaataaaaaaggaggataatttaaaattaactttaaaataaatgagtaaatgaccttttatcaccaaagtttcactttgaactaccctttaaaacatcttttctctttggactagattagtttgcctttgtttcactttgaaccatcccaaaaacttttctcgagcacataaatgactttaaccacatcaacacccataaaccgctaacttcctggctcacatgtagactattattcacaagattagagggtagatgcactagaaaagtgacttggggtggtccaaactgcaacaaagataatcttacctagtctaaagtgaaaatattagctagagggtagcccaaaaagtgaaactttggtaataaaagatggaccaaagtgcaattaactcaatttaaattgtgtcaatgacttataagccaacaagcaaataatggggaacttcatgtaatctagctaagtaataaacccaaagttgtggcttactaacaaaaaatgttgtttgaattgaaaattggggggggggggggggtgtacagatatatatgtacttccttattccatatgtaagccatttaaaacttatgtgcaagaattaaaaaaaaatagctcaagcgacttttgttaccctttatttatattgttttggaaaatattggtagtttatttatgagaaaaatataatttatttggcaagagaaaccataaatataagtttttttacaccgaaaccataaatataagttgaaattaaaagatgcctgcaaattttgaaacaacatacttttagagtttaaaaaaggctaagatggcttacacttggactcataggggatcagtatatatatatttcaaaagttgtttaattatgacaaaccaattgaaattgtctaaacaagaaatatggaagctgcttgttttttagttaattagcttataaaaaaggatggccatgattttgatgcttttgcccagagatacagtacctgcagagatatgagcaataaatattaatgaacttacataatataaaatgaatataattaatacctagagggaacataatataactaagcagtaagcacacaataggaatgaacgaaacatatatatctgatgagatatctcttgattccaataaacttcgtataaattggatcggtcattaagtataaaaatatttatgcagaaagtgattaattgtttatcaagaatgggaggaataggaatgattgaaagatatttgatgagatcttgatgcaaataaacttcatgtatgaatcgggtcattaggtacaagatatatatgaacagatcgattaagtgagcgcgtgttaaaaaaaaaaagaggggaagaaacagatgaaaatgtggccggtttaccgtggataaggagagcctttgatgggtttctggccgtacttcctccatgcccatagatcagacgggatcacctctcctccacctccacggctactcgtcgctggcggcgccgggatgcacaccactttcttcacctcattcttcctgtagtatatatgccaaaggatgcaagcaagtaattaattaattgcttgaaaataaactaacactaaatagttaagacttttgattaattggaaatcgattgatgtaagtattcctcgctcattagagaaacgtgaaaagcaaattaggaggaactgaagtcaagtatgatttagttccaaacctgtcaaagagttatgtgtacatgtacagttgctagatatgagcattaatactgaaaacggccatatgcgaggagtaaaactctgagaagagtaagatcgagttaatattaatttggcgatatgggtagggggtgcaagcatcaaatgccaatccatgaaatcctgctagcttgcttaaaggtgatgaagtcagaattaatgacgactcatatatatataatctgtcagtatatgtaatggatcgaaaggaatgctgaaaatgagagccaaagatatctgcacacacacacatgcatgaactaataaaaagatcaaagtgataaaaagaagcggtaacacaaagccgggatcgatcagagggatgcaaatcatcaattgaaggaaggaccaagatgtgtatacattaaggaagaagaggagtgatcgaaatatgaatccaattaattagagaactaattaataatgttaagagctagctagcatgccaaaccttttcatcatttgatgatgagcagacggcgtcagtggcgagatcctgatggcttcttctccatcatcggcagcgcctgcgcctccgccgcccatcaccacgtcgccgccgccacagagggcgtgctgggagatctggagagcaagcggccgcggcatcccgtagccggcgtcgccgggtgtgaggtggtggtatgagtcgacgaccgtggatggcggccccgccgtctcgaacggcacaggtgcgtcggtgtaagcgatggtggtagggcgccgaagctctccgtggtggtggtggtggtaagggatggtgatctggggggcgggatagtattggtgaggcgcctgaggcatgggaggaggaggaagaggatgcagaggtgaggggtgatggtgaggggtggagacgaggaatgcgcgtgcattggcacgggccacgacgtcggcgaggtcgccagcagcagcagcttgagcagtggcggcgttggcagcctcctcctccatcatatccatagtggcgtgctcgctctttctagtttctgtctgatgcttaattagctgctgctgctgttgctgctgcctattcagtattcactagtagctagtactggtacacacactcccactcccgtccagccttgcctgcaggagcactagtagtgcacgcactcacagtgctactggccggctactaccagctcgattgatctctgaatctctctctttttctctctctcacatgcatgcatgatagcatatgagcatgagagagcagagagttcgattgctcgatcgatgatcggtatgtatatgagtgggatgcatgcagagtcagatcgatcgatactagatatcgagaacgatcgaggtagcaaaggaaaggaagatatatagctgctaggtggcaaacgcgtcgtgttttgagtcggtcgtcgcagagaccatggatcgatcagctgatagtatttatttggccaccacacaagctacaagctacagcgcgaagcaactgttcgccccacacaccaactgtagatggatgcatccccccccccccccccccccccagcctattgcaacacagcaagtcagatatatgcggcaaccaacaagctagctgctctcgctcgatcgatgatggccacaccaccatatgcgcattcttcgtcctctgctactacctgtagcctgtagcttccttttattttcccctcctcttcttctctccttgcaatatatatttgctcctccgatccgtatcggtatgcatgagagagagagagaagctagatagcttgcttagctagaggaaaacgacgaggggacagagacatggtggcacttatgatagagagagaagagagggagagggagagtgagccgggcatgcagagatgcagatgcagtaggccatgcaacctgcctttgccttcatttgttggctcgcctgtttctttcgctacatgatatctcactttcatcccccttctttcagcaccttttgttttccatcatttcggttgcgtctcttgccaattaacttaattaggacactgctttccacattgatgcgtgcatatatatattattattatttatattatattcctatttttatacttaattatttattgacctgttactgtctaataatgtgtgcatcggtagtgttgtggttttctatacttagggcgattccattacaaaatctattatattattaaaggaataaaaaaggagcctccacgttcgttcttatggtctagaaattctcacattaatcggagaaaaagaaaaatcagagtccatatagaaatacaatttagaaatagttgaaattcggaattaaaaaataaggaatattagaagaggagactagagtccatatagaaatacaatttagaaatagttgaaattcagaattaaaaataaggaatattagaagaggagactagagtccatatagaaatacaattaggaaataatagaaattcggaattaaaaatactggatggcagtacagacagtcccttaaaaataagaaatattagaagtagagtgtatagagtccatataggaatttaaaactaactaaaatttgaaataaaaaagtgcctccacgttcactctcatgacgtagaaattctcatattaatcggagaaaaataaaaagaagagtccatatagaaatacaatttagaaatagctgaaattcagaattaaaaaataagaaatattagaagaggagactagagtcaatatagaaatacaatttagaaatagttaaaattcgaaattaaaaaataaggaatattagaagaggagactagagtccatatagaaatacaattagaaaataactgaaattcggaattaaaaataaggaatattagaagtagagtatagagtccaaatagaaatacaattaagaaaaaaatagaaattcggaattaaaaaattaggaatattagaattagagtatagagttcatataggaatttaaaactaacttaaaattcagaattaaaaagagcctccacgttcgctctcatgacctagaaattcttacattaatcggaaaaaaaataaaaatcagagtccatatagaaatataatttagaaatagctgaaattcggaattaaaaaataaggaatattagaagagaagactagagtccatatagaaatacaatttagaaatagttgaaattcggaattaaaaaataaggaatattagaagaggagactagagtccatatagaaatacaattaggaaataactaaaatttgaaattaaaaaattaggaatattagaagtagagtatagagtctttatagaaatacaattaggaaataatagaaattcggaatgaaaaataaggaatattataagtaaagtatagaaatacaattaagaaaaaaaaatagaaattcggaattaaaaaataaggaatattagaagtagagtatagagtctatataggaatttaaaactaactaaaattcggaataaacataataaaatgaaaagtagtgtttagagtccatataaaaatataatttacaaataactaaaattagaaattaagaaaaacatgagaagaagagtttaaagtcaatataggaatacaatttagaagtaactgaaatttgaaattaaaaattaaatattattgaaagatgagtttagagtccacatagaaatataattagaaataataaaaattcagaattaaaaaaagaaatattaaaagataagtctatagtccatataggaatatatataatttacaaataactaaaatttgatattaaaaataattaataactaacacgtatataaaatacaatatgaatattacacattagttgtttcgtaaagttattgcaaaatttaaaattatgttgtcattgtaatatattttaataatataatgagaaaacatatatgctattatacgagagaaaatataatgatgctaacagcgcaatctgcgtgggccaccatgctagttacaattaattaaggttctcgacatttatcaatagtcggttttttagtttttgaaaataatccattatatatttatatatgtgcaccattaacatgatggtgcaaacgtgattgcatgagtccgcccactaagaatcatatattgtgtttgtgtgtatacatacacacacacacacctgtctatccttagttggtcaagaggctggacatattagttatagaacttcttttgaaaaaaaattattgcacatgtgtatatacgtttctttttggacttcaattttaacacaagaactctattatatacaatatataaaagtaaatgatcactacaggaaaaattcactattgccacgaaaatgttgcaaccacatatgagttctggcagtatatatagtttatactattaccaatatttttttggttttgccgtagtgaacgtatcttattgcaatgtttattttgtggcaatataaatatttgttaccataaaattaaaattgtagcaacaacctaattaaaacaacgggttatattacgtaccacagctaataacgattttagaattgaagcaatacatatctattgccatgattttggctctaatgcactaattttttcgtgccaaaagatcaatttcctagtagttgaaaaaccttgttttttataataaccttaaataataaaatacattaaatacaatagatatcattgggactaattaagagaatcactacaaaagttttcctaaacttatgtcatgaaaagtatactgaatatgccagactatatatataagtccaaataagcactgaacatatatgcacagagaaaggaccgttctcaatatattgattactgtaagtctctagtgtcactagcctaaccaattaaagatgagtatgcacaggtgcatttttggctttaatttactagcattattgttgtgccactttctctttagttttagtgaatttaacatgtagtacgtgcactcaatcagaattttacaacatgctttagtcgcgctaattaacctgtactgacattccgtcacaaaaacattgacttgctagaataactatagggcatgcatgcatgtggttttttttatatataaaaaatggtatgcatgatttacttgcatttgttattattagtgttgtcctagtatattgttggtacaatatggtcggacccattaactggcgagggcgtgcggaaggtctcaaccctgcaggttattagcatgcattattattggcatccaatgatatctacaatcttcacatatgatctttacacggttagaaaattattttttttgcacaatttttgctgtcgattgattagatgagataaaaactacaccagaaaattatgatccattgatgagcttactgaagctaaggatgcattgtatgtcaaaattactgaaggatatgactacttgattctacataccatggttttgatcctagttttatttaaaattaaaactaatagctcctttgtactgaattaagtaattttggaagaaaagcagaggaactcaatccaaaggaaaaaaaatcctatgtgcacacgtttggtttgtaggactgcattaaagtaattaatactccagattttggcggaattctagcatgaagtctaactttaggtttgcaaattcctttcggacttccgatgcattctctctctttctctctgcattatttctctaccaaatcaaaatgtgaacttaattaaatatgatgtgtttttcttgtggtacattcaaacatttcggtagtattgttttctatagaatttatcatggtgtgagttgtgacattttaattccgtgttttcctattcttgtactttaagaatctagtttgcgtttcaaatgagctctaaaatagttatgtgtaggtttagttgatgcagacaacatcatgtactagtagcaacgagcaagttaattttttctttgtgatttagggaattaattaattactccatatgtttcatatcgtaagactttctagcattgtccacatttatatagatgttaataaatctagacacatggacaatcctataaaatcttacattgtgaaaacggatggaggaactactccctccttccctaaatgtttgacaccgttaacttttttaaatatgtttgaccattcgttttattcaaaaacttttgtgatatgtgtgaaactatatgtatacataaaagtatatttaacaataaatcaaatgatagaaaaagaattaacaattacttaaattttttgaataagacgaacggtcaaacatttttaaaaaagtcaatggcattaaatattttggaatggaggtagtaattaatagtgcggtcaacgagtggtaagttactatatcaggctggctcgatctggatcgcatgcatggacaccaagtcactgtgacatgatccatcgagctagctagctgatgtgatggatcaagcgacaaagcaactttggacggtaggagagggtacgcacgtacgttcaatttgattaatttattagccgataaatatttttctttgtattttttttatatttttctttatatatagggagagagatatatatatagagatcgatatcttaccacaatgcatgcatgatactatcttatattatatcttgatcgatcagcagctagctggtccatccattggtccacaactccacacacacatatcgatctcaatatcttttatctctctctttaatttctagttattactgtgcgcttggctgcacacatagcagcatgcagcaggcagcttttcttacacttcccacaaaagcaaacaaaatcccagagcatcctactgtgcccatcccagggaaatgtacgtactgtgccagagccacacttccacattattctcgatctctacaatgaaatgcttctcaatttaaagccgatcgattgattggaattttttaccttcttgaagcgcttgttagtttgattgaattaatcattattccgaggaacacgggttagtaacgacgagaagcacggtggtccacgttaggtgagcacaattaatgacttttcaagtccttgggtgtgctgtcataactgctttattggtaaggagtgttgctattttctttttacagaacacttgttcatgtagttgtgcgattagctctaagtccctatcctatctcgatgagtctctagctagttcacattatgcgttggcatgcttccttaaagcctagtcataatttcgatttctcacgtggctctcttatattaaggtagaacgaaatttctgaacgatatattaacccacataaattaataaataaggaaacatgtcctactaaataactcgttgaagtaatttcaagcagatgcatgctagcaaattaactcaggcaaattgtgttgcatggctgtagctagattgagggaagtagctagctatagctagcctacaacatatatatcgtcttagcttgcctcgtcttggcggcaccaagattcaattcaacggcagctcaggaaaatgggccaggcaccaatagttccactgaaggatgtgcagtgtggacctaattacctaaccttgctgtagttaagttgcaaaagcacattcactgattgatgagcttggatctttagctaaggtacctggagttgtgtgtgttgagaatatagaaatataatgatttaatatattccataaataaatcatgacattacagatgtatactagcattaatgtatcattagatttacacatgtaaactaagcagtaaaacatgaacagatcaaatatacgcaacatgtcgaacacgtaccgaggtggcggaaagaccggttgctcggcaggaactactcgcggttgcgagcgtcgacgaaggcgcgcagcacgcgagcggagaggaaggcgagccgtcgtggacgaacagtgagcagtcgcgcgaagcgcttcccaaaaaccttattgccgccttctcccggtgcaggacgtcgaaggcagaggttcctgagacctgctctcccgatcgcaggtgcacgccagcgagcggggtggagtagtctacgagcgacggcgcagcacagaggaggaggcaaaccctagattgatttcgtgtgttttgcgtgaaggcggcggctcagtttatatagagataggtcgcttgatcagggcgcccgcacgatctccactccgcgtaaccgaaccggataagtcgcgcgtaacttatccggactccacgccgttttcacgcagcggatttttcggaatgtttccaaaacaaaacaaatccgaattttcctacagcaaaacaaaactgcaaaaggaggctgcatctgtgcaagggtgaggagccaattttgcggaccattcgacgcgtatgtcgtgcacgcgcgccgcctgccctgcccctgccctaccaggccaggtgaggcgaggcgaggcgagcgagcgcgtgttccccctcttctctccaccacacatgcttcaagaagctaggagggcatcctcccttttaaggaggtccccctctcctagaataagcaaggtggtactaaactccacatgcatgccatcccatgaggtgggcttttgtgatttttcaaagaattaatcttcgaatgggccttagcccatctattaattctaacaatcccccaccaaatctcaaaatcccactaagatttgccttttccaatgtacttttatataccagcggttcgatggagaccgatcaaggttgaacatccacctagaactccaagctacacttactcacaacttgaacaatggactacgtcttgaattacaagtcttatgcaagcaagtttcactcagagtcttatctggtactagaccgtctgtagactacccctcgggtggagcgtataagtcatactcctaggtctttaataagcttcctaaaagattcacccaaaatcttcatagactgcgaccaacagtcaagcttacaaaggtgagttctttcaagaatgctctgcaagacagcatcttcgctaattaaagccaacagaactcattaaggcatagccaacctgccttccagctcatgagagtacatgcatcttcacttagaggaccaacacatgtcttttctgcacactttgtcctcactcgtgtgcacccgggaaattcttcccggtcggtcacccatcccaaattgctccaggccaagcacgcttaaccctggagttctttggagattggcttccggaaaagaagttgcaacttgttgatatgagtattctattaatcctattaagccctaggaaaagaagttgcaacttgttgatatgagtattctattaatcctattaagccctaggccgggatgttacaccctcacccccttaagagagatcgacgcccccgtcgatcaaccctaggctaggaacgtcctctcttggccacgtccatgtgtccagtgccagcgcagcacgcttaaccctggagttctttggagattggcttccggaaaagaagttgcaacttgttgatatgagtattctattaatcctattaagccctaggccgggatgttacatatagattggtactctcctctagtttactaatggtttgttcttcccaggttctaattcacgggatttccgatcacatagactgggttaccaccatagtataactcacatgggtctcaaacccatctccttcgatgcattatctatcatatttcgtgatagtcccttcgtgaaaggatctgctaggtttctagctgtttggatgtaatccaacgctataactccagagtttctcaatttactgacagacttcaatcgtcttttcacatgtctagacgatttcatattatccttagaactattcactttgacaattaccgtttgattgtcacagttcataagtgacggagctcgtggcccctcaccgggagaccgcgcaggcccccctttgccggttcggccgggggcttagggtgagatctcaagctctctctgtatgtggaaagatcgcttgctaggaagaaacgcgagacacggcgatctatacaggttcgggccgctgcgaagcgtaataccctactcctgtgtttttgtggatttgtgtatggacaagttacaaaggattaactccctttcccctcagccttccaaaagggaaaaagtccccctctaaatgggcaaggtcctccttttatatctcaaggggataccacatgcacctttctctttccaaactggactgttctttttctctttaatgggcggagatcggtacggtttccatccgggagcccttctgatgggacaacccacacctacccccacctcccccgaagacagagatgacgcgggaccgtggctgtctgtcgatgacgcgaccagtgccagaccggtcattcttgtccaccacgcgtcagcttaacaacgtgcatgtttgcccttcttcgtgtaacaccttgcctgtaatggttaggatgaagcctggtataaatctgaccagggctaacgtgccatctctaagagataacaccctagctccggcttgagacgagtgcctagaggctttcgtcttgacgggatggggcaaggcgtgcgtcagaccgccagccgccacctaacccgtgatctgaccggtctgtgactggtcacagaccggataaaggaacgcgctgtactgcgttgcatgcagcgtgacacgcttgaccagactgcaataaatgctgttaggtgagcacagctgtgctcacttatcccatatatgtggcgcagacttccttaaggggtcggggtccctcggccctcggggccggggcaagcgcaacccgaccccccctcgggggaaatcaggaggagggcggacacctcaccctcgggcccgacgtccccgaaggtgccaggccacgtgggcgattgcgtctgcctcaagcctctggtcatgatactcccggtcccatatcaccgacagtagcccccggcgttatgccagagcaatttcccttcccaagggaagcggtcaggtgtgacgccacccctaaagcctggtgacaggtgggaccggtctccgtagttgggcaaaatacccaacggtctcaatccatgcacattggtattggtaactttggttgtccataatgggcggtctattcaagactgccacaccacttgagcagcgcgcgaatctgggtgagcagattggtctcgcccggagatacggtaacgccgcttcggtcggcgagcgtaattaacgcgcacacgatacaatccatttcgattgccacaaccgcatatccacttcatgcgccgtaagcgggcgaatgggattagtggaagcgtgggcacgggaaacgagggagcgagatagcgagatacgagggagcgaggtagtgggcgcgagaaacgaggagccaggcccagcgatggcaagggtataaaagcatcgagaaaaggatttgcttccttcctttcgccattgttcctcttgccttcgccgcctgagctctaactctttctctgctacgccctactttcgccacacgcgctcgttctcaatcatctcttcctccaccgccatggcacggggctctgctctgctcgacggcagtgtactaccgccttcccgcatcgtgagcgagaggcacgccggactgccacgccgcttcatgccggagtccgccaccggtcgggagatagtgatgctgggcgaggggcgcccggcaccagactacccggggcggtccatcttcttcctccccttcgcaatggctgggctggtcccgccattttcttctttcttcatggatgtcctggagttctacgatctccagatggcgcacctcacccccaatgcggtgatgacattggccatcttcgcgcacctgtgcgagatgttcattggggtgcgcccctctcttcagctgttccggtggttcttcaccgtgcagtcggtgtcaccgccgtcggtggttggcggctgctacttccagccgcgggggccggtgttgaaccgctacatcccctgcgtcctccgcaagaagtgggacgactggaagagcgactggttctacacccccctcgccaacgaagcgcgcctccgacttccaagccagcccccggcgcaggtctccagctggcgggcgccggtagatctgggggaggactacgacgccgtcctcgaccgcctggcgggcctgcgatcccaggggctcaccggggccatggtgtacggcgattacctccgtcgccggattgcgccgctccaacggcgcgcccggagcgcctgggagtacactgggcctgaagactacatgcggacccaccagggagccagatgggattgggctcccgaggacttcaagatcgtggtccaaagggtgctgaatcttagctccgtggaggcgtctcgcattcctcaggagatcctccccctctgcagcgatcccgaccgcgcctccattctaaccattatgatgggggtcggggcctcagaggagagagcccctaagggccacgacggcgcgggcgagcgccgccggggggaacaatctgccccaggagggggtcgtgcttctgggccccgcgtcgggggctcggggagcagccgccctgccgacgcccaggggaagaggaagttgggaggaacacctcccccatctcctccccgagggggcggggcggcgcgtgccagcagtcggcgcccggagggggccgcgccgacgtcgcagcccgagggggagcgcaaaaagaaacggcttcgcaagacgggggagacggaaccatgccggggaaacctgatttcccctccaaggtggtcattcaaccgaccccctcgcaggttcgtctcactctcattgcaaccatctttctcccaaaaggaagctttttcttactcattttgttcgtcttctggttttttcttctgcttcagcgatgtcccgtcgcattcctcccgccaccccaagtccggccagtccgaggccgaagatcctgcggccgcggaggagcggaggcgagaatctgaccggcgtgaagccgcagaccgccttcgggaagctgaagaggccgcccgggaggccgcccggattcgccaagcggaggaagctgctcgggaggaggccgcccgggctgaggaagccgctaaggaggaggccgcccgggctcgccaggctgaggcaacagctgctgctggcgcgtcaactgggcccactccttcgggcaaccctcaggcgacagcctccggggaggctcgcgacgaggccgcgggcacatcgcctgggcccacctccccgggcgacgcccaggatcaaacgggtccgggggacatccccgagcccagcacgtcctccggggggccgagccgcatcgccttctctccaaggcggctcttctcctcatcttccgtcgccccgctgagcgccgagcccattctgcaggccttggccgccgcaaacaccgcggtgctagatgggttcagcgcccaagtggaggccctgcgcgcggaacgagcggagctcgaggccgcatgggcacgcgttgaggaggggcggcgctcggtggacgccatggtggaggtgggccgtaaagctcaccgccgtcacgtctcggagcttgaagcccggaaggcggcgctgacggagatcgctcgtgaggtggaggaggagcgagcggccgccctcatcgctaccaccacgatgattgaggcgcaagacgccctccgccttcaaaacgccagccgggaggcggagctgaaagaaaagctcgacgccgcccagggagtccttgactccaccgctgcccgagagcggcgggtaacagaggctgaggcggcgtcccggcggcgcgaggagtcccttgaggcccgtgctatggcgctggaagaacacgccggcgccgtggagaaaggcttgacggaccgcgaggccgccgctgctctccgggaggcgacgctggcggcgcacgaggccgcctgcgccgaggaggagtgcgcgctccgcctccgcgaggacgcactcgctgagcgggagcgagctctcgaggaggctgaggccacgaccaaatggctggcggacagcctgtcccttcgcgaggtggcgcaggaggagcaggcgcgccgcaatcttgaatgcgtccgcgccgagagagccgcactggaacagcgggctgctgacctcgaggctcgggaaaaggagctggacgcgagggcgcatatcggtggggcggccgcaggcgaaagcgacttagccgcccgcctcgcagctgccgaacacaccgtcgccgatatgcagcgagcgctggactcctccaccggggaggccgaggcccttcgcttggcgggcgagattgggcccggcatgctttgggatgcggtctcccgcctgaagcgcgccggtcggcaagcgggcctctggaaaggccagacgacggtgccccccaccaatctggaaggcctcgctccgcacctcaacaggatggcctgggttctcgaacaactccccgaggagcttgagaagaccatcaagtcatcctcgagggacctcgcgcggggagcggtcgaactcgtgctggcgagttaccaggcccgggaccccaacttctctccatggatggcgctggaggagttcccccccgggaccgaggacgatgcgcgcgcgcgggtccgggatgccgccaaccacatcgtccaaagcttcgaggggtcggcccctcggctcgcgttcgcccccagctccgacgaggagggcgacgccagcggtgaggacgacggtggcgacgaggccggcgacccgggcgcgttggaatgagcccccaggcccccgccaatctccaattttttctttttctttcttctttttgtatagatcaacttaatctgcaatcaaaaatgatgaaaaatttcttatgttaactttattttgctatgcatatgagttgaggatgatttgtgccgtggtccttttgcattttagcttgatttaagggctcgtgctcaagtcccgatcctcaaatggctcgggtcggggctagtgcctggggagatccacatgtcgagactggccaggccgggaacatggtgaccgagggttatgggtgacccgattgtgggtttttgccgattcccccccggagttcaccacgccccggggcacggctcggttctgggccccgcttggcgattttagctgaccgaaccgagcccccgagggtaaggttgagcacgagtgaccttatttcaagttaagattcttcagaaggaaaaacggcacagacacaacctttaggaaattgaaactgcttttattgaaatgctgaaataagaaaagtaaggctgtgcatgtgtggtagcccccggctaaccctgcacacccgaggggggtgcggggttagcccgagcccgaaacctgacacccgatcccccccgtcaggggtagaagcgacgaaggtgttcgatgttccacgggtttggcagctcagtgccgtcgcccgtggccagccgtacggagcccggccgggggacaccgatcactcgatacggaccctcccacattggtgagagcttgctcagtccagcacgcgtttggacgcggcgtaggacgaggtcgtcgacgcagagtgatcgggcccggacgtggcgctgatggtagcgccgcaggctctgctggtagcgcgcggctcggagggccgcgcgccgccttcgctcttctaagtagtcgaggtcatctctacgaagctgatcttgatcagcctcgcagtacatggtggcccgaggagacctcagggtgagctcggatgggagaaccgcttctgcgccgtagacgaggaagaaaggcgtttccccggtcgctcggcttggtgtggttcggtttgcccagagcaccgctggtaactcctcgatccatgaatcgccgtgcttcttgagaatattgaaggtcttggttttaaggcctttgaggatttctgcattggcgcgctccacttggccattgcttctggggtgggcaggtgaggcgaagcagagcttgatgcccatgtcttcgcagtagtcgccgaagagttcactagtgaattgggtgccattatccgtaataatacggttaggcactccaaaacgggccgtgatgcccttaatgaatttaagagcagagtgcttatcgatcttgacaaccggataagcctcgggccacttagtgaacttgtcgaccgcaacatacagatactcaaacccgcccggggcccgtttgaacggtcccaggatatcaagcccccagacagcaaatggccatgacagtggtatgatctgcagggcctgggccggctgatggatttgcttggcgtggaactgacacgctctgcatcgccggaccagatcgactgcatcattgagagctgtcggccaataaaatccttgacgaaaggccttgccaaccagggtgcgcgaggcggaatgggctccgcactcgccctcatggatgtcagcaagaagctcaacgccttgttcctgaggaatgcacttcaggaggattccgttagccgcgcgccgatagagggtcccttctaccaacacgtagcgtttggaaatgcgttgtacgcgttcactcccttcgcagtcctcaggtagagtcttatctgtgaggtatgtttggatctcagagatccaagcaatcaatctaagggagcttggagcgctcccttcgggtcccgaggcctggactccgacgggcctcgggggccggtcaggcgcatccgtctcccctaaggggtcgggtcgcgccgacggctgggtaagcctttcttcaaaggcgcccggtggggtctgggctcgcgaggacgcgagccgtgagagttcgtcggctatcatgttatcccgtctgggcacatgccgaagctctatcccgtcaaaatggcgctccatacgccgtacttggcgtacgtaggcgtccatctgtgggtcagagcaccggtactccttacagacttggttaacaaccagctgagagtcgcctaacaccaggaggcggcggatccccagcccggctgccactctgagtccggcaaggagtccctcgtactctgccatattattggtcgctcgaaagtcgaggcggaccaggtatctgaggacgtctccgtttggagaggtcaacgtgacccccgcaccagcgccctggagagacagagaaccgtcgaactgcatcacccagtgggtggtgcgaggcagctgagaggggtccgtgctggcctcgggtattgagacggtctctggagccggggtccactctgccacaaaatcggcgagggcctggctcttgatagcgtggcgtggttcaaagtgcagatcgaactcagaaagctcgattgcccattttaccactcgtcctgtaccctctcgattatgcaagatttgcccgagggggtaagacgtaaccacagtgacccgatgcgcctggaaataatggcgcagtttcctcgaggccatcagaatagcgtaaagcatcttctgggcctgagggtatcgggtcttggcgtcccggagggcctcactaacaaagtagacaggccgctgcacctttcggcggggccgaccctctttgctaggggccgcatccccggggcattcttcgtccaagtggcctctcggggcgcactcgccttctgtgccgatgtcctcggggtcggaggatgacaggagcggccttcccacagtggcctcggggccgtcctgggggtcgggggctcctggcgtcgtcggacaagcgggtaaagggcctactccggtcgtcaggggcctcaggcctccgttcggctcgggggcctcttctccctgctttctcccgggtcgagtcagcacagggttagcctcggggccaaagggcgataggtgcggccttcccgcagtggcctcggggccttcctgagggtcgggggcatccagcaccgtctgacaagcgggcagagggccgactccggtcgtcaggggccttaggccaccgttcgactcgggggcttctcctccctgctcgctcccgggccaagtcagcacagggcgggggtgcgcgaaatgaggattgtcttcatcgcgctccacaaccaacgctgcactaactacttggggggtcgccgctaagtaaagtagcaggggctcatttggctccggggcgactagaaccgggggagagctgagatatgcctttaactgagtaagggcatgctcagcttcctccgtccaagtaaacggccccgagcgcttgaggagcttaaacaagggtagcgccttctctcccagccttgatatgaaacgacttagggcggccatgcaaccggcgacgcattgcacatccctaagtttgctgggggggcgcatccgctcgatagctcgaatcttctcggggttggcctcaatgcctcgggcagagaccaagaacccgagaagcttgcccgcaggtacaccaaacacacacttatcggggttcagctttatgcgggcggagcggaggttctcaaaagtttccgccagatctgaaagtaaagtttcttggttgcgcgtttttacaaccaaatcatcaacataagcctcaacattacgtcctatttggctacccaaagaaattcgagtagtacgttgaaaagtaggacctgcattctttaacccgaagggcattgatgtataacaataggttcctacgggggtaatgaacgcagttttttcctcatcctccctagccacgcgaatctgatggtaaccagagtatgcgtctagaaaacacaaaaggtcgcaccccgcagtggagtcgacgatctgatctatgcgaggcaaggggtaaggatccttaggacatgccttgttaaggtcggtgtagtcgatgcacatccgaagcttgccgttcgccttgggaacgaccaccgggttcgccagccactccggatggatgacttcacggatgaatccggcctccagaagtctcgccacctcctcgcggatgaaggcttgacgttccggggcctgccgccgcactttctgccggaccggccttgcgcccggccgcacggcgagacggtgctcaatcacctccctggggaccccgggcatgtccgctggtctccatgcgaagacgtcagcgtttgcccgcaggaaggagacgagcgcgtcttcctatttgccatccagaagaccaccgatccgtgtggtcttggatgggccgtcgcccaaggcaacctccttgaccgggacctcgtcgcatgtggcaatccgctgcctcggggcggtgggggcggaggtgccaagcctctcgtcaccaccctcgggcttggtcgcagcagcgaggtggtccgcgcgctgctccatgcaagcgagcgcgactttaaggtcgccacggacagagatggggccaccggggcccggcatcttcatctggaggtaggcgtagtggaccgccgccataaacttcaccaacgcgggcctccccaggaccgcgttgtagggcagactgaggtccgccacatcgaagttcacccgctccgtgcggaagttggctgatccaccaaaggtgaccggtaggtcgatgtgacctaacggccatgtgtgccccggcgtcacaccgatgatcggttgagacggctggagcaccatccccggggccttgatagcatcaaaggccgcgggggaaaggatgttgagagccgctcctccatctatgaggacacgccccaacttcacattgcagatggtgggggaaaccaccatcgcaatctgccctccccgggcaacgcacggtgggtggtcggtctggtcgaaagtgagggcaacctccgaccaccgcgcctggcgcgtcgcctcatgagtaggggccgcggccagaagctctcgcctcatggccttaaaactccggcgagaaacgtgagcacacgctcccccgtcgacagtggcaatggtggccccgggttcctggaaacctaggtcatcatcaccgtcatcaatgtcaacggcgggggccttctgtttggcctcacttcgccgtttaccggagggaactgccgcggacttgccctcacggcgttcctgcctcctgtcctcctcccacttcctcgttcgctcagccaagtttttgactgcgcgacaatccgcgagatcgtggagggaggtgttgtggacggagcaccacttgctggctgggcgctccctgctgggagtaccagcctctttctttttgtcgctcgcaggcctcccctttcgggtggcccgcggaacgccctcgacggcgaggacgtgaccctcgtcgccggaatggaccgaccttttcttcctcctcctgtcacgccgccctgtctgagcggcggatccgggggcggccgaagctgccacaccggaaccggaggggttccaggtccaggcctcctccttacgagccactcggtccgcgagctgaaaaagctctgcggtagtctggggctctttggaggcaatcttttcgagcatgcggttatgccgcacaccccccctgaacgcgtagatcaccgcgtgtgcagggatgcaaggtatagtattgcggacttggcagaaacgctgaatgtacgagcgaagggattcatcatcccctcgctgtactgcgtgcaagtccgcttcttcacctgggcgtggataagtgccttgaaagttcatggtgaactgctggcacagatcctcccaggagtggaccgacgcgggtggcaggttcattagccaaccccgcgcctgtcccttcagggccatgggaaagaaattcgccatgaccctgtcgtctcccccagcggcctcgatcccggtcgtatagacctggagaaactcggtggggttgacgctcccatcatacttctcggtgatggtgggccggaaccttgggggccaacggacattccgaagactcgccacaaaggctctacagccaacaccaccaaccgggggcacggagggctggtccttacgtccatgtggaggtgacactctggacgaggaggcgccctccgttgcacggggagtacgccggccgttacgccggcgctcgatgttgaggcgggcatccggctccccatgctgatcctcccgagtcgaaggcgtcgacgagggagtggcagccgaatgacgtgcagccgccgccgctcgccgcgccctccgccttgatgacacggaaccggtggtggcggcgccggaggtcttggtggtggcggaccgtccaccagcacccaggcgctgctgtgccgtcatgaccaagttggccacgtcgtccagccatcgctgggctggagactccgggtcagggacgacaggcgggtgacgtaggagcgcgccaacagcctggagcgcgccctgaggcgtgctgccgtcaccgtagacgaggaggcgacgctccccatctcgccgttctcctgcaccacccgcgactagcgatgctgcggatttttcgactctctcgagtgcctccccctgcttaggattttggtgtggaggaggtgggggagtacgagctcgacggcgtgggtttggctccccgtcgtcgccgctcacactcggagagaggtcgtgcgcctttgcttgctcggccattaggcagaacaagggaaacttggcgcacacggaagagtatgagagctcagaaaacacacgctgagccccctacctggcgcgccagatgacggagctcgtggcccctcaccgggagaccgcgcaggcccccctttgccggttcggccgggggcttagggtgagatctcaagctctctctgtatgtggaaagatcgcttgctaggaagaaacgcgagacacggcgatctatacaggttcgggccgctgcgaagcgtaataccctactcctgtgtttttgtggatttgtgtatggacaagttacaaaggattaactccctttcccctcagccttccaaaagggaaaaagtccccctctaaatgggcaaggtcctccttttatatctcaaggggataccacatgcacctttctctttccaaactggactgttctttttctctttaatgggcggagatcggtacggtttccatccgggagcccttctgatgggacaacccacacctacccccacctcccccgaagacagagatgacgcgggaccgtggctgtctgtcgatgacgcgaccagtgccagaccggtcattcttgtccaccacgcgtcagcttaacaacgtgcatgtttgcccttcttcgtgtaacaccttgcctgtaatggttaggatgaagcctggtataaatctgaccagggctaacgtgccatctctaagagataacaccctagctccggcttgagacgagtgcctagaggctttcgtcttgacgggatggggcaaggcgtgcgtcagaccgccagccgccacctaacccgtgatctgaccggtctgtgactggtcacagaccggataaaggaacgcgctgtactgcgttgcatgcagcgtgacacgcttgaccagactgcaataaatgctgttaggtgagcacagctgtgctcacttatcccatatatgtggcgcagacttccttaaggggtcggggtccctcggccctcggggccggggcaagcgcaacccgaccccccctcgggggaaatcaggaggagggcggacacctcaccctcgggcccgacgtccccgaaggtgccaggccacgtgggcgattgcgtctgcctcaagcctctggtcatgatactcccggtcccatatcaccgacaataaggatagccggcactggtttttcaacaataagcagatccattaatagatcacgcagccattctgcctcaacagtagcagtatccagtgccgtcagttctgcttccatggttgacctcgtcaaaatagtctgtttgcaagacctccacgaaacagtaccaccacccagtgtgaagacatatccactagtggctttgatctcatccacatcagagatccagttagaatcactatatccctccagtactgcaggatacccagaatagtgaagccccaattccatagtacatttcagataacgcattactcgctcaagcgcatgccagtgatcatctcccggattagaggtaaaccggctcaacttgctcacagcaaaggagatatcaggcctagttgcactagccaggtacatcagcgagccaatgatttgggagtattccagttgattcctaataattctcttgttcttgcgaagcaacaagctaggatcataaggtgttggagaaggcttactatcaatgtagccaaaacgattcaagatcttctccacataatgggactgcaagagtgtaatcccattctcacctctaattagcttaatgtccatttgataaacaagaagaccatgtgaggctgctagggaaagtagcacacgaattgtggtcaatctagcaacaggtgagtaagtgtcaaagaaatcttcaccttctttctgagtataacccttagcaacaagccgagccttgtacttttcaatagtaccgtcaggcctgagcttcttcttgaacacccacttgcaccccacaggtttacacccatagggtcgctctgtcacctcctaagtcccgttagcgataatggaatccatttcactacggacagcctccttccagtagtctgcatcaggagatgcttatgcttctgaaattgacttaggagtgtcatccacgaggtacacagtgaaatcatcaccaaaaatacttaaccgtcctttgtcttttgctccttcgaggagcttcactgtcatcctccttagtaaaatgttcatgtgtatgttcagtttgttctggtggtgtgattgaactgggaattatttcagagggttggctagagctactatgtgtatccttcattgggaaaaagctctcaaagaaggtaacatcacgagactccataattgtaccaacatgcatgtcaggtacctcagatttaactattaaaaatctataggcaatgctgtggtgagcatatcccagaaagacacagtccacagtcttaggtccaagtttgcgcttcttcgttattggtacattgactttcgccaagcacccccatgtgcgcaagtaagaaagtgatggttttctcccaatccatatctcatatggtgttttgtccttatttctattaggaactctgtttaacacatgattcgaggtcaacaatgcctcccccaccatgccttaggtaatcccgcggtgtccaacatggcattcaccaagtcggtcagtgtgcggttcttccttttagcaaccccattagactagggagaatagggaggcgtcctctcatgtataatgccatgttcctcacagaataagtcaaactcgtttgagaaaaaactctccaccacgatcagacctaagtctttttatctttctgtcaagttgattttcaacttctgccttacaaattttaaaatagtatagagcctcgtctttcgttttcaacaagtacacatagcaaaatctagtagcatcatcaatcaacgtcatgaaatatcgttttctacccttcgtcaacaccccattcatttcatagagatctgagtgtaggagttctagaggtgccaagtttctctcctcagcagccttgtgaggcttgcgaggttgctttgattgcacacaactatggcacttagaacctttgacaatggaaaacttaggaattaaacacatgctggaaagccgagacatcaagccaaaattaatatgacataaacgtgagtgccatacattagcctcatcatccacactgccacaaatatggttcacagacttattgcagaaatcagaaagggaaaagcggaacagacctccgcactcataacctttaccaataaaatatccatgttaaaacacgactactttattagactcaaaaaccaacttaaatccgtctctagtcagacgggagccactaacaagattcttgtcgatagaagggacatgctgcacattcttcagctgcacgatctttcccgaagtaaacttcagatctaccgtgccaacaccatgaacagaagcatgtgacccattccccattaggacggtggaaccccgtgcgacctgataagaagaaaacaatgagatgtcagcacaaacatgtacattggcccctgtatcaacccaccaattagtagactgattaactgaaaaaacagtaggtaaattaccatacccgcttccatctccagtgttgccaatggtcacattagcaaacttagaggtctgccctgcaggtgtcttcatccccttgcgttgtggacactttctggccagatggccaggttgaccacacacaaagcaactcctctcatcctgattaggattgttgttgttgttcttcttcttgaagttggtggtcttctaagctttgtatttccccttgctcttgtcctaggccttgtgcacaactttggcagtggactgcccaccatcgcccttagacgcggcatctttttcctgagctttctcctcaacatcaagagatgctatcaacccctcaaaggagtattcctgtctcttgtgtttgagtgcagtaccgaaatctctccaagatggaggtagtttcgcaataatacacccggccacaaatttgtcgggtaagacacacttaaggagttcgatttccttagccatggtttgtatctcatgagcctgttcgactacagaatggttgtcagacatcttgtagtcatgaaactgctccatgatatacagatcattgctagcatcagtagcaccgaatttagtattcagtgcatcccacaactccttagcgtcggtcatatacatatacacctcgaccagacaatcgccaagcacgctaagaatgcatcccacaaagagagtagtggcctcatcgaattctttctgctgatcagcattaagaacgcccataggcttgccagtactcacccagaagcatttcatagctgtcagccacagagtgaccctgatctgccatctcttaaagtgcacaccggtaaatttatctggcctcagtgcatcggcaaaaccagccatagtaaaatcacagtgcgtataataaggtttttggattgttgagaatatagacatataatgatttaatatattctataaataaatcatgacattacagatgtatactagcattaacgcatcattagatctacacatgtaaactaagcagtaaaacatgaacagatcaaatatgcgcaacatgtcgaacacgtaccgaggtggcggaaagaccgattgctcggcaggaactactcgcggttgcgagcgtcgacgaaggcgcgtagcacgcaagcggagaggaaggcgagccgtcgcggacgaacagggagcagtcgcgcgaagtgcttcccaaaaaccttattgccgccttctcccggtgcaagacgtcgaaggcagaggttccagagacctgctctcccgatcgcaggtgcacgacggcgagcgggatggagtagtctacgagtgacggcgcagcacagaggaggaggcaaaccctagattgatttcgtgtgttttgcgtgaaggcggcggctcggtttatatagagataggtcgcttgatcagggcgcccgcacgatctccactccgcacaaacgaaccggataagtcacgcgtaacttatccggactccacgccattttcacgcaccggatttttcggagtgtttccaaaacaaaacaaatccgaattttcctgcagcaaaacaaaactgcaaaaggaggctgcatctgcgcaagggtgaggagccaattttgcggaccattcgacgcgtacgtcgtgcacgcgcgccacctgccctgccaggctaggcgaggcgagcgagcgcgtgttccccctcttctctccaccacacatgcttcaagtggctaggagggcatcctcccttttaaggaggtccccctctcctagaataagcaaggtggtactaaactccacatgcatgccatcccatgaggtgggcttttgtgattttctaaagaattaatcttcgaatgggccttagcccatatattaattccaacagtgtgtgtgtgggcgcgcgctaggccccctttgattcaaaggaaattcatagaaattttagaggatttcattcctatagaaatttttcctatatagccctctgaatcaaaggaatagatcttatagaatcctatgaaattcctatggagtgcctaatgccatgcaagttttggaggaattttaacatgaggtagaaccttatggaaactttccttcgagtctttatctctcctctaattcctatgtttttcctgcggtccaatcaaacaataatttctatgtttttcctgtgttttgctatctctattttacacttacgttcctatcaaaatccaacgtttttcctattcctatgttttcttattcatgcgattcaagggggccctaccgaaaccctcctgccactaagagagtgtttgtgagtaggggaaaagaaaagattgagaagataagctagcgcataattaattgagtattaattcttttaaattttaaaaattaattgatatgagtttttaaagcaacttctctaaagtaatttttgcaaattaagcactatttaatagttcggaaaacgtgagcaggaaaaatgaggtaaatctcaatctactagaacgaacacaacctaaatattactcccataattaatcaatcaagattattttcattcttaatttacttaaaaaccttatacaattaataagtagggttaattgatgagtatgtacgtcttgctcagtatttttcaaagaaaggatatgtttgatagagctccaaataaaaaatggatatggagttgtgaagctaggaaaaggtcgtgatttacttttccatgtatttttcccagtagattcacctacaccgctctttaaaaatattaaaaatttaatggtgtttagtttggctttagcttcactagacaatgattcaggggatgggtcctgttaaatagcccgaaaacatccaaaacagaaaataatattgtcttaactacatagaagtaaggagtgaaatacatggccggtccttaaacttgtggggtggtgtcacttagatccgtgaacttgaaaattgcacgtttagttccgtgaacttagtttaatgaaccacacctggtccaatcatcctttgaccacgtttgaccgccaacgtggcatgccacataggcaacacttttgtgctcagccccctccacatatatcttcgtacataactttccctaatcagtgcatttcaacccaaatcccctaaaatatccctaaatcggctaaggtttcgacggtgaggttagtggaaggaggtcgagaggtagtggctgtggcggactcgacggtgagattagcggcaggaggcagcgtggtgcagcggggttagcggtggcacagtgcggtcggattagcggccggaggtagtgcaatgccgcttgcacactaggcatccccatggattctccaagctcgtccttgtcttgaagtcgtcggaagaaggtgttgttgaccaagtgcccgttgtgtaaggataatgtcattttggagcgcagagcaatggcaattgataatcaggaccacattttctatacatacaaggagaaaattgagagtgaagaacaatttaaggattttttttgggggggggggattttggtgtcactgaatagctacaaggagatatatgcgacgtgttgtgatgtggagggagttgagagcaaaagtgttgcctacgtggcatgccacgttggcggtcaaacatagtcaaaggatgtttcgaccggggtggtacattaaaccaagttcacggacctaaacgtgcaattttcaagtttacagacctaagtgacaccaccacacaagtttagggaccggccatgtattttactcgagaagtaagtgtaagtagtgttacgatccctttcggagccacaaatacctcatttcacgactcaaacgtttgtcctagaatgacattaattttaggtatgaggtctgcattcgccctctttgtgttatcctcatttctcttctcttagatagagaacacaccatcacctacctcaaaccgtcaggcgtaaacatcattaattagttagagcttaggcatgtcaaaaatctaggcgagcatatcaaagcacaggagaaccattaattcttaatgaaaggcatattcgcacattcgacccattctaatacgcattagactaacttaaaaaaaatcttttagaacgaagaaagtataggattgtaaagtataggatcgtataggatcgtaaagggttgaggtgaggggctcccccacttttcacaaccaatgcgggattattcaacaatctttccctttacacattagtgtctctcaacccttcaccgttttcctatggtccctcaggtatacaggtcccgcaggcacacggtccatcaggactttacacgtatgtccctcgagccagagatgttaaactagccaggctctgatacccattataggatcgtaaatggtctttctcaccctaaaaggtagcgaggggctcacccacttatatattgtcccttaatttttcacaaccaatatgaatctattcaacggagaccaaacagtactttgaaagtatgtagacgcatatactagaaattccgattttaataatcggtcgtctattagcaagggccccctggttttccccctcacgagcactgcacaatttcctgtagaaactatagcgatattgttgcaaacatatgtccagtaattcttttatcacaatgtatacagagctttactatcatttccatatatgtccgtagcagccatcatccctagattatatatatatatatatatcaaggaagatatatatataaagccatgttggtaaaaacaaaacaatgcaagatgcatacatatatttatggtggggatcgagtacatggcatggcactgttctaccatcatgtgtatgagacaacacgaaagtctgcagtgctaagttaataatgcatggccacaatctacacaccatgcgtacgtggggatcctttttgctaaaaatacaccatggggatcgactactgtttctacaggatcagaggacgtttttcatcttaatttttcaaaaataaaataaaatgaaaggatgtacaaggacaacttcgtctctatgcacacgcaacacgtactactattgagaaagtaattaacacttagcgctgtcggctcatttcatacgctagctagctagttagtgttttttttaaaaaaaaataatgtgaaagtcctgccatatccgctgcatcacaaatttaaagaatataatcccgacattattcatataacaatatattattaaagaaaatcctgttattaaatttgtatccatgattggcaaaaattgcatgaccattatctctaaataacggcatatatatcttacattctttgctagttcccttcacacctttgcaacacggcctagctagctagaaccgcaaaagaccaatatgcatggtcacctataaaaagtacttgcatatataatctaacataagatttatcaaaaacaaattcatttcgattttactgcaaacccccaacataatgcagatggcacaactaacaatactgacttcaaagctttaatttactgatctcgatcgcacaagcgtagtgagggcagtgatatgacgagtagccccgtactaatttcacattggatctgatgactaatactccgatccgtattagtttagttaagagagtggtggcttttcagtttaagccttcagtcttttaaaattaatttatttttctaagagaaatttttatttaacttctctgaccacaattatatagtacaacaatctaaaaagttttgggtgtcaggcatgcagcgcggccagcagctagctggcaaagtggcagagtttgatttgttaccactgatgactgatccgctcatgcatcatgcatgcatgcatatggagtatgtttgtttgtatatatatcatatcgatcctgaagagatctaccatatatctgacagatccaagcaatcatggatctcgatcgatcggtagatgcatgaacaacgacttccataagccaaacaacttgcgaagccgatcgatatatcattttgaaggactgtccacttgacttcattcacaatatatgttgagctatcttgtgttgattggcaggcagggacacaagctaggcaagcggatcgacctaggatgggctggaatttctttctttctatgagatggtccggcccaacaattaatccttccatctgctctgcataagtgggctggcttactatagtatagtgggactgaaaaaggaaaaagaaaaacgaaaaaattcgatccatagcaactaaacaacctggtaaaaaatatactcgcattaagtttcctgcttcaactagaagcatagaccaccggtttttcttcgatacgtagcactttcatcacattttaagctaacggtgttagattagagtaaagaaatttatcctcgaattattttacccttcgttttcctcttacatgaccaggtcatcgaccaagctgctatgccttgcatccctcgctctgtgcaccgtcgagcaagtagcagccgtcgtcaccccattgagtctctcagcccttgtgttgataggttgcacacgtcaagccagtcttttccgctaacgaccattctgctctacctttgcagccctcgctctatgcaccgtcgaccaagcagtcgctgttgtcacccgctgagcctctcagccctcgtgcatgttgataggttgcacacggtcaagctagtcattgccgctaatgaccaagccgtagcgccttgcagccctcgcgcaataagcaacccatgagcagtagtcgctgtgctttgctgtcacgctcggtcaagctacttgcaagctggcgctgcagttgtagccccaccgcgcctcacaagcagtagtcatcgttgtcaaccaagccgttagagattgatgccccgggagcggtgccaacggtttcgagcacgaaagcaccacccagaggcgagagggaggagctgaggtccatggggctgcaggtggagaccgatgataggggcgagagcatcggtgttggtgacgagggtcgtagatccagccgtctgtgtagacataaatgatagagaggaggtgtcgagattggcaggcggagacgtagctggcgagggcaaagaggacttggtggctaacatggaacttttggcgacggaggacgaggacgatatgtaacaccctcgtcacatttaccatttatacatgtaagttgggatgaaaagcaaaaaagactatttgctcttgcttctctctatatagcatcgtaacgagggtgttacatatcgaagaaaaactagtgacacttgctgccttctagcgaagaggggaggaatttttatgctatttttttttcttttttaccgactgttttgagagtgctaggggtgtgaaaaagaaaaggaggcgataaggttgggaaaggaggaggaaacggacgccacgtcacaagatgagagagagagagagagggtcgcatcacatcacatcacatgatgctgctggggctgcaactgaagtccacggcccccttgtgcaagaaagaggaaagaaaattccaaaattgcttcacgcacccccccacccacacaccacgcgtcctccaccgtccgatctccaccgcccacagcccacaccacggtgggaacgggaacgcggcctcccctattcggcgcagttgctatacgtaccccagcctcgtacacaacgccttccccctcccctcctctcctttcctctcgcccaccggaatcctcctcctccgcccctaggcaaggcaaggctaggattgccgcccgccggaatatctcccccaccgccgccgccctcccgccggcccacgggattggattcgcctctttacaaggcctatcctgccctctctactaccacccttatcgatctctatctggtttcctttacctttcgatttgattcaaccacatcgaaatcgattctatctctacccgcgacgcgatgaccacctcctaccggtactgcttgctaatcccgatcccaccttcctctctctcttgtgcgctccatctcttgttattttactactatcatcttcagggcttggcttcgattcgttctaggtttttcttttcttttcttttctttatatatactcttggtgttgttcttgtatggtccgaaatgatccatgttgattggggctctagactgcacaggcatatgcatccaatatcttcttctaggcacaattaatttaatttcttgtgtgactctaggatctaacctcgattggtggatgttaactgctagttccctgtgttgctagtatgttctcttcatccttcactcattacatgtcatctaaaaggtacatgtttcatgtttcggcggtttagggagcgttcttatactaaaaatcatcatacatgccctaataaaaattatatcttcccccccccccccattactgcacctattgtactgctggtgccataaataaaccaaatccgcattcatcacttgctaaacaaaccattgcaaactgagtttgatttactcaatgttatggatggtgcttatctaattggcataacaagctttgtgcgtcagggttcatcggtcatcatccagctactatattcacaactcgtgtgatggatgtgcttacgtgctttccagtgccatgggatcgtattgtggccttcatcttggtttctccaccaatgtccgtggggaggaaccatggccaacaatggaattatgttcttcttgttgctggagcaccgttatcttcttctcctattattttctgttgccgccttcttctgtgccaaccagccacaccagcagaagttgtgcttcgactgatggtggcgggaagcacaattaattgtgcccttcatttcagagcatgccgaaaaatctccttcccctcttcagatttatacttactgccaacaatgatgagtaccatacatgctaatcgtatagctcctttaatagcgagttactaacaaaggagtttaattttatgccctccatgggggcttatttttaaacgaattgattttatagttaacgttcgcatcactcaaccaggatgtatgctttaagaaatataacatgattgccatgtaaaacgcctgatgcactattatcatatttcttgatgagttgggtcctgaagaaacatttttttcagttaaaatagccatccatcaaactttttttttgttaaagaaaataaactatggctgacaagatttccatgttcttaattgctttcagtctggagtgctttctgatctctaagactagtgttctcgtaggctaggtggtcacagtagtttaacatgatgtccatctagtataacaggactcgtattttttttctataattgatgctaagatttatatatcttctcttatcttttgttttagttagtcaacattttagccttacaagcatagtttgtcgtatcctttttggaaaataaacggcctatacttttctgttgatatctgaggaggtgtatggcctgcgtcaaatttattcacctgtggtacaaaggttttagctagaatctcgtgggttggctatgaatgatatgtgcaagaatatataattgttccagacataaattaaatattgcctgtctcttgtactctttatatatacatctttatgccatctttattcctttttttttcctcttggtctcaggtgtatttcacttactcttttggatagcatggcttatatcggaactacctctatgctaacattgtctaggtctcattagctagattaacttaactgttttcacttagtggtgttagtctgtaaagaaaatgaatacccagtcttagttgagtcttttgtaaaaaaaaaaaatggaaccaaagaatgcaattgcactggatgaacatgtgctggattctactatccgcaagaggaagcgtgtgggtgctactcaatgtgctgaggccaatgacgcccccaacctctctcagaatggtccaaaacagaatctcgctttatttcctgattcgactggacataagaagtccaagatgatgtgctctgccgatgacattctggagaggtacaataacttcaagataagcgggatgcctgttcgtgtgatgtctcaccaacatggtggatggagagacttcccagaggatgttgtcaattcggtacagcagagcttccagttgaagaggccaattactagtgcagtattccagaacaggcacatcctgttggacttcatgcagatggtttgtttagattctgtgatggccataagcaagccaattgcttggatcgatgatcatggtaaatgcttctctccggattcatgtgctggagtaataccatctgaacctctgcagcatggaaaaaatgagttcttgaaaagttttcatgatctaagcagtagttatgaagctcatgaacatgatgggatgtctgcagctgaaagctcaagttcagcgtcttttgatgcagtgctttctgatgttcaggaggtcaataatgtagtggaggacaaacagaaggtactcaatgaaagtggtgaagtttctggggaaaataaaaagggccatttaagccatatgaatgaaactgctgatggggccatgcaagctcctcgtaataatcaaagtgtccagcgtgctgattcagctgttcggaatttgttgtttcaaggatcaggccatctatttactgaaaaagacatcatcggtatttatagaaccccaatgctagatcaacttgggaggtcccgttatagtcttttccagaaggaggtacaagtcacaaaaaatcaacggggaaatgcaaatgagcgttatgcatggcttgcttgcactaagggtactatggaggagatgatgatgaatggtgctttggaaatagcaaaacctctgcagggtccaatgtatggtgttggggctcatcttgctccagcaaactcctccaatatctggtaaataccttttgtttctgatttatttgttctatgtgctcttacgcctctggtgttactgcttttgttttggatgtatagtagcctatgtcttacttgaagtttgtccacagtgttggtttatctgatattgacgaaaatggaatcataaggatgatgttgtgccgtgttataatggggaatgttgaggtggttttccctggatcaaatcaatgccagccaaccagtgaaagttttgacagtggtgtggatgatctccaaaggccaaagcattacatcatatgggatgctaatgtgcataagcacatttatgctgaatatgctgttattatcaaagtaccttacatgaacaatggtactataccatgttttttcccctctcttttttaccttgtgtcgttattttccatttgccctagataacttattttatattactgtatgctatttggttacaggagatactgcatccaatatctctgagataagaaattctggtgcactagacaatccaaccaaggtatgcatattatggtttagctggtgtgctgttgttcactgaagcataattcagttctgtcatgtagtacgttttgcgggaaaattgaatttgtctcacctaggcttaatgatctattatgtagtgtagtggaaagggtgaatggatgcttagacttgaaggcgtgttttgtgcttctcgttatgggatttgctcactttattagcgaaatttccagttggcgtttaaataggttcccatttattactgtttccgcagttagtgttctttaacccgaaaaacataaagatgacaattactatatctctttatattttggttatggcctatggcagatccttattgaattccactcttgtatttcttgacttgatggtgatggaatttcatatttttcttcatttttgttgttgattagtaccttttaatgtctgatcatatatggtagtggtgtaggatgggggcgggaagatcaaagaactttgcttagttatgtgtttccttcttgctgatgctctttggatgtaaatgaaatttactgaaatggattcaggttctgttggcccaattcctctgcttttcataatttgcagaaactaatccggttgatttttctaaaagaaaaactggttcacaattgaatgattgataattggcacttaatgggcgagcttagttgaccttgattttgatgacagttttaggaaaaatttcatcttgttaatttgttgcttgcttgttgtgagcaggatgacagtctacagaccattgcgtcttcaggtgatgaacaacaagcatgtatgcttgggcgtgctccaagtccaaggtctcctagttcaccttggatgcccttttcaatgctttttgctgctatttccgctaaagtaccccgttcggacatggatctggtgcataaatattatgaagaattcaaggttatttgtccttcctttggagattttcagctacatgcaatatttgtttgctggcatgctaattatggtatggtttttgatgttaaaatagaggagaaagataagcaggcctgacctagtgaagcagctgagacagattgttggtgacaagcttttggtttctacagtagtgagacttcagcagaaggtacttcttttttactgtgctaactctttgtatacagttcacttaggatttgaagtcctccatcctcactcaatgtgaagcctgctgtgtatatttgaggaagcgtggtacatggaattatgcaatcagctaattgatttttttccccaaaggaccacatatcatgcttagtatgcagcatggaatccgtagcattgtttcataccgtctaatgtttgagtttaccatttactaatttccactatattattcaaacatatgtttttacttactattgatacctgccgcagttgccacccatggcagcaactgaacaagcgccaagagcacctggaaggggaggaggtgctagtccgtaattaaaaatgacagtttgccgacataacaagctgtggaggagtcgggttgagcaaagagagctcaaggaaatgtgtgtaaaacgtttgtgccgtaatgcacagactttagctcttgacaaacaaaactagtctaaacttccttgttgacaacatgttgtttggttgtataaccatgcatggtattctcgactaccggctgtagtgttgttctttttcgccgtcaaatgtagctgcggcttgaattcatcaatatctcctgtggatatttcgttcccgtttcttgcagcttgtgtacaccattgccttcattctgatcctggggtggcctcgcttgaacttagtaatgctaggtagtagttgcagcatgttccatgaaatggaagcaacaacttgagccttgatctaggtttacaaaaccgctcggttatcgtggttatcatatgtggtgagctttttagtttttgaaaccacgatatacctaccacgctgttgtcatggtaaccgtgaggtgaggtaatcttgtttggttaaccctagctagccttgatcatgtacctaccacagccttggtcatgcacctaccacgcaagcagaaatctttgacaaaaacttgtatgggctgatctgatgctacccacatccattgtttgcgttttggcttattagctgcaactagaatttaaattttaaaacttgattttaagttaatttaaggttttctttaacgcagtttatattctattagtattaggctttttagattatatacttagactattgaaacagattatttactataccattcgaaaaatacatattcttatttttttttactatttgttttgagttatttgttaagtttatatattaaaatatttaatttatctatacaatttagtagataatttacaactacaatctgatgaataatctgttttaaaccgagtcaaatcactaaggatattatataagagttttatgtataaattatttttagttgcttcgtttattttttctttgactttgtcagctgtaaaacaagcgttccagaagacagaaaattagttatatatatatatatatatataaaattcaaggctgttttatatactccctgtgtttcaaaataagtgtagttttgcactattcatattcaacattggaccgttcgttttatttaaaaaaaattataattagtatttttattgttattagatgataaaacataaataatattggtttcaataggactccttacgagcgttctttctatctactattatctaaaaatagtcaagttattaatgactagacgaaaccaaaaaataaccccttatgtacgaaattatagaagatcccctttaagatcaaacaattccatcgaattgagtatgactgtatgtgtgatagcatctactatatcaggaatatcaatgaaccccattcttgcaattgctcaggataccctcttttagctgctaggtctatttcttagttcaagatccctcttaataactggaataaaagaattagtagatctgttccgcccaaaatgggaatgggcgctagggttatgaacttataatcatggaatcgactcgatcatcagattataagttcattccataccggaccagaccgtgcacattcttattataagaagtggtcattcgagcctatggaaataggatactctgtttacatagaaatccccacgtccttacattctatttaggattaggaataggtgtaatcagacctgcttttgacatatctattctatccttatttgggtaccatatgcacctctttgggcttctattgaatcgagaaattggattgtatatctttttgattttgatacatataaggtgtcctacggataatgcaaatcgaagctatttgatgtctgactcaggcctatatgaccgatcgaaatactccaagactccacctttgtcatatattccatatatcacattagatagatatcatattcatggaatacgattcactttcaagatatcacattagatagatatcatattcatggaatatgattcactttcaagatgcattgatggtgaaatggtagacacgcgagactcaaaatctcgtgctaaagagcgtggaggttcgagtcctcttcaaggcataatacggagaatgccattcaatgagcattccccgtagaagtattccggaaatctgcgcctggcgctctcctctatcttctgaggtccttaaccacttccctgagaaaaggagacagtaaaagccaaaatagactaaatatagcctgaacgatcctaaaaatccctcgaaggagataatataataaagaacccaaagcagacggtatcctactgcaagggtggtcttaagaatccaaaagaggttgctcagaagagatagatgtatcccaacctctattgctctcgcgtaaagccttttttttacgcgagaggaaaaagtgactacgaattcccctttttgtttgcgaatccctgtttgtatcctttgagcgcacgcccataagtagcgatcaaggaaatcgatcaaacgatcccaataccgtgaaagagaaacttcccagatccagggaagcttatcataaagggcttcgacaaggggttctattcgttctttgagcaaaaagataaagatcggatagattcgaaccgcaattgcaaaggtaatcactactatgccagcctaaatcatgatcttcaccaacttggatttggttctctcgcgaaaatcgcgagttgcagatatgagaacctttatgtgtgactattttttttaattttttcataattttttcaaataaaacggacggttaaatgttggatacggatatccacggctgcacttattttagaacagaggtagtataattcaaagtttataaattatcacctgatcaaatgatatgtctgttaatggatagaaccgaacaaccagtccacatgcgcatccgcaaccaactaacaaaatgtgaattatatattctcaacttgagcatgtcaggggaatgtttttgtgctggagcacctagctagtactgtatataatttcggtgagctgatcaaatttagaggtggatttggctgaattattgaacatatatatttcgtcaaaaaacatataaatttatatcgatccttatatatatgcatatatgtaagtatgggacaacctagagcttacaatgctagtactagtctgcaggtatacctaaccctaaccaatcagctaatcaggtcgatggttgcaccgtcacatccgttattatacagccaccgtacgtacgtatgcaaactcctactacatgcctgcgcatgtgaaatgccagcatatatacactggcctctactactgtacgaccgtcaattgttgcctcagctgcattttataggtgtatgcatgtactgctgtacagggggtgtttaaatccagggtgtaaaatttagacgtgtcacatcgggtattatatagtatagagtgtcgtatgggttgttcggacactaataaaaaaactaattgcagaatctataagtaaatagcgagacgaatttattaagcataattaatccgtcattagtaaatgtttactgtagcaccacattatcaaatcatagagcaattaggcttaaaagattcaactcgtaaattagtcacaatctgtgtaattagttattttttagcctatatttaatactttatgtaggtgttcaaacattcgatttgatagggtataaaatttttgtggggaactaaacagggccatagtcatatatttatgctggcttctacttcctccttcaatttatatatcctctttacattgatgccatacatatgatctcttcatctgccgagccatttgaagtggatatacatattgacatggaataaataatttatatgctcgctcgccgagaaggaaactgaaacatatatttgttagttaatctgagccttggatgagcattaattcatacatgtataccgaaggaagaactacatgaaggaagagttgtgactaatatttatagactgaactaaccgcacatgcagcttaatgataaacaagcactagcttagctagctagctgcattacaatccgtgtatgattagtttgtttcatacatacatacacatataaatgaggggaaaaataaaatctgttcataattttgtcctctcattagaaggcttaattgctggctggttatttggctaacgaacccacatgccatatgaataagtggtttaatttttatctgattgcgcaggttgcaaccaaatgctcctagattaattatcaccaacagataaggtgaggccagcgggataaattaactacttgtgaggttgggtatgttgagtcttcagaagtcgttatattttgagataaaagttaaacttcagcggtatttaatttatattttggaacgggcgagtaattactttgtggatatatatgcttaagctaagttaatttgtagggtcgggcgtacgtggatggataagattataagagagggacctgagctgatgctgcagatgataggggccacgaaaatgaaatgtgatacatatatagcagaggggagagactatgtatctagctgcagcctgcaggtttatatcaacctagctctggagaagcagacagagagacagacatacaggcatcatccttgatcccatgttacacgggggtctctctgtccgaaacctgaatgtccttgcattgcgttgcattgcattggggccttctgaactactactctaattaatcatgtcgtccacatgcatgtgcttggctgaatgagcagctgcagcttgttaattagtactccagtttgctaacccggccgtcaacggatatgggagattattatcccttgccatgttcagacaacagatatgtttcgtagccgtgacatagaaactactagttcaaactgcagatatatatggataacaactctgaaatcgtaatcaatcgccttgcatggctgctatggcagtgggtcaatgcaagcaagaaagaaagattaattaacttgtatgtgtagtattcgcacagccgttccaaacaccacctaattagttgttaataattaataatgtactgaactatcaagcaaattaagctagttccatgagtgagtaggagtacgtcagtacgtggcccgtgacggtaggtaaggttccctttctttccttgtcaatcgatcaatctgctttcccttcctttcatccagggaattcaaggatccaagaatatgtacactttgctagcacttgcctttaatccatcagtccaactaattcatcacacagttcagttattagggaattatataagccaccaccacaaattaattggttcacaatatgtgtccagctaattaagatcaggtaccgctaattaagatcaggtacccaagtatagcatatgtttagtccaaattaaattaactagttcatgaggactacagcaagtaggtagcttaccaactctatgggtgaaattaaacatatgatctttttgtgtgttttgagtgttagttttcgactatcatgtctgcttgcatatatagatttttatcgatcaaattttgtgatgagcagagcagtcactgccgtgctagctaataactaacctgtgcgtagtgtgtatacgtattttctcataaatgatttgagatgaaaagaaaaagcagaggagaggagctagctaattaagcttgaattatatagataagtgcagtacacgtaagtacgtgacagggagcgatggagagacgaaagacggcgactgcacaacagatgaattgatggagtatgtatttaaaagcctcgctggcgatcgatcgattatattgactgaagagtaatctctgatggatcgatttttgaatcccaaaattaaacgatatgatatgatagagacatagcctgtatccaagttattcagttatacaactactaactcctgctgaacaaacctcatgaaaacttttaagccaaacaagtaattaatcatgcatctcatgagctcacaaatattatatgacgcaaccaaagctagcgtagctagctactcttgaagtggaggaaggaagaatatacatgtgcatatgtatgtatggtatgataaacttgactaattataccattggatcattgttaaccagaaatggtataaagaagacgcatatttttctttctcttgcgacggtgggcatgacagagacgcagcatatatagatggatggcatccgaccaactccaattggcgacgtcgtcttccttctctttccgcccgccacttcataccgccctctactcttgttgcttagctacctagctagctagctttcctctccactccatccacccacgcacctcaatcgatcgatcctccatggcggcggcggtgctggcggtgctgtgggcgtgcatgatgatgatgagcctagctccggcgagcttggcggcgtcggggttcgaggaggtgccgacgatcgcgttcgacgaggggttctcgccgctgttcggggaggacaacatggtgaagtcggccgacgggcgcacggtgagcatcaccctcaaccgctacaccggctccggcttcatctcctccgactactaccaccatggcttcttcagcgcctccatcaagctccccaaggaccacaccgccggcgtagtcgtcgccttctacgtacgtattactagcattcattctagctcggtgatcgatcaaaccatgcatgaattgatcacgatatatgtattgattgctggtgatgcatgcagctgtctaatggagatgtgttcgagaagacgcacgacgagctggacttcgagttcttgggcaacaggtacaggcacgagtggaagatgcagacgaacgtgtacggcaatggcagcacggaccgtgggcgggaggagaggtatctgatgccgttcgacccaaccgccgacgcccaccgcttctccatcctctggcactcccgcctcatcgtcttctacgtcgacggcgtccccatccgcgaggtcccgcgcaccgccgccatgggcgccgactacccctccaagcccatggcgctctacgtcaccatctgggacggctccacctgggccaccgacaacggcaagtacaaggtcaactacaagcgcgggcccttcaccgccgtcttctccgacctcgtcctccgcggctgcaccgcccgctccgacatccgcctcgccaccaccgccgacgaccaggacaggtgcgccgcggcggaggaggacctcatggagagcgacgagtactcctcgaccatggccatgacggcgaggaagcggatggcgatgcggcggttcaggcagcggcagatgctctacaccgtgtgctacgacaccaacaggtacccggagccgttcccggagtgcgacgtcaacatggcggagcggcagatgtactggcagtggggggagtccaaggtggttcgcccccgcgtccgaccacgacccggccgccgctccaagcgccgcccctcgccggaggccacggccatcccgccgcccgtgctcgtctccttgcagcaagctgactagtctttgattagaatattctattctatgatgaggctctagctccatcataattctttgattaattttgcttccttcacatgcgtacatcgatcatactgtaattagtaccccctgatgatagagattaatttattgttactgctgcttcttcacgacgaacagttataaccgtggtcttaattaaccattaactataaatctatcaataggtaatcctttgttggtttatcctatttgatgtcgatctggctatctgatcattggtacaagtatgttgttagttggattgatgcttaattagttagtgatggtgcgatgatggattgatgagaagaaagcagctgcatatacagaggtactccagttgcttatttggtcacaattgaattacgtgctactactaattaattgcggtggttaagtgtgcatgtgggagttgagagtgagccgcgcgcaggcagtctgcagtacgttcgatccaactcagatcagataatcgaaatgcgtacttgttgtggttgatgaatgatgatcgtattcgtatagatatagctaatatattccagccagctctgccctgtaaagttaagtagaggagataatgatgatgatgatgcaaattcatcccatcattattggcagtattaagctataattaggcagctgatgctgcaatgcataatgcttgttccaacttctccatccatcgtctgcatgcgctggtgctttgctgtcttccatttccacctccttttccctcaaccttttgtttttgtttggctctgcctcaggctcagctgggttggtattatgcgcaccgaaagcaagcattgcaagggcattgattcaattaaagacaactaattatacattaatccccaggaccgtgcatattattccatcgcttcccttcatcccaaatactacattacatatgtgttgtactatactataatgatgattccataatgataataatgttgataggtactctacatggggtttgtaatctctgtcccagcaggcaggcattccccttttgacaaaaatctgaaaccacttgcggtttaaagccccctttctctagtgtctagtctggaccctgcatatcgtccaatccatacacagattgataatccccgttaattttctcctaacacaatactaccacatagtatatttcttttctgtgcattccaaacagcccaaacaaacccctgtttgtagtctattctacctgccctcgttgtatgtgtgggggcgatgttcattccccccttttttcctctgcacgaaaatgttggctgggtcggcacctaataaacatcctttacgaaaaaaaaagagaaagagaaagagaaaaggaaaaagagagaaacgacgcgagtttatcttatcacaacagggtagacaataaaacaaagagcatgtgacgactgcttacattttcccgacataaagtacaccccctgtgacaaacaaatcaaactagcccagcatttcactaatcattcaatcatttttttaatgcagtatcaaacaaatactaatccacaacttttactacttaccaaaacattgacccacgcaaagctcttactcctaccaagtcaaaaaggaaataaaagcattgttgaaaacaaaggcacctcctgatgaattgcccatgctgcttttcccaatattataccaaaatgctggaaaatggactctaaaactatacagacaagaaaaatgcaaccaccatgattcaataacaatggcttctaatgctaccaggtcagtgcacagatgaacggcttgtaccacttaaacatgacattatcagttgcaagaaatgcttcaatcttatcttgtgcaagaggaaaaatacagcagaataaatgcaaatgtgttttcaaataacactggtgaaaaggacttcgattgattcaacctgtcttattaagcatatcatataagttgctgagttcagtgaagttatgagaagtgccctcactttcccgttcggctacaccggcaggaatcaatcaatgccagaatctgaaacagtcaaagttacttaattttggaatcaatacagtgtggcagactgccagtactaccagaagttagttgcaatcagatagagcaggcaagaacaaaaaaaaaaagctatcagtagctacaacacaaagtagctatcatacagatttgacaagttaccattgatcaattcttacgcctgccaaacctagatacaagcaggtaaacccctcgggtaaaccgtgtttcataggtggaagattagtatcctcccacatatagggtgacgtttcagtattgtttcagcaaaatgatagaacataacatagacataagggtaggtgatgatgtgggagtttattaccgagatcccagggtaccttgacaaatggtggctaagtatgtcctattgtacctcatcatcctgtatggtgtgatgacaggaggcccatctgttctgtaaggttagccatgttttcagctttggtccatccattcccctgttgtgtttccttttggtctagtacacctgaatcgacttcatcattatcaacagatagagggctagccaccaggaactgttcccagaaagaatcaatgatagcaggaagtttctgggtgtcatcgttgtacaaaatctcatcagtctcaatgggaacactatcatcaccttcttcaggcaaagagaatacaccctcaggaccaggcatttcaaagccccctccaggaatatcaacattttcttcagctactatatcttgcaaatctgggaattccagaatattgatatcagttgggcctggagccacagccttcggaacagaaggcaccgcactcatgtttggaacttctttgggtatgccgttgtccaaaacaactgggcactgaatctgaggagtcgaagttgaacaaatagctgaaagtccagagcttgtagctacatatggcaaacctgagttagctgggacctctgcaagggtaacaccagaattccgagttgatgaagagctgtcaagaccttgaccatttggcatataattctcaagaaggaaattatctgaattgcccatggattcaaatctatgtgaagaatctagctttaggatcttccttagcatcgctttggctgcttcattgatcataggttgatattttactatttgtccatccaatgaagcactttcagagtccaacgaaccatcctgctttggtagcctcctctttttgttactagcaactattcttcttctgctgttttcgttttgctgtacaaattgtgctaggaagccaggactatgcattgccttagccaggaaagacatcatttgttgttgccgttgctccattccttgaagacgcttgcccaaagtctgcagctgatgatctgttgtctgctgttgttgtctcagcctgacaagttcctgcattaaaacatttttatcccttttgagcatctcaatctcttcttccatcccaaacttccccacttctacgcaagcaggtacaggagcagctggcaactgaggctgctgaacttggttgtttccatgagttggtttccttctgttgatggtcttcagtagatgcttttgtcctctaagaaaaccttcgtttgcaaactcccacctatctggatcaactttcctaaatccctgctcataagtgcaccaatgagatcgttagaggccggctaacgtacatggcacagtgtatctgcccggtacaagtacttctgactgagtgttatatgattacagaagtagtaatatcattagaagggctaatgtaaatagcacagtttatctgttcggcttaagtgattctgagtgtattagcaggatcaagaaaagatgaaccaaagaaaaaacagacaagacaaccagtacaaactgtccatgattcacttaaaactgtttgtagttcacaaggaaacagctgattggccacattagggaagaaaactaccacaggatgcacaagcagtactggtgtaatagatatatttgcaaatgccataaaggccccagccaactgaataggaccaataaattgctagttgcaaaagcacatatcaaccgtgtgtttgttaattcagcttgagaaaaacttatatcggcaagaagaaagttatctatcttgcctggtaataaagttctaaaagatcagactcaaatctcatataggctcattaatccattaaggtgtagttacttctggttcaacaatcatcagaaaggtgcaaactacaaacgatctcataaaaaccgtctacctgaaatagacagtccttcacaggaggtatcacagatggtgattttgaagcagtggtagttgcacaattgatgacaaaacaagaatacctatatctatatgtgcgtgaaactatgagctttcggttagcatttaaacctgcttcgcgtgaggatgctttgttctctgtgtaacttgttcattcttgtttaaagaagacgtgaacaagtaagatgtacatactcaaaaaaaccaactttttcattcttgttaaaagaaggcatgaggaattaagatgtgcatactgtaattgttcaagagagacagtcaagcctctgcagaagtgccatagatgttggctcattaaatatatacgctgtagtttggggacgaaacctcaaaattttggactgaataactatgaataaaggtacgatggcctaacaaaaccataagatgtatcaagtgctgtagaattaaagatggtctaaaagtgtgctggattagagttatgaatccccctaggtgacatccagatctacggtgccccaaaaggggaaagtattaaagccggtcgatatgtgtgtcaccaaagaatggaatccggagt

SEQ ID NO: 7214 - DNA, 108592 bp, Oryza sativa
acgcaggggacggcacggaggcggcctgcatggcggccggcgcggcagacgcgggggaccacacggcggcgagcggtgggcggccggcgcgagcggcgcgggaggccgcgcggaggacggacggctgcggtgggcggccgctcggcggcaaccggcgcggcgctggccggccggcgtggaggggaggaggggaggcggcagtggccgccggccggattttttttctttttttttgagatgtgaatctgtgatgtatttttgtgtgagatgtgaatctgtgatgaattttttagaaccctgtgatgtaatttttttaagagttggtaatgtatttggagatgatttgtttgaggatttggagatgttctgtaatatgtgatgatttggatatgggaggggatggtgtgaaatcaatattcaatattaaaagcagaaaaaaaaagaaaaaatatctttagtcccggttggtgttatcaaccgggactaaagatgctcccatctttagtcccggttggtaaagattgatttttagtcccggttatttgaaccgggactaaagatagcgatctttagtcccggattcgtagtccccaaccgggactacaggggggttacgaaacgggactaaaaagcatttctccaccagtgatatacagatccagcggtatcaatctgtggataccagcaaagactgcatgtattgctagtttttctttaaaaaaaataaaatatgcagacgtgtgtacgtgcagtcagcgtagtggacacagcagttgaacttaattagctaatgacagcaaaataaatttgtgccatcatgttggttaattaatcgcaggtccaattaactaaggcaaaagtcatcgtctcatcgatagatcgagtagtttaagtaggtagcagatggaccgaacaaacaagtagcatcgcagatgaaacctaacaagttgagcaaatggtagatgaacatatgaatgaccaatgattcgtggcacttcgcagcagcgactacatcactacaagattctctaaaaccggcggaatcaatggatcctagctaagctactaccaccagtacacatagtactacagtactagtaaccaaattaagtagcagcactgtgcagcatttagttattgctatgctaatctaagtgcgaaccttctctgcaagtaaactgaggaactgttcatatatatgatgcagcaacgccacgtagcagttgctgtcacgtcatacaacgcatcgatcactaattgacaggttagctgaaatacaaatactgttgcagaaaaggccagcgactggtttgctacttccagacttccagtatgtgcctggtcagtctgctgtttaatttaattgcccgcagatcacgttgaacagagagatacctgaattaagcagctcaatgccttgcagtagtttagtgcagttaggaaatccatgaattagcatctgttgaagtggaggataattagagcattttcaaggaggaggagtttgagacgtaaatggtattgcactttattcggtaagctgctgtactcactcactgtagtatgagcagtgccatggatccagcagcagttggcatatctgaatataatagataatacgtttctaaacatttctgatgattgatactacagattatgaggtgcatgtgtacatggcagcatgcccggtccgtccgggaaattaagcagcaacgctcacctcaatatgtaaccatggagcactagttagttgatgaattctccatgtattgccaagaacatatatacatactcatggagtacatacatttcggtggcgatcgagtagtcaaagcgagagatccgtcacccacgccaactcatgttcgtcgccatgtgcgcccatcctcccggcactaactctcaagccgatcgaatttgatcagtagcttaattatactttagtactaccacacccatgcattgctcagctcgatcatcagttcgcacatatcaaaattaaacactagctagtagctagctagacagtttaccagctgaatatcatatagtagtacacactcatgcatactatacggttactacacctatttattattcttaaattcgaattttcgatccatacatacacaggtatctcctttgctacttgcagcgaagcttccaaagcatggactagtctaattctttagtgatcgagggtagtgatggcaccaatttggatgaatcggtcgagaatggagtatttctcgcgtcagttacagcagggagtacgtagtaacagcagctagtgctcgatcgaattcgtcgacttgtagtggagtagcagctatttcagggaaggaaacggcaaggcagctatcttcgtacgcctcgttaactgcaacccatcgattgccacatctacacctacgtatacaaatacacaaataaatactgcatacatacatgatacatacatacacggccgctgctgatagctcctactccctccagcccaaaataagtgcagccataagtttccgtgtccaactcatcttatttgaaatttttatgattagtataatactttctccgttttatattataaaattttttagtattgttcacattcatacatatgaatagtactttatatatgacttatgttttttattttttaaaaatgtttaaataaaataaattggacacagaaactcacgactgtatttattttggaacgaagttagcagtagtagcagcagcagtcgtcgtcttggtacagtgcgtacacgtctcgatctatattagtttagcactctgcccgctgcagagacttagctcgatcgatcaattcatctcatcgtccatggcgcccaaggtggcggtcacggaggcgacggggcggcaggcggcgtcgttcgtgctcggctgcgtggccacgctcaccgtcatgctgctcttccagtaccaggcgccgccggactacggccgcgccgccaggtcgccggtgcagttctccacctccagagaccagctgctgctgcactgcggcggcaatggaacggcgccgccgccgccggtgatcgcacgtggcggcgaggaggctaacatcaccggcaagcctccgacgactgctactgctgtcgccgaggagcagccgccaaccaagcctcctgcgacctctactgcatcttcaccaactcatcatattccagcaaccagtacagatcttgaagaagaggttagttctcattaatctcccggcttaattaattttcacttctttaatttcttatgcgtcatctggtatcagtaatctgctaaatttgtgccgtcttgaattcactctgttgcccacagtttcctcacatgttcaaaattaactcaacagtacaactcatcataataaaaacagggggttcttcaatttcagtaggacacaactaaccctttttgggtgtctgccaaatgcaccaagaaaatgattttgtaagatatatgctacatataaccacgaattcagaaatcattccatgagacttgatctactattttgacttcgaaaaagagataggctaatcaatttgttatatattaatctcgatccttgattacctttttgtacttgtttcgagtgtacgaaaagtggcaaagaaagtcctaggatcttacaccacctagtgattcacgctaatttgatcatcaatggcggcagggcggcgagttccgggggttggcggcggcggtggcgcgggcggcgacggatgaccggacggtgatcatcacgtgcgtgaaccacgcgttcgcggcgcccgactcgctcctggacatcttcctccagggcttccgcgtcggcgacggcacgccggagctcctccgccacgtcctcgtcgtcgccatggatcccaccgcgctcacccggtgccgcgccgtccacccccactgctacctctacaccatgcccggcctcgacgtcgacttcacctccgagaagttcttcgcctccaaggactacctcgagctcgtctggagcaagctcaagctccagcgccgaattctccagctcggctacaacttcctcttcacggtaattcagtaactgtaaattgaaattaacaccgccattgactgcaaatcaagatgaactgattaattaaccaattgcaagatcaggacgttgacattgtgtggctgaggaatccgttcaagcacgtggcggtgtacgcggacatggcgatctcgagcgacgtgttcttcggtgacccggacaacatcgacaacttcccaaacacgggcttcttctacgtgaagccgagcgcgaggacgatcgccatgaccaaggagtggcacgaggcgaggagctcgcacccggggctcaacgagcagccggtgttcaaccacatcaagaagaagctggtgaagaagctgaagctcaaggttcagtacctggacacggcctacatcggcggattctgcagctacggcaaggatctgagcaagatctgcaccatgcacgccaactgctgcatcggcctccaatccaagatcagtgatctcaagggtgttcttgctgactggaagaactacaccaggttgccaccctgggcaaagcccaatgccaggtggactgtgcctggtaaatgcatccattgattttgattgtcgatcgggcagtatctggtgttgtaggctacgtacagtcaggaagatagctttatttgcacatgaaagggcgaattttgttttttttggtttgttgtagattgatgggtcgatttcaagttatattactgtatacctgacggcagacaagtatacgcatgatgggcaaactatatgatatgatatgatatgatagtactttagatgtaaagatgtcatcatgtcttcagctatgattgaatgagaagtacatccatccaaagagagaggcaacaaaacaaaattcagaaagattatactatcccatctcaaaactgtctcgggggatcagtgcaagagccacatgcctcatgtttgtttcttcttttgattgattgatggtccaaacaagacattttcctctcgcggacaaattcttttgggccctcagagctaggatttttttggcccaataaatttgatgggcctgaaaaggatcggcctgttaggccctactactaacagtgcacggcgccgcttgaagatgtgcaagttgaaaatgtggccctttcccgtccttccaaatttcttttcagttttgttacccaaaagtattcaaacaccccagcatcactacataatacagtatatctctgagtggtcttcaacacaagtgctatctttcaaatgctaaacggtaaaagcaacgatgtaaagtaaaaccatgcaccactgagagctcatatacttatgcaagtgacttactttatgacactaataatccggcgtcaccaagatggagcggccggtaggagaaacttcaccgagctagctaggcgccgagacggaggcggtcgatcaatctgttgccgccgtcgccgcagttggacgagcggatcctgaaacaaaaacgaaaaagaaaccttgatttatataagggcggttggatcatattcatattcatgtacaccctcccttttaccaaacttgaaggatcactttttattgcatatattacgctttggatctttctaatcactgttttcactttagacgaaatatttttataactcttttaaccatatacatttaacttgtcatatgtcaaaaaaaaatgatcttacatacagctatgagagtgtttttcaaataagagctgacgtatccgagatcgtacatataccagaaggctcagatcatggcacgttgcctgcggcgtacatactaatctcagaacacaactttgtactgtcttctcgatcattacagacagcaaattgttcatctgaacacacagctacagagcagaaacccatgatggagctctccttgttattgttatggatctccctactattactagtagttgcttattatcacgtacggtgatgtgatgatctacatgaaggagcgcatgcgcgggcgcacgatggactgggcgccatccacgaatatggtgctgccagtcatgtaccgggactcgtccccaaccaggtacagcaccgtggacgccacgtccttctccgggtccagccatctccgcagcggcatcacctcccccgtcgccttctccgccttctccttccccacccacaccgggaacctgtcgcccaggtgcagcccacggcacaccgcgttcaccctcatcttgtgcttgcccagctccattgctgacagctgaagaacacaacaaacatttagtacctcttacagttatgagtgttatatttcgagatcaacatggatcgaatcaattgttaactgcaatgcaagtatcgtctacagagttatgctgattcaagcatgtttatgaagaaaagcataaatatggccagctgagatatttcttcagttcagaactgctggagttgtcagccggttattgtgcttgcccagctccattgctgacagctgaagaaacaacaaacgtttacctcttgatttgagtggtgctcgaattcaacacaaacagaatcagttgttgattgaaccggaagtgctgtttatggaggattggaggctcttttctcaagaacaacatatatttggccaggatccttttttcccagttcagaactatcagggtcgtctgttagttttcaactgaaacatactgccatctaaatgtatgcatttcttcatttcaagtgcattgcaagcttaacattttcaggctttgagcaaagcatagagaagtaaagcagcagctctcaatgatgaagggagaacaatggtactagtcagttggcagtacttgaacagaagacttacccggaccaattggtgaatggcacctaaacttgtaccatatgcagcagcaccaggatacaatcctctctcagcaccaataatctgagttaagaatacaacagaccctccacaactggattctgagtcccggagtcgctttgcaattgcctttactagaaaccaaggtgtcattacattcgctttcattgtcttcttgaactcatcttcgcttatattgaggcagtcttgtacttcacctgcccatttgggaaaaacaaacatttgtaaatgaaaacaaagcgccattttgctgaagtagggggttccagattgtgtcatatcgtggttaagtttgatcaccaggcatacagggtacaagcactaaccaattgatcctttcagttgtatcctattactgacaacaatatctatctgatactggttttgtgaactaaggcacttattaagaaagctacggagaatgcgacatgaagtacatataaaaatacaattcactttattgttgcagaaatttacagtgaaatttcaacagttcatagttgacagacagactgatccacccattgcccaaggcacattttctcgggtagtaatctatgaaagatcagatagggaattttctctaaaattaaaattaggtgagcactgggcagactgtttggattgagcttagagcatggcgaaatgttgtggttctcagctacgagtacacgaattgaagtcgaccggaggaattttcttttgaaatgcagaggaacaactaagaattagctctgcaggaacagcatacagaaattcagaagtagtgtacggaccctcgtaggagtagcagttcaccatggcgtctaggccgtcgaagcagcgccacgccgtgcccaccgccgcgtcgacggccgcctcgtcgcagccgtggagatccagccccaccacagcgaccgcatctcctccgcccccaccgcgccgcgcctcctccgccgtcccagccagggcgccctcgtcgccgaccaaaaccaatctacggcgggagaggacgaattagagagggagagtggagagcacggcgaggcaagaggtccgtacgtacgtaccggcagccatgggtggcgagggtggaggcgatcccccgggagacgtcgtcgccggcggcggtgagcagcacgcgcttggcgtaggcggcgtccccctcccccatcgactcgttcagcatcgttttctaccagacaaaaatggataaaatgctactccctccacctattttccgtacctaattttaattgtccgtcttatttaaattttttttaaaaaaaaattaaaaacataagtcacgcataaagtactatttatattttattatctcataacaataaaaatactactaattattaaaaaaatttaaataagatgaatgatcaaagttgagcacggaaacttatatacacttaaaatgaaatggaggaagcactactactagtctccagttttcttttcttttcttttttttttcttcaatacaacaacaaaataaattttaggagaaaggctgtggtaagaaagcacaccaactgacaatcaaacaaagcagtgaaaatagaaatgcggatttattctatctgcaacattatttttgacaagtacatactggagcatatggatagaacattactttcgacaattacagactcactggaccaagaggataatctattgtgtgctgagcagttctatctgcaatgcacaacaagaaggccatgccaactctcatgtagagtattttaacttaatgctaacacaggattccctagttcttcaggtataaatattagtacaacagagcatattttacacgattttatgggttccaagtacacaggattacaccagggcaaagatacagataattcaccaccttgggtcctctccagcaattcacacaactgcccatgttttccttctctatagagtacaactgccacttcaatttatttctctatatcccagaaaatgatttgatcatctaaaagtgcatagagagagaaggtgcagtggcaaccttctcacgaaggttgaacttccttgcaatacatggccggacatcttccaccccaaccaaactttgcaaaaatggaagtaatgttaggagttctctgtcattacgatcatcaaaccaactttcaatagggacgccgttgtctaattggaacccaaaggcctgaaagcaagatacagatgtattagcaactatacttttggttcgtctacttattactagtgctactaagattgcaaaactgacgtgacaaaaaaaggaggtaaatcgcagctaatagcatagaaatctcaatacaggctacaagaaactgaggctattccaaatgaatagaaacaaacttattagaatttcatttcaaagaaaaaggaatcaaattgcacccaaagtactattgctcgggtccaacagaaatttcactataaggcccaatgagcaatagccctttcttaagcactgctgtactaacagaaagtagaaattctataccatatccaactaagaatgttccacgactattactacagatgaagattttgaaacctgagaggctgagaatatagtgacaagtccagtggatagatttgctgtactgccaggagaagacagagaaactgactaatacaaacatcattgatcactgacccaaaaaaaaaaaaaactttattctttttcttcatcaagtccatgtctactattagaatgttgaattatgaattttaccctcgagctaacatatgtagccctatcacccaatatttacacattacaaattataatgctaaacaacgcaaagagactattgataactaggtttgctttaacatcccactactttgttagaaattatttttaaaacccatggaatgaaagatgtgtgttttcttaaaaaggaagaaatgtgtactccttccgtactcgtaaaggaagtcgtttaggacaatgtttaagtcaaaccttgggaatataaatcatgaataactctcaagttattgagtttcaaaatgtaaaaattatatgaatagattggtcttgaaaaatactttcataaaagtatacatatatcacttttcaataaatatttttatagaaataagaagtcaaagttgtgttttggagaccgtgtcgctgtcctaaacaacttactttacgagtacggagggagtacagttttagcacatacctgtggtgaattatcaacaatgaccacacgagccaagtcacgtccaagaactgatagatcctttaagtagtttccctccacaaagagacaggactcgcggtaaactcgatggcggaacaacctccttttaggatcaagaatattaagtagctgttctgcataaatactttgactagctgtgaaaatgatgatctcaaacatgcttgctactgtctccaagaactctttcagatatggacggcaacgcacatagattgtgtgctctctgagattaaaatgaactgggaatgtgaagtcagaatcttcacagggctcaagagtagagtgcaccagtgtctctgcatgacagcataacaataatggtacattaacattgactgcacaatataaagtacagaggttacatgtaatggctaacaccaaacaacaggacagactgtatatgatcaagtaaatgaacaaccggagatattgaagctaaacagaacaggaatgtgcacacatctcatagggtggatgttctctactccctccgtcccataaaaaacgaatctaggaccggatgtgacacatcctagtactacgaatctagacagaggtcacatccggtactaggttgtttttttatgggatggagggagtactcactaaaagctaagcaacatgctttacaattatatcataagtggaataataagcaagttacacgatcctaataacaatatgcaatccattttgacataaacttataactgtgcaaaatccaggtctcatgagctttaacatttccaagctaatcacagattattgactttggaagaaacataatcattaatgattccattaaaggagtttaccaagagtctatccaagttaaagtgtgcacaacattcacatcttaccatccagatcaaggacaagggtagttctaggacagctccgagtttgctttggaagaagaacaggttgaaacttgggaaccaccaaagataaatcaggcaaatcttttatgaaggcatacggatcaaaataatcaagctctacagtttcatcaggatcagcacacccatctgttgaggtagaatcttggctttgttcatcaatacactctagctttgagtgctgcattgcaagatatatagcagacacttcaggagaaaggctgcccaattcactgaattcatcaccttcgagcgtgcttccacatgccgattgcatatgaatatcataagagtgtttgctcaaaccatcaaaagtattgcatgatatgctattggtaacatattcagcattctgaacaggctcatgtatgacttcttcatgtactaagcctgcataatgacaatggcgtattggaaaatacaaactggagaagcaatgcagcaggtatcagtatgcacagagtgcatctaaatatgcaatgtacactatcatgaagtcatctaaaaaatgttgtttttcttattctctagataaatgcatgtgaaaaattcaaacacagatctgacacttggagtgcagaaaataaatgctaaggtggagttatattcaaaaggtaccttcgctcaagcagtcagtaacatcttccttctgattgtgaaaactgggagaaaatatggaatcacatgaacgatcttcatcattttcatgagattgctagcaatagaaaaagatcaaccagacaaataagtaaaggataaagcaacagtcaatttgaggttatttcagaaacaatattgctttcctcttttttcttttttcgcttttatcgaaacacaccgtatgttaaaatgtatgattacacaaatagacaacacctgaccagctaaaaaattcactttgagcagaaagaactttaccttgtgattgaagaaactgctacttggcacgcccgcgacatcatttccagtaccagcagaatcataaatagaattcaattttttcccacccctaagagctcgatttttcttcagaaggcctccacctgcagaggtagcaattcatatttggaacaaaatcaagaaaaatctatgtggagccacaaccaatttcaagaaaactaaagataaaggaaaattgaagaataatttcccaaataataccaagcataattgtagtagtggacaaaaaaaaggcacttaaacatcaggaataagcttggatataatgagcactgcagaacacaacaagtaggatgaaaagctctggaagttttcagtttactctcccatactcatagtttcatacattcctataaataggctatagctttgtactgtacataatagtaggggaaactttaccgatctgctttttggaggaagaagtgatcagatcattgactttatgttcagcagctgcagcctgagttgatctgcttgattttcggctatttgggggattgatatgctcagtggtggcatttcttgcaaggcctttttttcttgttggcattttcaatcaagaagtgtcctaaatagcagccgatttatataccagaacaagaatagcacatcagacaagcagacagcccgtttccttggtgaagactgctcagggttattgtgcaactttcagggtgctgacctagaggaagatgagaaaggaatcagctataagcagtacaagtcaacaaactgcatttcaattttcatacacgattgtttaaaatgatgatacacaaaagttggtataaaactacagaatacttcaggacgtcaaagattggaaaattaacttcatggaatgacatacaaactcactacatacactgaacttagctcttaggtacttcaatcaatatatgtcaaactctccccacagtcatcaaaaaacaggacgctactacggcatacacacttcagtcactcggtaggccactccgtacggcactcaccgtatcggcgttcgctactactacaggagtgacccctcagctcgcggcagcgacgaaatcgcgcatacggaagtcggaggaggcggtcgctggtcatcagcgccggcggaacccagcagcattaccggaaaatccaagcatgaaggtgtcgggagtcaaagaggcataccggaacaaggagagcagaggcggcggcgggcgggacgggaccagccggaggaggcggcggaaaccaaaccctagcggcggcggccggagaggaagcggacaggagaagagggatttttgaatcgtcgaagaggggagggagctccaaaagggcgagaaagtaagcgtgtcaggtgggccccacgtcagaatccagtaggtgtaggcgggccgcctggagcttggcccattaaggcccaatcaaataatacaggcccagtaagctgaaagaaccatgggctataaatagctagctggttttcggggaataaaactccgaaccccctcgacaggttcgggaagaacacgcgttcgtatctgcaacgcgaaataactcaacggctgcatatgcagagttgaatttgaacttatatatattacatgttaatacaacttcttatattttttaaaaaaaatcatatctatatttaagtaacatacggacacaagtaaatattccctccaggactcaaaatccacttcctatatataccaccagaagctagcaggaacgggaaggcaggtcggtcatacacgtaagataggacgagtatgagagagcgagagcaatagcaaagcccagtgatggcgacgctgctctccaagctcctagctctgcctcaacaatggcagctcctcctactcctcctcctcctcccaatcgcctccctcctgttggtaattggcaggaacaccggcggccgtcgtcgccggcggcatcttagactgcctccgggcccagcgcggctgccggtcctgggcaacctgctccagctgggcgcgctgccgcaccggagcctgcgggatctggcgcggcggcacgggccggtgatgatgctgcggctgggcgcggtgccggcggtggtggtgtcctcgccggaggcggcgcaggaggtgctgaggacgcacgacgccgactgctgcagccggccgtcctcgccggggccgatgcggctgtcgtacgggtacaaggacgtggcgttcgcgccgtacgacgcctacggccgcgcggcgcgccggctgttcgtcgccgagctcttcagcgcgccgcgcgtccaggccgcatggcgcgcgcgccaggaccaggtacagtacagtacaacgatagcctgcatcttgtttgtctccctactgtgtggtacacacaatttccatctaccaagtgggcaaaatttccacacatgtatgataggcctgcttggatggtgaggtgaaggagacattttcattgtacatgcccttgatgatgacatgttgataattggttggtggtaggctggtagctagctattacctccataccgaaataattatagttttaagtattaaggttcaagaagaaagatgtccttcattaaatggtgaatatgtgagattgtgagggtggttgagggtaaaattgagagcaatttaaatgagatatcattgatggaacaattagtactctagagtgacaactgttttgggataaattttaaatcctaaaaatgcaattattttgggatagatatagtactagctactccctatgtcccttagaaaaccaatttaaaatggcatgatatattttcttgtacataaatgtaaataagtttttatcttagatttattatataaaaaacttggatttttgtgggacgggggtacggaagaagataacgagtagcagattcgcgattttgtcttcgtctgtatgtttccacctattattggatatatggaaatctcgctagctgttggggggaagttgcatgcatttgacaaaatggaaagcatcggtgcaagtggatttgacaagtgaattactttatctatacattaaaattaataatctagaaggtgcttggttctcatctccagctttaataaacataaatatgattaaaatagtttagttgagatgttataagttaatgagagagaggagacaacaaatttgcaccttaatcagatcatgtaatgtacttacatgcttcctccattttttaatatacgaagttgtttacttttaacattatatttatcatccgtcttattaaaaaaaatatagatataatttattttcttatgattttttacatcaactaaattaaaatctcaactttatacttttacatatttatactaatttttaaattaatataaatgatcaaacgttatagtatctaattcgtattggttgatatatggaggattttgcaatctaatcaagtgcatatacattcatttactcatcacgtttcaaacatcaatcaaatagttatacagttcttaaataattgacaacatttaaatcaaaataaaagattcgatcataaatattactactccgtactaccataatttttattatagtgaaatctgtagggttttaccttagatgtgttgatgattgaaatatggcagtgatacaacgtatggcttggcacttggcaggtggagaagctgatcgggaagctgacacggccggagccggagccggtggagctgaacgatcacatcttcgccctgaccgacggcatcatcggcgcggtggcgttcggcagcatctacggcacggagcggttcgccggcggcggcaggaagcgcttccaccacctgctcgacgacgtcatggacatgctcgccagcttctccgccgaggacttcttccccaacgccgccgccgcccgcctcttcgaccacctcaccggcctcgtcgcccaccgcgagcgcgtcttccaacagctcgacgccttcttcgagatggtcatcgagcagcatcttgactctgacagcagcaacgccggcggcggcggcggcaacctcgtcggcgccctgatcggcctgtggaagcaggggaagcagtacggcgatcgccggttcaccagggagaacgtcaaggccatcatcttcgtaagcagcagcagcacacgtcgtcgtcgtcagctagtcaaatacacaaacacctgccacgcatggcgatcgtgacggcgatctttgcttgtaattgcaggacgcgttcatcggtgggatcgggacgagctcggtgacgatcctgtgggcgatggcggagctgatgcggtcgccgcgggtgatgcggaaggtgcaagccgagatcagggccaccgtcggcgaccgagatggcggcggcatggtgcagccggacgacctgccgaggctcgcctacctcaagatggtggtgaaggagacgctgcggctgcacccgccggcgacgctgctgatgccgcgggagacgatgcgcgacgtgaggatcggcgggtacgaggtggcggcgaggacgcgggtgatggtgaacgcgtgggcgatcgggagggacgcggcgaggtgggaggaggcggaggtgttcgacccggacaggttcgaggcgaagcgggtggagttcaacggcgggcacttcgagctcctgccgttcgggtcggggcggcggatctgccccggcatcgccatgggcgccgccaacgtggagttcacgctggccaacctgctgcactgcttcgactgggcgctgccggtggggatggcgccggaggagctgagcatggaggagtccggcggcctcgtgctccacaggaaggcgcccctcgtgctcgtgcccactagatacatacaactataggagtacaaatgaaatggaatttagctagtagcaaagccgcgacttcggccttgattagttcctaaattattttttttccaaaaacgtcacctccaatctttggatatatatatataaaatattaaatataaataaaataaaaaattaattgcacagtttgtatgaaaatcacgagacgaatcttttgaacctaactagtccatgattagccataagtgttacagtaacccatatgtactaatgatggattaattatgcttaataatttcatctcgtggttttcaggcgagttatgaaattagtttttcattcgtatccgaaaactccttccaatattcagtcaaacgtttattgttacaccctaaaattttctttttcgaactaaacaagcctttcatttcatgcctctctcccctacgttttgctgctttgctgttcaacatctacatacttattgctccttcacagatgtactcctacttcataaattaagattgggtgattagaatggattggtaatttgttgagatatgatgaactaatatctgcgtgtaataacaaagtttatgctccgtcatgtcctaattacttgaagaattagctgaggttgcgtgaatccccagcaagacgagaaggtgattccacaggaggcagattagactagagtggcctgtaaatgtgttttgccacagatggaggatggaacaagaatagtaggagactgacagagtgaatcatataattgagccctcatcaatccttagataggcagacctgtcgaaagtctactcgcctagtaggctcttcaaaagccggccataacgcatgccaggctcagctagtctgatgatctgctctttttatccgatactttttgccattcttcggaacatgtacagtcacgacggacctgaccagggtgatggcttgatctgatccttattgtaggtgatctgatacttatctcattcctccataccatgctatgctcttctttcacatgtaccatattcgatatgcccggtcacacgagagcaaattcattcatgtggctggggaatggaacccaagtggctgaggggtgtccatccatgggtcaacccaaataagcaagcaaatgtgacaaactcgttgagaaatttgcagagaagaatataaaatccaaatccccggatgccctccaaaaagctaaggtgcacagatacacatctcacattctcacatccagcaggccaatgatccgttgatcgccaccttttgcttgtcaagggccaaatattcttgttgtgccaaacacgctgcctccagccaaagtcagaagctccttccttataaatatatgcccaggcatgcaaccatcagtacacagccacaaatgcaagtgcagatgactgactagaagagaggtcttgcatggaagtaagaggccatcttcgatagccaaggatgatttgcctgtagccccattgtcatcagctctctccgtcgagagcgacaaccgggctctactggcaagtctcctcggctacccgagtacctcttatgctatcccatgtcagacctgctcttctttaccatcagtgatcatcaaaattcacaacaccaacaatgaggtaagcaatctaagtaacaaaacgtcccagtgattaccttggtggcgcttgtatgtaccaaaggcatcctctatggctacactgtattattctgcagttctgtcattgccaatctgccattgtggtactatcagccaccaccatgccacaaaaggttacacttcggctgaaaacacacgtcttgtttagatatttagtatttctggagttcctcccaaaaatatatgatctaagctttgaaaaaatatcaaggatgatttttatttagctttgcacactcaactcgtagcctttcctttttttcctttcaaaaacacaggcacacaatctgcccatataaaacagagcagcaccggagtacactgaaaattcttcaagtgcaagactataatattagggaaccacggtatttcttgggggtgacattcaaaaaactatggtttttggataaagggtcccactcactatcatttgaaatgtatcaatgtctctcaccctatcgttccaaccttcatgtcaggccgccatccagaatgtcttaaaccaggaggtattaaggataacctgtgaggaaggaagaattggctgagtacttcaaaagaaacctctactacctgaatctggtgccttaccaatgcgattcaacttttcaaccaaaaaataatctggcagtactaaaaaataactggtctacttatttctgtcaattacaagcccataaagtcttcttttacttcaaatatacatgccatccgtacttgctcagccccccatttccaccttttagccagttgacctcatcgttaacacaagttggagaaacattgcatggtagtactagattgtacatgatgtaaggaatatgtgcaagtctaaaacatgttctagcattgaaatataagcgatcagttaagggtacaaattaaatcattatgtgtatttgcaaaaaggttattacaaataaaaccagaatttccgcatgtttctgagaagatagtcaagttatatattagcacaaccaagatataaacaaattcaacacattgaaaattgtatttgcacgataattaacatgttgaaatcattgataaaaatgaaagttaataagccatgatgaactccctacatcagttgtctgcatgacatagaaatgataataggcaaacaaaagttgaagcatgtcgaaatgtcaatgacaagtacagtggaagagcggacaggcaaacaaggcaacaatgaactgacaaatataagcaacaattttaaagatgaatattaaataggacagaaggaacacgtagctattttttgctgattagatggatggaacccataaggaacatagcctggtactgtttcaattagttcaattatgatgatatcaatcacctgccttacttttcatatgaacaccttacgggcataaaacagcatttatgaaaatagttttcaatggctttcatgccataaagttctgtttaagcattctatatcagaccaacaacggatggagataaatgttgattgacttgaggacaaagttagataccagtttctatggacctgatgttgattttttttttgttgttgttggaaatcatttcaacaaagaatagtcttccccacttgatatggaataattcctcatggggatcatgtgttgacctttcatagccttttgcaaggttgaattttatgcattatttaacaatgaccttaaacagagctcaagaggtgaacaatgtatacatgtttcgaaacatatcatatttctcatgatttctggtaaaacgtatggtcaaaatagagaaactggtcctgagcaattttgagaatatatacctaccatggtcaggaaaagattcaaaggaaaaagtgcgctgatgtgccataaaggaaactatgaatagcatattgatttttatgaaatctgtgtggctgtcttgctgcatgtgcatacctactcctttgccgagtatgatttgcgcccttcctactcgaagctgtaatcctaccttacctttacaagaaaaaaattcatgtgtcctaataagaagctgtttgaatgttctcagcagctcttgcccctcactaagcctgtatgatgtacctcttactacactaccaaaaaactgtggtgccagccagaagtcatcgagaagaagcttgctaaggtagtcagctgacaacacaaaaccagtctaaacaacatgaagtaggttagctctgacaaccgaatttaaagttgcccaatagataagcaaatagccacatactaatgagtaatgaggctactaagtagtttccattttggattggtttcattctgtttactagttgaccacataatttacattttatcactacactgcaattattggctgctttctcaaaatagaggttcgcaacgatatcaaccagagtacttagcaactggcaattagcaacctccaatttcacaacacacaatgcataacacttctagatttcgtgtgcaacaaaggtgacctatagttctatatccaacataaatttgtaggttgactaaccaaacaatatagattaaggccttcagttgtgaccaaataaagaaaggcctcagtaggcatgtaggagtcatgaggcctctggttttacagaggcatagtctgctatatttagccttttatgtcgtgcactaatcaaaatcattatcatttcatgattatttctactgggtttgagagtacaatttgacaatccgtaagaacaccttttaaatcttgaaagcacagcacaaggatcagcataggaagtagtatatcaaaaccaagtaaacaatgatcacatttattacgagcaaatacagttgattcaccttattccattcattattcaaatttcgttcaaacaattcctttcgaactagcggagtagatggtcatcaaacctatatacacacttgggttgacaaatgccataaactagcagctttctatggaaatgaaacaaaaattgggggcaatagaagctaagagctcaccaactcaggaaacgctgtcgctcctctggagcttctggatggcggcatacaacttcctcctcgacccaacggcgccgatgcccatgtccttgagatcttccaacgttagcagcgggagcacctcgtcgtctacctcgtggatctcgaacactggcgcgtaccgagagagcccaagtccatccagccacgccttcacgccaccataccccatggacccagggagccggccgttcgggagaccccaatccgccacgccgtccgactcgtcgccgctggcgtcgcggctccccgaaaccctagccctggcagcggcggcggcggccgagtcggactggtcggcatcatcatagtaatgctccgcttcttcctcgtatccgtcggtgccgggagcagccgggatccaggcggtgcgcggccggcgctgagcgggcttctggccgcggcggtgggcggcggcggaggagtggttgagggggtcaagggcgtcctccgggtgggcgcggcggggcgggcgggggtgggaggaggaggaggttttgtggtggcggcgctgcgggagcgggacgtcggcggcggcggcggagtggacgccgatgtcgccgaggcggacgctggggcggcggcggcgcttggagtacggcggcccggcggcggcctgcgctccggaggcttccgcggcggggtccccgagcggcgcggcggcagcggcagcggcggcggcggcggcggcgctgccgccgttggtgtcaggctccggcgggtggagatcggccatgggggcgaggcgagatgcgtaatccgtgggggcgaagacgagtcgtgggagagaagagtggatgattcccttcaccaactgtggcgcccgcggcttcgggagactcgcgctcctctctctcctcgattgccgctgtggggaggcacgatgccgacacgtgtcggatcggacggtgaggatccccggttgggcgctcgatgaagtcgccgagcgttgactcggtagagtcggacgcaacactctctgaactccagcttagatgggcccaggcttcagtaacacgggttacggcccatgggctttttccttttacccctccatccatttcgtgctgtactcctgctcctcgagtctcaacaagcagttgcgaacttgcaattgcagctttgagctttggtaaatagtagtaataaagtttacagagttggtgaataatcatctatgcgtacttatgttattgatgatgaactacttgttgtctcctccaggaatgtgatgagcatgattgcatggagagtgtcaaactgctgagcaggctgcagcagcagcaccaataatccataggagtagccattagtgattagtgtttagtcgttgttgcaggtaggtaaattcgtccttggacctcaggtgtctccttcaaggctcgaccagttcacgtggtcctggccggcctgaaaaaaacaaacctgttgattttgattggattttgatatgatcagacgtcctgtacccggaactgggactcggaaaatctgggcgtcgttggtcattgccttgctgtttgggcgcaagagaatggatggatatttctgaaacaaacaacgggtgtgtgcaagagaatatctgaagatcactcgccttcctgtggccactagtaattcggtgctacagtttctcttcccatcgatcatatgcacagtgcatggaaatgacctcaatgcatgaatgatgccattggcacagaacactgtcgaaccaaaaacagtcgatccatccactgattgatctgggccaatgtacctttcaaccaaatctatcactctctaattgcctgtccttttctctcaaggctaaataaattataccgttgttttctcttttactagttggcatcagcatgaatcagtttatacattatattatatagaatacatgagtatctttcggcaccaggaatcgcagatgagcttcttacataaagcataagaccagtattgggtctttttgcccgtcagacaagtccactcttgcttcttgtatgcatgaagaatggaaaatactgcagctcagctggcatgttccaagcaggtcaggcctaacagtttgcacacgaattttgaccagaaataatccacaagtccagctccaaccagcatccagattcagatgacgcagttgcagaaaaaagatcgaattcaatatggaaggattcttttcagagtccacaatatgtacaagtgttctgtgttcacttgttcagtctcaaccattcataaagagatactaacagagttcaagttcttgttgcatacatcttccaagtgccaatagtttatttattcacgattcacggttgtctgttcactgttttgtcccttgattcttcttttatttgacgagtgcgccatggtgtaagcatgaatgcgttgcgtattcagagaaagtgaatctgaattttctgttgatcaagtaacaaagaggaagacaccatcacaccacgctctacttgctgggttcagagaaccatgaaactttcagagtgggagtagactcagaaatcaattcctttatatatttcgggcttgttcacattgatgccaaaaaaaaccttatcaaattttggtaaattttggcaatttgccaaaattttggcaggatttcttatatagttaccaaaatttggcaggaaactaaatatagccacttttttggcaactttaccaaaatttggtaaggttgaaaataacatcaaagtgaacaggcccttcagctaataaaactcctacgctgtatatattttttccaatgctatgaaactctgaagcttgagatgaatgttcagagaaaaagaaaatggcaagacggttataaagtgtgccttttgaaaagtttatctataaatccatttttgggtgaggggcagttgctaaagacggatctttgttggattctttttttaaccagctgacttgatttccactgagcattttgtcctcctatgagcacctcatgcatcaatattgcatgtttgcaccgttgcgattttttatttctctttattttgtttgcttaagccgatgcatgaaggatgcaatttgtcagtgaaaatcaggtaagaagaatttgacaatcgtatggccagaatttttcaaaagaagaagaagaagaagaagaagaagaagatttttatttcattatatccacagtgtatctattgttgttttgttgtcttcttccaattcaatcagtatcacataaaaccaaaaaaaaaagactgaaagtggcaggtttttagattttcgtttggtgcattcgtcgatagtatatatgggtatcatttcttcataaaaagatggaaacagtttattgtctgcaagtgatatgtgcttgtcagctttcctgctgattataacaaataacagttacattgttgggtgactgatcagcctgatctaccctgcaattcagcaatccacacaactctaaacatgaagaaaaacattggcactagtaacaagatcaccatagcataaggcccagtttagttcacaaatttttttctcaaaaacatcacatcaaatctttggacacatacatggagcatcaaatatagataaaaataaaaactaattagacagttagggaagaaatagcgagacgaatcttttgagtctaattagtctatgattagccataagtactatagtaacctgcatgtgttaatgatggattaattaggctcaaaatattagtctcacggtttccagacgagttatgaaattagttttttcattcatgtccaaaaacctcttccgacatccggttaaacatccgatacgacaccccaaaattttttcttttccccaattaaacatgccctaaattaactagaaaacatactcctgagatcgagcaagtatttactgaagccatgccaatgcttaaaaaaagatgtagccatgaatcatgccaaagaaaatgtagtactactaataagcttagatcaaaatcaactttagtttagtttctagagagaaaaataaaaaatggttaaccaatcatattcatggtggcaatgttggagtgggacgtaggaatcgcaagcagtgttcccatcgacatacagagacagccggtggattccaaaacaaaaccggcgcgaggtgaagaccccaccacacacgtcgcttccaggtgggccctcccatccgcccacccccactcgcgtcgcggcgtccccccgcccacctttcgctcgcccatttttctgcgtcccggcggcggtggggccccgcgtctcgatcgccgtcggagtttgatccacgccgtccactggccgcgtaaacccaacggcccgcctctccccgccgtccgtttcccctccccctatataaccccctcctccccactccaacctccaaccacccccttcgcctcgccgccacctccgcttcgatccttggaagaggtgaggagaggagagatctagaagcttcggtcggtgctgacatggcggtggcgctccggttcgcggccgtcgcgcgggactcgccggcggccgccgctccccccagggtggggagggagcagcagtatctcgcgtgcgcggcggcggcgaggccgggagggaggtgttcgaggaggaggggattggtggtgcggtgccagagcggggcggcggcggttgtcctcaacaaggacgacgcggcgtcggtggccgccgccgccgcctcctccgcgacggggttcaccgtcgccatgaagttcggcgggtcgtcggtggcgtcggcggagcggatgcgggaggtggccgatctcatactcagcttccccgaggagactcccgttgttgttctctccgccatggggaagaccaccaataacctcctcctggtaaccatttctagctctcgctgtgattgtgaaactgaaatgtatggatttttctaccgccattctgtgcttaactgtgagtggttgattggttgttcaggccggagagaaggctgtcagctgcggcgccccgaaggcgtctgaaattcccgagctcgcagttatcaaggagctccatgttaggtgcgtttcgtttttcatttttcgtcatttcaggttagtttcggagcattcactcctgattattcaatttttcttgctttgctcaggactattgatgagcttggattggatagatcgattgtttcaggtattgtccagtgcttctttcacaaaatcccccccccctccccccaaccaaccaacacacacacaaaaatcactggaagcttagtctgtctgaagcttcccattttcctttggttggcaaaaacctacactgcaaaatgtatattccaatcttgttgatgcattgatttccatcttttggcacatgtatagtcgtcaaaatattgcgatttcacagtcctggttggtgtaaggtttagaagaccttattattttaaaggccataagatggtctatcaaaactacaggtaattcagattagggcattgtcatccactaaaccacatatctgtttttattcagtataaactaaagaccaccctctgatgggattttttttttagctacacaaacagtcctcattactatacgaagaaatttgatttcagaagttagacaatatttgtggttgaggattgtcaataaacacaagaacaccaattttcctttaatgttgtatggtggtgacaagacttgaggtcgttatcatgcattttatgtcattttcagcagagtacctttctattctgtatgcaacaaggtgatcttgtgtatcctatagcttagtgcctccaccctagttggtttaactaaagtagcggtttctaaagtaatgttcatacttattctaacaatgctttgaattcatacaatggacacataatcatcgagcagtcttaaagtagatgaggcagcaattgacatggcaagtgcaggtgatatacatcacaaggaagaaaacacattgtaatgtttgttttgttccagtttctacatacaacaaccaaataatttaaatgcagcaagtatggaaaataaactccaattaccctatttagaatccccaatctaatgacaatgaaatggaacatgtggcttctctcatgatctaaacctgtcaggtttctctacttgttttatagcccaccatgttttaaacatgaaagattttagacagctgaaacatggtatgctgcatccttagttataaatcataataccattttaaactttcaccaatcattcttcagcatattatccattggtcatcaatttatttttggtcaatgtagcatttctcgtcccttttgtctttaatggaagtactttctttagcactgtaccatctataaaagcactgtatttatcactgttaatatcaacaggtttattggaagaattggaacaacttcttaagggtgttgctatgatgaaagaactaactcctaggacacgggattaccttgtttccttcggtgaatgcatgtctacaagaatatttgctgcatatttgaataaacttgggaaaaaggctcggcaggtacatgcttctagtaaatgtgttggtgcagtagtttaattgaaggcttgttgagtgctttgtttcaatttagcttctagatccttttcatgataatataattcaaatattctatctaaaaaagcaacatctggacctgtgaaaaaaatgagagaatattactaccgtagcaaattgactaggttataggaataaggtaatttgggggacttcattacatttatcccttgctcatttgatttatagagattgtacatggttattgctagtgcaatagcacaaactaagaaatttctttccttatcaatagagctgatcactttcctttaaactgccaactgaaacctgctaagaaaaaatggcgtgcgatcagtttatttataaaatatacatgagtaatccactaaaacatagttcttttcattttttcttgtttcatagttcttttcattttttcttgtttccttttaatttctcatattcatttcaccataggaacaatgctggtgttccatagtaagttgatcttattgtgcttctatatgtgtgtagtcttttttaatggattgttattataatgagtatattttaattgttatttggtacctttttgttccatcaacacctaaaagttcctaagcatgcagcgtttacatgaagtttcagtgcgagcagttattggtatatgatggtggtccaggttttagcttgacgctgtctcaactaaattttgcttgattgcagtatgatgcatttgatattggctttataactactgatgatttcacaaatgcggacattcttgaagcgacatatcctgctgttgcaaagaggttacagggtgattggattgacgaccctgctattcctatagttactggtttccttggaaaagtatgcattttcccattactcatgtttaaggccatcgcgcctattcttttgcatttatgatgctgcacttgaattagatttgttatatttgtgtttatgataatgcacatcaaattgcagggatggaaatcatgtgctgtcaccactttaggcagaggtggcagcgacttgactgctaccaccattggcaaagcgttgggattaagagagatccaggtttgtgttcctaagtttgtgataattacctgttgaaaatccacttgctcccagaactcattcaacacctttaagcttctatgtgtaaacacattttcttagatcattccttcagttttgtgttcgttctggttctgcaattgaggaagttggttagatgtttaaccatatcagctgaaaactacagatatgctttgtggtgtctctgaggttttaccggctgttataactctttttctttttaaatctctaacaggtatggaaggatgttgatggtgtgttgacatgtgatcctaatatttgtgcgaacgcgatacctgtaccctacttgacttttgaggaggcagctgaacttgcctactttggtgcacaggtattgtagagcttattaccatgtgttgatacaattatttgacactctcacggtgattgagatagcatggtcaactactgttgccctaacagaaatacgtttgccaattgttaggttttgcatccccaatcaatgagaccagccaaagaaggtgatataccagttagagttaagaattcatataaccgtcgagcacctggtactgttattactaaaacaagagatttgagcaaggttcggcatatgaatagattttgatacgtctgtttgtaaatacttcttgttaatttctgatttgtgtacattatttttcagagtatattaaccagcattgtattgaagtcaaacattactatgctggatatagtgagcacaaggatgcttggccagtatggttttctggcgaaggtattttaatatgctcattgctcttcctgtttattttgttgacttatgcatattagtaatttgttcatatttttatgctcttgtgcaggttttctcaatatttgaagatttaggtatctctgttgattgtgtggctaccagtgaagtcagtatatcattgacactagatccatcaaaactatggtgtcgtgaattgatccagcaggtgagtttgagacagatcacgtttcgatatacatgtgtgatgtgtcaaacattgggtttgggggtatgaataaaatattgtacaaaagcctgaagtttgaattgcttgcgaatagctgaatgtgtttcatttttagttttctttggctttgatgaatatagatacttggaacagtagatagcccacatctagaaacctgttagggcaatttaaacttaaaaagaacagataatggattcaagttgttctgcaggattagcactttgctgatacatcctgaaaatacgtactgcaccagctgttctcttaattcaatattcatttgttttcttgggatgatgtggcaggaacttgatcatgtagttgaagaacttgaaaaaattgcagttgttcatctactgcagcacaggtctatcatctcactgatagggaatgtacagagatcgtcattgattcttgagaaggttattatctcttagccaccgaaaactctggttggacatattgttgatgaacacgattacttgcaatcctgtatgctagggtgtacttttatttttgcagggcattgactggtttgttttttgcatctaatcatttacatttgttgctgtacgccaggctttcaatgttctacggagaaatggcgttaacgtccagatgatctcacaaggggcatccaaggtatccatctctcctccccagatgaacgaaattcttttgtgcaaatgaccaaagggtgtatgacaatactcactgtgcgtgatcaggtgaacatttcattggtggtccatgatagcgaggcgaaacagtgtatacaggcccttcattcagcattctttgagaacggtttcttgtcagaagttgaggaagaggatcttcaacacaatggctctcctgtgagcccaaatggtgtcatttacggaaactagtcgacttagcatttcctgctattgttgtatctttggaatttggataggtttaaaggtgattcaggcatatagtcatttaggccacctaggtgaaatggtgaattccctggtgttgtaagagccctacaaggagcaccctgtgttaatgataatcacgcatagcaggctcacttataatgttaagtttgctgcaataccagcggtgcgatcgtaaataacattgtttgttatcttttggaataaagaatgatccggtgttgaaacaattccctgaaaaaaacattgatatcaagtttaaaaaccctatcacagttgcggaagcaccagtgatgtgatagttgtatttgtatggtttcacttactaaggtttaaacgctagtgatcataaatatcacgcatataatcataaatattccacgcagacaaatatagtctcaatataggattttagtgagtctaggttgtgcattctaccgttagtgggccaaattataaaagttcaccggaggtcccatcaacttaacagcgagcagtaaattttgaattttcaattttcaatttagagttgattttggatttttttattgaagtttatttttttagcatttgtttttagatcactatgaagacgtgtataaaaattttatttataaatcatatttcgtttgtaaatacgatcgaggccgtatctttgagagtttgagttattttagagactgattgtgcgtctatgtgttaaaagcgaggctgagatgccacgtgtgagtactaaaacgcgagagttctactagtcgagtcgagtcgagcggcagcgcagcgcctccgcctcggcaagtcggcgacggttgcctggctgttccgcctccaccgcgagaggctacgtcggcgtcgctccgcgccaccaccaactcgcgaggccgcgacgccgtcgtcccgctcccgagctcgctccgcaagtacggcgacgacgcccgtggcgcgccgacttccatctccggccgccaactcgcgaggccgcgacgccgtcgtcccgctcccgagctcgctccgcaagtacggcgacgacgcccgtggcgcgccgacttccatctccggccaccgccaactcgcgaggccgcgacgccgtcgtcccgctcccgagctcgctccgcaagtacggcgacgacgcccgtggcgcgccgacttccatctccggccaccgccaactcgcgaggccgcgacgccgtcgtcccgctcccgagctcgctccgcaagtacggcgacgacgcccgtggcgcgccgacttccatctccggccaccaccaactcgcgaggccgcgacgccgtcgtcccgctcccgagctcgctccgcaagtacggcgacgacgcccgtggcgcgccgacttccatctccggccaccaccaactcgcgaggccgcgacgccgtcgtcccgctcccgcgtgctctcctccgcaagtcggcgacgacgcccctggtgcgtacctctcctctcctctccgcctcctctctgaccgctcctccgccttcacagcccgccgacgagcgccctccgccgtggcgccgcccctccctctcctctccgattcttcgatcgtgttttggtgttcggctgttggttgagaatttctgtgtacctcgaaaaaaaaattcggctcgcttggttgagcattttggaatttgctgctactcatttgattgtttcctgtccgatgatgctatggttttgttcgtgctactctctccgttgttgttttttttttttgtgtgtgtgtgtgtgtttcttcgtggttttccccttcgttgatgctagggtcgttcgtggtactcatctccgtcgattttgcgtttttttggtgctccgatgaggcgatgatgctagctagatattgtcgtgtgacgactgcgagtgcgagctgtcagtttttcgatcgcggtgttcttcttcttttcgcaaatggacttggtgcttttactgagctatcttgctcgaacatatttaatttcggaagtctttggatcgtttcgtggcaagattttggatgattgctgatcttgttgttagttttacgttcctgtctccaccacctctccaaggcgcttcatgcgcgtacatcgtcttctggcttctcttccgttcgtgctccgcctccgcccaaaaaccgccgtggccttggttcacagtttgcaagccgcggcgagtgccgacgctgacgcatcttctgcactgcgaccagctacccatttgattttgttgtttggttggttttttcgatgagttctcttcggttttgcgctatgcacgctcgcgatagaattccgccgaaaagacaccattcttggctacttgtggttttctgcgtctctcccgtgctccatcgaactcttgggttgtttttctttttttaacctattcgtattaaaggagagggaaacactatacaacagccgtgaggctaggagcttataaaattgaaaaaaagagagaaacagtacgtggttggggagggggcgaccactagaggagtagagggtgcgaaaagataaatttcttgattacggattattgattgtgctaccacgggtatctggcagtagggactggattaccttcgctccacttgcgcgccatagccatgtttcgtcaattgcccggttaatgattccttgcggtggctcttgggttggttttttgagctctcgtgacccaattccgtcgagaagacgctcaagatgccatgctcggcaactagtgattttctgagttgtattgcgctcgatcgagatgccatcctcggcaacttttctgtcgctcttgcgcttgatcaaactccgcaagacaacgccggagacgccatcatcggcaatagttaagctagcctattgtttgttgggctttgggttttttttagtgaaatatatggccggcccctaaacttgtgtgttagtgtcacttaaatccgtgaacttgaaattgcatgtttaggaccgtgaacttggtttaatgtaccaccccttgtccaaatgtcatttgactgtgtttgaccgccaacgtggcatgccacgtaggcaacacatttgttctcaaccccctccacatcacaacacgtcgcatatatctcctcgtagctatatagtgacaccagaatcccaaaaaaaaaatccttaaatcattcttccctctcattcttctccttgcgtgtacagaaaatgcacgccctattagcaattgacattgctctgcacttcaaaatgatcttatccttgcacaaggggcactgcacccaaccccgctgcactgcgctgccttctgccgctaatctcaccgccgaggccgccacagccgctacctctcggcctacttctgctaacctcaccgtagagaccctagttaatttagagatattttgggggatttgggttgaaatgcacgggtcagggcgagttatgtgtgaaggtatatgtggaggggtcgggggactgagtacaaaaatgttgcctatgtggcatgccacgttggtggtcaaacgtggtcaaagaacgattgaactgggggtggtacattaaaacaagtttacagcccacaagtttaaggaccggcaatatattttactctttttgtttgtactctcttgtttgtgagatttcattgcatttgtgatttttttttcagtttttctaattaaatttccaaatccaatgatttcttttacgcttttatgagatttcgttgcatttgtgtttctttttcagtttttctaatacattttcaaatatttgatccgtaggctaaagcataatgtcgtcgactcttaacaccctaataagaactttcctacgagggttctttagggaagtaaaagaggaagtcaaaaacaaccctgatattgttcgagaggtgtttgagaagaaatttctgatgagggaaagttgccactgccaagcgctgatgaggctcttcagctgcctgaggaggttattcagctgcctcccgaggtgcttgagcgaatttctaatgttcttaaggaaaccatccagactactccgatgtcagagaacattgagcttattactccttcagagatcaccactcttttagagagtaccctgctcaccactcctttacaaagaacttcatcaacaccaaatgactgcaacactatcatgcctatatctctatctgtgtactcaagtcagcacattcttggcttggtcaaagagattatgtccgatgtaaaattgagaccctatatcgttggagcagtctgcgttgtgggagtcatagtagcctatattctttacaagaaaagaacagctgctctcaacaatagaaatcccaatggaggggacgacattgctgatgatttttggggcaattggcatgatgggaacctggagatgtttgatgatagcaatgaccatggttcttcagacgatgaaggagccattcacgatattgttgccattcctggagaaggttttcaattcaatattattgctattactggaggagggttccaattccttgttgaggtatttggcagtgattcttcaaacgatgaaattcagaatgttgctattcctggaagagggttccaattccttgttcaggtatttatccctgaattattttcataatgagttttcagatcatgtactgaattaatcatttggagttagtgctatttctggcttcgtgaaagtatagccctctgtccatgcttattactatcttaattaatatctttaaaattacattgcttttactctcaggttgccatacagtcattaatatctttaaaattgcattgcttttactctcaggttgccataccagtcgcccccacattcaaggtgttcatggcattgacaaagtttgaagggttcactgcacccccttacagccctaacaatagcaagaaccttcccctaacagcagccctcctcaagtttattgatgcggtgaatcaaggctccttagtgccatcagtagtcttcctcaagtttattgatgcggtgaatcaaggctccttaaagccatcagtagtcttccccagttctcaaatttctggattcaatagatcaaggctccttaccaccagtaccagtcatcctgcagtgcatgaatccaatggatcaaggctcctttcactcagtgcttagaccccagaagctgcggcatgcaggatatatatagctaggacccgacctatttgtcattcaaaggagaggaaatgtagcatagatagatagcattgttggttcgagagttcatacatatttgccgatacttgctgatttgagtgaaaggacgagtgagagatttgaagatgggcttcaggtaactgccgagaaacaatctggcttgtctagtttcgatttgatgaaaacttctgttcctagcattccttcgtttaacccaaatcatgtcaatatcacttgcatgttattgcattaacctgctggtagtttttgaccgaggtgactgttgataatgctggtgctgtggtgtttccaagctattgcctgctccttaatttgcatcttcacagtacgcgttgacactcaaatgcgtaccatattttttcatgttgggggtgttgcgaattttgtgacatggaatcttctttggtagataattggcagctagattaggccctgtttagtttgcgaaaaaaaaatttagtgctacattatatgtttgaccggatgtcggaaagtattatcggacacgaataaaaaaactaatttcataactcgtctaaaaatcgcgagacgaatcttttgagcctaattaatactccctctgtctcaaaatataagcattttattcatagttaaaaatgattacattttgagacggagggagtatgtcattagcacatatgggttactgtaaaacttatggttaatcatgaactaattaggcacaaaagattcgtctcgtgatttcccccctaactgtgtaattatttttttaatttatatttaatgcttcgtacatgtgtctaaatattcgatttgatgtttttaggagaaaaaattaggaactaaaccaggccttagttctctgcttttgcccatggagtgcagggatcgatattcactcatagtcgaatttgtcctgaatagaagtctaatctgcaagtataatgtgagcttgccttttgaacgtgtcgagatctagtcactaattttcgtattggttacgtggttacgctcagcatcaaattttaacttttcaatgggacaatttattttcatgaattttgtagcatttgtcctaaatttcgtattggttaatggcggctctagttccagttcttcaggccaaaacatcagtagctattggagatggacagcgtacttctttttggcatgactcctggctcgactgcggtcccttaagtaccaaattcacagctctgtttactcatgcactagacaagcaagcctcagtctaccaagttctttcaacaaactcgcaagcctgttttgtcccaaggctgaaactcacagcttcatcagctccaagagctaattgcttccacttcgctaatcccctccctggatgaaagaaagattacgaatagtgctgcagggagtttactctcttctcgtatggtttatgaatcgtcattccaaagccaacctctctgtgcaaactggaagtttatctggaaaagtaaagctccaccgaagattcaattctttgcctggttacttgtgaaagaacggctcccgacaaaacaaaacctcctcaagaagaaaatcgtgacctcagatatttgtgagctttgtaacagtgaacaagaaacagccttccatttctgctttcgctgcatcattctggcagaaaatggggatccaggctgctattaactcgatgtcggagctcgctcaacttcagaagccccactgtctgccggcaaagcatttccaagttttcttcctactctgcttctagggattgtggaatcatcgtcatgatgtgatctttcgagggatgtcgatatctctcccacgcctagttgcaaagtgcttagaagatgctgctcattgggcagagcgtctgaagatagacgacaggattgtggtttccgtttggaaggaaatcatttcttcctcccttcgtatctctccccctatgtaaatgtaatctgtgtacttttccgccccttttaatgaaaattcaggtgaggagcccccccccctctgaacagtactacgtggttacgctcaattttaactttcaatgggacaatttattttcatgaattttgtaacatttgtcgactcgttttttcgtgtattcatttcagattgtctttgctcactccttgatttttgtgtattcatttaatatggtctttgttcactccttgatttttgtcaactactccattattattagcttagtagtaactactaatatactccccacgttatatataagtatttgacattcaaacaatattcggtcgaactttttgaaactttgactcttaagttaatttatgtgagaataaatttatgaaatctaatatgcaaccgtagcatatttacaacacaaaccaaattatatatttccttgaaaaaacatttaatagttagtattgaagatcattttttaaagaaaaagactgaatactattttaaatattaaatatttatggccgaactgagtatcttattatatgatcaaactaccgacacttttcatcatcatcatcatcattatgagatataaaactcaactcaatcggcatatcatatttactgttatatataagactttaaaaatatatccgtgtgttgcaacgggtaaatattattttaattttattattattattatacggtttagttagggtaaaattcattatacgaattcgcttggataatttttttaagaaaatcatgagctgtgattgagtacgtatttcatctctcaagttagcatacgagtttttttaaaagtgatttttatacgacttttttttatttccaaaagcaaacgggattaaaatcgaactcaaacacagatctatatttccgaaaacgaacgaacttaaaatcgactcggacacggatgatgtaacaaatagtatagatgagactcaaaccaaatgatgtaccaaatagtatagatgagactcaaaccaaatcgacaggcggtatgtaaatatagtaccatttactcctattagagcaagtttaatagtatagccaactactagctccaatttatttatagccaatctaatagctcatttatacaatagttgcatactacactattaatatctggtcccacatgtcatacacacactgtatcttggagtccgtgctacagctggctacaaatctgtagtccgctgaccttctctctcctcatttatctgcttaaaatatgtttgcagctggcttatagcctgctattgtagctactcttatatgaatggtctcttttgataataatgataaattaattaacctagtggctagtgctacctccgtgtattgatccaggggcgtgcatcgggtgagtcgatgacgtccagaatccagtagccgaggttacctcccagcccaacgcatccagcgtagaacaagacgccaaactttaacatctcagagcggctaagcgggaatctctcatacgcatgctccatgatatcccgtttaacgtagcatgttgtgatgatcacaccaatccatcccaactcaaacgtcactctagcaaacggatccgaatctcgatccccagctcgaggcataattaattaattaattaatatcctccgaaatcttaatcttaatcttaatttcctcgctctagatcttctcttgttgaagaggccgatcaatcgattcgagaacacctcacctggctgcatataaatatccatatatcgatttgcctatgttaggtgcatatctattataaagaataacactgaagggaatgtaaaagctgcatgtatgcgttctaattaatggcaaaatctcgtttaatttatctgccaatcatattttggggaaaaaagagcaaagaaacaaacatagatataatgtaaaaccaatcgatgacttgctgtacctacggcgagcgagcgagcgatcgatcgaacaaaccaataaaattattgggagctgggagaagaaattgcggcgcgtcgaggcgaggcgagatggactccgtgcgccgcccgcgcaagcgatagatgcagcttctattctagctagggtgtcaaaacgcaagcgtatactttgagatttatatttatacagggcgaatcgacttttgctgggccgtatcgggccggaatttcgctggagctgaccggttttcgcgagtttatctgtaaactcaggacatttatatttaaattttggtttatgaaatttattcggaatctatcaaattcgaattcaaacatctactagtcggaatatattctgaatacaaataaatttgtatttgaatctcagtcagaatatatctgtatttgtatatttgtatacaaatatattccaaatttgtatttaaatctaccagtcggaatatatttgtattcaaatttggtagatttcgaaaaaatttcataaactaatatttgaatataaatatcatgagtttaattaccaataatcaagcttgtgaaaaccggtcggtttttgcgaaattctgatcagatacgacccagcaaaagtcgattctctgtataaataaatctcaaagtatacgcttgcgttttgacaccctagctagaatagaagctgcatctatcgcttgcgcgggcggcggacggagtccatctcatctcgcctcgccgcgccgcaatttcctctcccagctcccaataatttattggtttgttcgatcgatcgatcgctcgctcgccgtaggtacagcaaatcatcgattggttttacatcacatctatgtttgtttctttgctctttttttcccccaaatatgattggcagattaattaaacgagattttgccattagaacgcatacatacatgcatgcagcttttatattcccttcagtgttattctttatactaatatatatgcacctaacataggcaaatcgatctatgtgtatatatatgcagccaggtgaggtgttctcgaatcgattgatcggcctcttcaacaagagaagatctagagcgaggaaattaagattaagattaagatttcggaggatattaattaattaattaattatgcctcgagctggggatcgagattcggatccgtttgctagagtgatttttgagttgggttggattggtgtcatgatcgcaacaggctacgttcaacgggatatcatggagaatgactatgagagagtatcgcttagccgctctgagttgttcaagcttggcaccttgtactacgctggatgcgctgggctgggaggtaacctcttctactggtttatggatgtcatcgactcacccggtgcccgcccctggatcaatacacggaggtagcactaggttgtatatatatattcaattaattatgcatcaaaagagaccattcatagcaattactaatgcatgagtagtattcacgtaccggcaccccctctcgattggtttcagggcctgtttggatcagggactaaattttacttcctccgtttacagtgtaagtcaatctagtatttttcatatttatattgatgctaatgaatctagacatatatacctatttagattcattagcatcaatatgaatgtgggaaatgctagaatgacttacattgtgaaacggagggagtagttcttatcacatcagaggtatacacacacaaaggaataaccaaattcacgtatatacaccgtaaggcacagagaagataatcacatgagaacagacagttgtacagggtaagacccctctctgatcagatacccagaggagatccatcaacatgtatatatatttatatctgatttgcaactacacatcgcaattactctagctagtacattctcattcctatgtataaactgagttactactcttactgacatgtgccggtatctgtgaaactaccatacatgtacatcaattgcatatacttccttggacgtacacgtactaaagctgctgtgctggtttcagccatcggtctcagtttgcatctcgagcttctgtatcaaggccttcttttcttcttcagggagggcgttgaacataaaaactgatttgtcaccaatgtcatcctgattcatgaggatgacattgatcatcaatattgtaatgttgtaagtgaggaacgaacatatgtactcggtagtaatgaagctagatgcggagcattttaatttggaggaatctgtaccttgatgggctgctggaattttcttgctgcgaatacagtgaagagaaccatccaaactcctaaaaggccggcttttgttccgttgtccattagaccagactgcacgaggtggtgacaagacaaatgtaagaaatgatgaatgagtgctctaaatctaatgcaccctggtgctgtaacttctctaggagtgaacaaggtgaaactaattataacatattgaatttgtaacaaaaataacagaggcttaatttaccaggtgtccaagaagaaggccagggataacaaaagttaaaataccagcttccagttttccatagcagagacctgtagaagcattctttgtcagagaatgaataattcgattcagttcaatgttcaagcaattcattcatgcaatccgcatccaacgaaaaatgaaaaaggccactaaattggtgctcattcttgttggaataaatgggctaggcccaatttaattcaattaaaatctcaagagcccacaagtaatgttagagagaataatactgccttgaaaatttaggtggaagaacctcaacttaaatagggtgatattagagattccctgttgaccggttgaagtgatggttggactgccacacgcatgcgcgcatgccgagtcggcctcggccgtgggcgtagcgaggcgaggcggccgaccgagccgagcctgcctgctgctcttacgttttgtaacagacgagaataaaatcaccattaacaaatgaaattcattgtgttgtaacctccacaacaaatgagagattcattgtgttgtaacatccacaacaaatgagagatttatttgttgtaaccttcacaacaaatgaaagattcattatgtggtaaccttcacaacaaatgagatttattttgtggtaaccttcacaacaaatgagatttatttgtgtggtaatggagatctctctctacatataacgcaaggcagaggctctcaaagtgtgtgtcttcctcctactattgttccttggcgatactctccttctgttcctgcgctgtctctctgtttctccggttctgttcatcccgcgcacacgggtgatcggaacgagcaagtgcctccgaaactccgtccgcttgagaacctgcacgggtaggcaggcgatcaagtttttgggtagcgcttcaagcgcgactgctttgcatcatcttcaccaacatgtcgacaaccgatgacaacaacaacaccggagacaaggagaaggagcctctcgtcaacaccaacgaaggcaatactgcctcaaactccagcggagggtcattttcggggtataacgtttcactattaccgttcgttcttcgtttcctacaactgtctgtcgcaatattattgcgatctcttatctatgttgatgcttattctatattaagcatgctcatgttatacacatctagcactgccactagatctactcaaattacaaatgtcatgtttattgtcttaaaattttagattaaaatatgccgaattatgaccaaatttccaacaattctaacactgaacacacacaagcactcagctagggaacaaatcagcagcgacaatgaactgaaattctccgattaaatctgttcagtataaacactagaactccttaattgtcgtaccaatttggtagtaataagcaatgtgtaattgcacggtaccttccttgaagacgaggcctgtgagcgccgcaaacgtagggccgacgaaccacagcgcagccgggtggtcgagaacgtagccgacgaggctctcgtcgagcggctgcgcgccggcgacgtacgtcccgatggacccgacgactccgaccacccacagcgcctggaggaaccgcttgatcggagtgacgtagatgtgaatcagcacgagcgaaagccccagccccgccgctccggtggcgtagaggaggtcggcgccttgcctgatggcgtcgccggcggcgttcccctcggggaggaacgcggccgaggcggcggccacgaaggacgcggcggcggtgaccagcccggaccgatacagcaagacctcgcgcacgtcggagtcctcgacggtccatgggccgtagacgccgttgtagacgttccggtcggcgacggcggcgagctgcctcgcggcggcggcgcggcggccgaggtaggcgaggggaagaggccgtccgactgcggtgggggtcagccccagcctggggtgcggccgtagaggcgcgacggcgaggcgcggcgagaggaggaggacggtagcggccatggcgtcgcggcgggatgataattttttgggggagattttttggtgggtggtggtttccggcgaggtgtcgagagctccggcctgtgacgaccgcaggctcgacggacggtgcagattcagtttcggcgtcgatccaacggcctctgatccggtagagtgccgccacgtggccgtcccggcccaactcattgggccgcacggagattgcaacccctttccggcccaataagtacaggccggcaggcctgccgtcagtcaaatccatggcgctcccatgttaatttccttctttcacgtaaaaaactaatctagtatcggagattcatagtgttataatatgttgtatcgggttttagattcgtcttttataggacggagagagtacaaaggagtaatgacaacttggaacgcatgaaacacttgcgacggttcgccgccggcagcaggtcaaccacggcaagtccggcgagcggggcatttaactatttgccacttttagatttgacgattaactatttgctacatctatctcaataacatgtggatctacatgtgtctataatatatgagtctaatggcaaatagttaattgccacgtctaaaagtggtatatagttcaatatctcccggcgagcaactagatcgaccactctcttcagtgtcagtttcatcacagtgattccggtcgaaaaatattaacggctgctggtggtaatgtttgcccaattccgtgggctgcctgtgtttccctgcatctgcatctgccgccgcgagcagtaactaattaaaagttactgtctgttctgatgccaggaccaccgtacctcgtctatgagacgtactatgactgtaattcatactgtttcaacatttggatgcattgcatgcatgcttaatttcaacatactattatataattaagtactccctccgtttaatataaggggattttaaatttttcttacaacgtttgaccattcatcttattcaaaatttttttgcaaatataaaaaacgaaaagttatatttaaagtgccgtagataataaagtaagtcacaaataaaataaataataatttcaaaaaaaaattgaataaaacgagtggttaaacgttgcaagtaaaaacttaaaatctcttatattatgggacggagggagtatatgttttgattgccaacaagatgcatgctttgatgcagacgaacttgcatttctcatcaacagtgatcattcatgatcagtactgttcagagccgtaattcaatgtatatagcacgcacgtacgtcctcgaattcgtagtgtcctcctgtcccgtatacatactagtaacatacattcacgtacaccgtacacgtgctacatacataccattaaattggatctcgagatgggtgtacatacatcatatcgatcttcatgcacgcgacgcgagagctatctaccggcggcgattggattcggtggcgccattaataaggggcgagacgagcttgagcttgccgccgtagtcctcggcgaggttggagtcgtcgatggcgtcgcggagcgtggcgtggaggtccttgtcggcgacgaagacgaacttcttcttggtgttgtcgtcgatgaaggggtagatgatcttccaggccgccatgaacacgtaggggacatggatcaagaacaccctccccagcctctccgggtagtagttctgcatgatctccagcgccgccacgtacgcgcggatgtcgcagttgccgtagtacccccacccctgcaggtcggccacggcggcgaacttctcctgcccgccattgccgccgaggcgggcgcaggtgcggtcgaggacgtagacgacgtagcgcttgaactcgtcgaggtcgcggcgcgccgggaagtggcgggcgccgaagccgtacaccagggggcgcccctgccggtcgtagccctgcatgtagagcttctcctgcgccagctcgccgcgcacctcctcgtcggcgatggcgcggccgccgggcttcacctcgcgcttccactgcaggtacttcaccagcatcgccgacgccttgccgatgttgtggtctctcgcgcgcaggaaccggcgcagctggtagtcgtcctcctcctacgtatacatatgcatcatcattgattcattgtcttgctactctctctgtgttttactatattattataagttattttattctttttataattaaattttttaagttttgatctataaaaaagttatagtatatttttaatataaattgaatatattatcaaaatatatttaatggtagtttcaatgaaactaattttaaatgttgcttaatcttttttatagatttggtcgaatttttttgaaaaatgatatataatataaaacggatggagtactaattaccaacaattaagttattaattactgtagctaggtaatgctgcctgctttgctgatggtcagctcgtgttagctactctaggctggtccagttcgatgtgtactggcgggagtagtattgaccaacatttatgaagggctttttgcacggcacgggtgacgcatcgcctcatgcttcacatcgccaaattaaataatggttgtgtgtagacgtccatgctactgttcatctttttaattatactacagtatttaatactgcctcactccactccacatatttacgcatgcagctggttagttgtgtccacgaccatctgggtagccctccaactaagaggatccgcaatggtaaagtaccgcaatggtaaagtaaggtgctatctataaaacatgtatatctcagcaatagactagattaatagtaaaccactttaatggtatgtctacatgagtatctatagctctctaatccattgtctcgtttttatgtatagaccatcttcaggttagtagatagctttgctctctcttcatttaatctcttacaagtaggaaaatatgctggtatgaatctcttgtagagagactatagataaccattgtgggtgtcctaagatggtgtctatagcattaactacattgtcacgtagaactttaaacttatgtggcactatattaattaaaagagagagcgaagagatgaagaaactgggtctcatgcaagacacggcttcaacatgagaacttatgtactagacactatcaagttttgcatagggagagaatagtgtctttataatagatgaagaataaatatgattggtactccctccggttttattttaattgacgttttggacaatgacacggtctacaagatatatctttgaccttatttttctactataatatatataataaataaatgcatgtttaattttattatagtgctttaaaagacaagtctatatatgttgttctagtttctttaaactaaatatttttaaatttattgatgatcaaagttataaaagtttgacctcaactttatccaaaacgtcaattaatatggaaccggagggagtagataagagagatggtgtatttattaatggcctactttaagaaaccatgagttgtagagtgtagtttttattgtgatgtcttattgacatggcaccatagacactgcttatggacaccatgggttgggagtacctcagtgtgccgttttctactgtatatattggacgtcctaataattaatattcccctaaatgacatttgtattggtaatcaataatcagcgtgtgatggtggtatagtaaactcagttgtcctaattggatggatcgatgtagcagatggttgattaggtggagtgtcgctgatgaatgaattcctccactactggattgtcatgacgagttgagagtgagatcaatgtgatggccatcgagatgtttctgctcaaccgctaactactttggcttagaccttcaactacctggagctggagatggatgggcaagccaccagtctcaaaccaccaaaactgcccagtcccctagtcctttcccatgtacgtacggtacaatacaattcacgctgcgccgaccagccaaattgcattatactgtaggagttatatatatatctgcgaccaaattatgttgtgtgtaaccacctgcagtacggcaaacaaacccagggtgtgtgtgttcttctgtttctcctcttccaacggtggagaaaactattttcttaattctgcagtgcagttcagggacggacgtgctagattcggtttttcatgttaggcgaatcccattttcgattcggtacggatagccagggtatctcctggttgatttcattcgttttttttataattcggtccctaaggtagtgtttggttgcaaggatgggatgggatgggatgggacgaacccacttttaggggtgtttggtttaggggtgggtgggatgggttggtccctggagaggaatattcctctcagatccgggaccaaccgatccgccaaaaactggcggacaaactcgtcccacctgagacgagcgacggcgtcaccgcgccatccaccaccttcgcgagctccgccgggcgcccacgagcgtcgccgcctggtccacacctgccgccacctccgcacgtccttctccgccgccgccgcctccttgagcgccgccgcctctgcctcgtccgcgaccgccgccgcctccatgagcgccgccgcttgcccgcgaccaccacctccgcgcgtccacgagcgccgcctcgcctccacggccgccgccgccgcctccacgagtgccgccgctcatccgcgaccgccacctccgctagcaccgccgccgctccactcagatccagccgccgcctcgcctccgcgcccggcgcctcctccgcttcgtccatgactgccgccacctccacgagcaccgtgaccgccatctccacaaactccgccacctctgcctcgtctacgaccgccgccgccaccttcgcaagcgccgccgccggtcctctcagatccgggcgccgccgagtgcctccgcccctagacggcactaacggtgagtacaaatccgtccatcccatcccacctcaatcccttctaccaaacaaaaaactataaccatcccataccataaaccaaacagacaactggaaccatcccatcccacaaaactaggataggtctgacctatcccacttcgtccccaaaccaaacactacttaagttaattactactctgtgatccggggtcgtcgctacatagttggaaattaaataaagagggaaaattacaaggaattaactgattgagcttcaagaaattaactactgctactcctaattgccttcgcgtttgtgttcttagttgattgcttcatagctagctcgtacctctagttgtccttccatccacaagaacataagaggaaaaaaacaacgaaggtgtgaactatctatctatcataccattggttcacatcatcatcacaaggccatggatggagggaaagctcctaagctaggtgagtcatacatgcgaagaagatgaactaattggggagaaggagaaggagataccttgcatgcagggtcctgggcttcgacgacggctctcagctcggccaccttcttccactccgtcacatcgccatcgtcgcggtgcccgtctcgctcctgctgcttgcagtaatccatggctgccttagctagctctcctctcctctcctcttgaattgctcttcaggcgatgataattcagaaatggaaatcgagagctgaagccctttttataggcagaggagaaacagcagcagctccaaaaggaagctaagctgacgatgcagagtcgctgacccccactatttatggttgcggtctaaccgtgtaccaaagctgctgtctcgcaaacacttgcatgacatataatcatatactattaccccctccgtccaaaaaagaacctaattggacggagtagtaccttctttgcacagaaataaagaacttttttttctgtataggtataacattggcatgttgctgctgctgcctaactaactaaatatgacaactcaagagattactgactgacgttaatgacgatgatggcgaagtctaacagagtgacagaggcaattttcttgcagaacataagtaggaggttggacggtccactcctccgttgtcgaaacaacgaaattaggacttgtttgagcagcagaagcaatcacctgaaagaaggtgttaagctctgttatttactctgttcgatgataaaaatggacatcttaacaacgttggcggcttatctccttcgttatctcctctctctctctctcccataaacggtaagactcattaatactgaccactggctgcagatacaatcatacaaatactagaactcttgttaatttcgtagttctgtttttgctagaagagagagagacagacagagagtttagggggaaaaaaaatcttaagctctactagtacagtagttgtacctatcagaacttgtggtagtaagcagtagcagagaagtagtgatgcgtacaggaaacggcgagcgtcaactacaaacagcaacagggacgttagccaactactcttggttttcagccatcagaaatactaccaaaatcatgatctggcagtcaagtcacgttattagactagtagcagtatccgtttacaacaaaatagtggtacgactaattattattttaaagattgactatgtatctattggcttcgttaatattaaaatatatcggcatagggcctatttagtttgaaaccaattcttaccctaccaaaatttggcactaccaaattggatagtattgaatttaaactattgttgataaaatttggtaacaaaccaaacatgcacttgctattattgaagttaccaaaattttggtagggcaataagttggtatcaaaccaaacaagcccatagtcttctgtagatgcttatatcagtaagatgtgtgttcatatggatgcatgtggagcattctaaacgtctgctttgctttgtcctgtctgtcttattggttgctcgtattctctaataaactatttattagaaaataaaaataatttatagataaaatttttatatatgtgttcaatgcagaaaaactatgtaaaaatatctttaatcaagttaaattttaagcctaaaaattaaaactttaactttattagggacgatggggctatgtgtatgtaaagaaaaaaaaaggaaatggcgagatgcatgggacgcaagaaggaattttcctcgtgccattttgatgcagagtagccaaatgctaaccaccacgtacccccgaattgaattgaattgtatctttcattgatttggccatgaatgctagcagctgccgagctttgtgccttaccgacgctgccccgggaaagtagtggctcgcacacacgcgcccatggcccattgggcccatgcctcgtacacgcccgtacgcgcctcctgtgtggctcacctcctgccacgacgccatccaaagcggcatgccaatatgatttctcttaaaagataacgaaaatgtattacatccagttctctgctttaagacacacagtcgattatagtttttattgaaataattaacaagagtggtgggataaaatccgagctattcttaagacataaaaacagctaacatgttacgtcacatataatgaaataagatatttttggcaactgattttaagagcgtattcactcctcctgtttgatatgatatgatatgatatgccacacttctgttgattgagtaatcactcaatagttaaataaaacataaaaaaacaaaataatgtcagtagagtaatgaatttgttgacaaatagagcgaagaatacaatattagatcagtatacacataagcaaccccccccccccccaaaaaaaaaaacaaaaaacaaaactaataaacatatatatcaaaatattcaaggaaaattttccaggagcccaacttcgtcctccaaccccatgcggtggttggagactctccagctcatgttataatttacaaaactagacaattagacaatgcgatagtgttatataaatttcggggttttatttgattcataccaatttatttctgcaaattcatgtcctattgaacctctagtagcctaccagtatgatcgatggtcctggctttatgagtaggggtggatctatctagtagacgtgcatctggatgggatggccttggcagacggcgagatctgtgtcgcctctctttgatctgattcagtctcagtaatcatcatgtttatttttacttacaccccgtggtccattgccagcgcattatctatcttcaattcaattcttccatcatccgtgctgcaatttctgcacaatgttatcgatcctactagtagctactagatcaatgtagaacacaacccagtcccacctcacctcaccttcccaggcaacttactctgcatctcctatgcttttactgtaaccacatagtgaaccatatttatttcacttcatccgtattatgagtacggttctaagaaacacatgatccaaatttattacacaaatgatatatggtccagattagtttcacctgtttgcacaaaactgtacatcccgcaaactcgcacagtgaatgttttgaatgtgatacttgagcacaatacagacagacgattagcagcatggtggccatactaattaaggtcttgggtctcaccagataatagtagaatacagctagcctctcagaattctctcctggggaagaagcccttatcatgcccagcaacaggttcagagatgagggcgttgtcgttggatgtttcagtctcatcacccttgccgaagcagtattcaggtgcctgccattctgcgtcctccagcacagcaccctcctcaaagctcatcacatggctagtcctccctatatagtagtagattgcaaaatgttagtactacaaaagtgatacacaattatacacataattataagcgtttggttctcatgactcatgacgaattcaggacaaacagacatctctgtggtaccaaatgcagtggaactgggagtgtggaaatactaacttatagtcacctaagagtatcttgctgtcttctttacctgttgggcagctcatcagcatgacaaacttaacggagactacaagttgtatcactttggcaaacctaaacaatgagtactattaactattaactgaagtgtacatgccggcaatacagaaggcatactctactttcaagggaagatgacacaggactggtgactaacgagaaattctttaattcttgaccagcaagaggcagcaatacctgcagacatggctcaaattggaacatttcccaggcatatatttgggtctgcatatttctatggctaggctcaaagttgcagagccgagatcgaacattggggaaataaaacttaatggccagatggccacagtttcatcacagagaagacatcacaacacttaaagataatattcccaaaagctacattgcacaatcatctataagaatttaacatgcgatgaaattgctgagaaagttttttggaaagtaaaattgggcagcatttcagaacataacgactagcgatcagtggaaaatggaagtaaagttcaaggggcatgggccctttcatcaaccattagtttgtgagtctgaaaccacaagcatactaagtagctagcctataggcactaaacaagtgatagatagtagaagttaagaactagaatgtttttgttcgaaatgcttccaatgaaggattgcactactgggtgaagcagatcccctatgatttcatcatacagctgtagtctccttgatggatacagttcatagtgttattgcctcttcccagcaaaaagaaaaaaaaaaacagttcataatgttaattgattacatactgtatatgcttcaagtgagctgtttatagcgctattcatcggtcctggttgaattgtatccatcaaaagtgtagcatcattttcaatttttcattcaaaaaaaatgcatcctcaacatactgaaacaatgtactaactactagcaacagatcaatatgcagcaattccctggatatatgaccaaagcataagaagggacatggactctgaatatttgcatcctcttgtgggctctaaccttaattctgaactatacaggtggtgcacatggatgagaagggatggaacaggaaattgccgcggaatagggttcaaaattaccggtgtagaagacccatttgacggggcgtttggtgagggtgtcctcgtagtaggtgatgaagtcggccttggcccagacgtggcagtcgaagccgtcggcggggtggcggccgaggtagacggagccagggacgagccagtttgggggcaggatgccgacgccgacggcggcggagcggcaggcgcggcgggccggggtgtagaagaaggaggtgccgttgttccactcgttgtcgtagaagggctcgtcggcggcgagctggtagcggatgacgtggaggttgcggccccccggccagtcgtaccacaggtccgccagcgacaggttgccgtggaactccatcaggagcttcgcgtggaactgggccggccatggcgtcggcgtcggcgtcggctccgatccgtcgccggcgacgacgaggaacaaggccgccgcgaggaggagaggggccgccgtcttctccatcttgtgcaagtggctgcgctgctgcgtgggagtgagatggcgtagtacggtttcgagggcttgagtgaaattgtgtgattttccaagggtgattatgcaaaaattcgtccatttttagtacggtttgggcccattaacaaatggactttgctttgtccaattgctacaaattgagcctactttcttttcgtttttgctgctttaacaagtagaaataggcccaagtggcagagttacctacctttgctaattttggactccaagcacacaattagtactcatccgcattgtgctaattcaggttattgagaggggaagaaagtggttatacgagatcgatggaggacgcagcagctaacggtcgctatacgatggaaatgagattgtaccggacatattgtgcatatatacaaaaagtataggagtatgttccagacgatggcaacttgacctctttaattcaaagctagcctcaaacgtacttaactattcatgctttgacgtcaaggcaagggtcgagtagtaagtaacacaggctcaaaaggcaggctatcttaagctacctatacgttttgagtgtagtatacgagccgatcgatcgatcgatcgaccactgtaccgcactgcacgcgccaaattgaaaatcggattagtggctcaaatcaaaaactaaagttagtctgaactttgtctagtgtgcaaaatcttttgacattaattaatcaattggtaggttttgtgcgttgtgtcttgtgtgatttccacacttggttgacgccgacgtcgttgtaaagtttgcacgcggcaactgggcgtggtctctgaacgaaccgtcaattcattcatggaatgaatttgatggaaacatatcccgactttgtgcagtctgtaattgtgctatgttagtgccacaaagtcgatatagcacaactacaaattgcacaaaatcgacatgggacgactgcagattgcacaaagttagaggagtttctttcgaatttgatatatggtccgtccaaaaaaaatcatgggattggcgcctgcctgaatccatggtgggtcgttggccaactcctccatttctcacggcgccggtcgccgccccggccctacttcccttcacgcctccactgacctcgccggccggccaccaccaccgcccgcgcgccacacctataaaacctcacctcctccacctccatggctcaccaccacgtacagcaaacaccaactcagctagctatactctactcatcttctctgccagctgctactacaccaaccagagctaatcaagtaacaatggcgggaagaggcagtgccatggcggcggttggtgtgctggtgctcctctgcgtgctcctccacggcgagatggccgagtcggcggtgttcaccgtcggcgaccgcggcgggtgggggatgggggcgggatcgtgggcgaacgggaagcggttcaaggccggcgacgtgctggtgttcaagtacgactcgtcggcgcacaacgtggtggcggtgaacgccgccgggtacaagggctgcaccgccgccccgcgcggcgccaaggtgtacaagtccggcaacgaccgcgtcaccctcgcccgcggcaccaactacttcatctgcaacttccccggccactgccaggccggcatgaagatcgccgtcaccgccgcctagttcttcttcttcctcgtcgtcgtcgtctccgtcgccggcatggcgccatgccgtccatctcaaccagctgcttattatatctatatacaaatgtttgtcgatcgtgtgtgttctaaccaccatcagctgatttataattctacgaatgaagaatacgatccaatgcatctatgcatgcatacacacatggatcaatatataatagttgtacacttctttgagtgacggatgttgtatccggtgaaatttatatacatataaatatgaataaaagccacattatgcaggttcttgaatcacaaatagtacgtttgagtttcaggtctgtttggcatagctacacctccacctctcctgaaactggagctcagccaaactgttttacctccatctaaaatggtagtggagctaggtgaagctctctcacaaagtaaacttgagaggtgaaactgggtttagtcagctccacaactccactccaaactcaactcatgaagttaaatttagaagttagagatctaccaaacgggctattcaggcatagaaattcggaataagttcatctgaggtcccttaactttacaccgaatccgattttcgtccttgagttcaccaccgagggatctcgtttgcaccaattttgacagttaaggactggctgatctggttttggggttaaaggacgaaaatcggattcggtataaagttaagagacatcagatgaacttattcctagaaattcccactcaaaacttccacacgaatacgaccgggccagttattgtagtacagtagtagacgagatggttgtgggccgggcccaaacctttgggccggcctgaccgttccatatatggaaaggcccaggaattcgtccacaaaaccctataatcctcgcaccccccaacacctctcttctcctgcgccgccgccgcctcctcctcctcccgcatctccctcctcgcctctcgctgccggccgcgcttcgccaaggtgagactccccgcctctcctccgactcattccacaacgcgtattcggcggccagcgaattggcttctttttttttatttcctttcccgacgcccgatgatggtttatcctagtgtggctgtgcgcttcgattcggatccatctgatctcttccggccgcattctggttgcccagatccatgccactttcctcgttcatgttaacgaggagattttcggttcgttttgcagatgaacaaggagaggcttatgaagatggccggcgccgtccgcaccggcgggaaaggcaccgtgcgcaggtgggtaaatcgcctttgtcgcgaaatgaaatgaatgtcttgttctttgcttctcgccgtgtcgcgaaatgaaacaaatgtgcttcattttgtttgttaggaagaagaaggccgtccacaagacggggaccactgacgacaagaggctgcagagcacgctcaagagagtaggtgtcaacaccatccccgcgatcgaggaggtcaacatcttcaaggatgatctcgtcatccagttcgtcaatcccaaaggtataagcatccctcctgttttgcctaccgtaccatggaaatgccaactgcttcttggtgttagattacttatccatgttcgatccgacctgtgcagtgcaagcttccatcgccgcaaacacatgggtggtcagtggctccccacagaccaagagtatgtgacttctccttgttacatttgatcagttcgttgtgcgagttcaattcttttaagattagcggctgttctgtttctcttatacactgctgagttgcagcaaccatcccatgtagagctctgtatgacatctgaataatcccatgttcgtctttagttttatctctgcacactctctaggagattttatgcattcagctgcaacattgtagggtttactatatatgttgattgtggggtggagtgaatattacgatgaacaaaactagcttttagcaagactcaaattgccttttgattactttatttcagtgattgtctgttattagggtgttatttttatcttcctgacttgtgatcactgtttgacttgtcagagcttcaagatgttcttcctgggatcattaaccaattgggtatgtcctcttcttggtttgctgttataaaaactacttttgacttatgcttctgcacttaatattcaattgatagttgtcttaattggtctgaattggcttgttttttctgttataagaactatgttatcagtctcatttcatagctgcatgactccaatttctctttcctgtcatgtatatattccagaaccatgttcacaaaatgtatattccaaacatgagctctttcgtatggagtatctcctagcctacccatcatgtaaatcagcgatgaagctatgcaaacattagtgtttatctatttttgatctccataaaatgtaactcttattttttttctggttttcttgctttgtttccattgccaattatctgttggttgccatcagcctttattcctgctcatcactggacttgtctgattattgtcaaactcattcagtttatctgcagtttgtccagttactgacagtcaaatctttcttgtaggtcctgacaacatggagcacctaaagaggattgctgaagagatgcagaagcaggtagctgctgcaggtgccactgcccaggcaaaggaagagaacgatgatgatgttccagagcttgttccgggagagaatttcgaagaggtagctcaggagacaaaagcctgatcatagataccacaagtagtgaaatgttacttgaccgctgttctgaggtcatggttttctatgacggccctgttttgcttctcctcgtaggccaatctttgtatttgcaattggaaacttttagtttctccgagtttttacctaagttatgaatgctgagatgccatggagtcctttttacctggttttgatgttcacatttctggttggttcagaatatactagcatcagggtttgcagatgtccttcacgtctcaactatctactagtatcatttatgtttggagatatcctgcaatggtacagtgttgatttttccccaaatgaaaaataatgatgtgttttacctgctcagatttcagttctgaacttatgttatactagcatatgaaccatatgaacatgctacgtgctctctcttgaatactaaaccccccagcaatgctctcttgaatactctaaacctctcaatgagaggcagacgcccagttcgtgtttgtactatagtgaactatgattagcaaagggtgttaattgtttctgtctgtaaagagagagctactattgattgaaatttgaagtacagtttaaaacagcggaaatattggtataagaagaagtcccactgaaaatagtgcaaactgggaagcatatggttgaaagcgatgttcaacacgccagcatatgactggtttgaataatcttgttctcgagacaagtttgtattcaaatgatatatctactccaaagctcatgatgatgccatttaaaatagacttttgcgtctattgcacctattaatagttcactaatataagaatgtacagccaaggtgatggaaatcaaaactgaagctcttgcgcgtgcgcatatcagctagatgatcaccacataaaaggcttaaaaactcaatctttgtacactgttctgcgccaatttcagagtttgagtttgggcacagaaaataatcaccgcaagatggaagacgaacaaaaaatactctgcctagcaaaaagctctctctgctcaaccatggatgaacagcaattggcgcaatgtatgtgcctcttgttgctgcttgccatgtcaccagatgctacgctcgccggcggcggctcggtgaggcgccgggcggacgtggccgacgggtacgcggaccaccctgccggcgaacatggcgtggaggtcggcggcgtacttgacggtgtaatggtaagcgtcggaggaagacaccaccctcgccggcagccagatcacgaggcagcacctggcggtgatcttcacgtacctcgtgcgcacgtacacggcggtgccgcacgtcagccgccgcgccgggtggacgctacgggtcacggcggcgaccggcggctccgagaactcggacgccggacgcgccggcttcctggcgaccaccgtcttggggttggacgacggcggccacggcctggcggcggagggcgcgtccggcttcttggagattgagggcggcggcggcggcggccgcggcttggcgacggcgaggtttgacgatgacgtcgcgcgagcgatcttcttggcctgcgcggcggcggcggcggcgggagagatgaccctgggggcggcgagcgccgggaggttgggcgccgacgtcgtgcgggacatgatcttgttggccggcgagtgcgaggagatggaagatggcttgttggcggcggcggtggacttgacgcgggagttggggaactgcggcggcattgcttctcctctcgacggctacgccgccgccgcagccgccgtcgattccgcttcttgatttctagggcttccaaggatcgatgagatgatgtgaacgctaccctccgttgattcgttgcgttgatcctaacttgggaagagatgtgtgtcgtaaaaacaacttaacaagtgacagcgaaattaacccggacgaattgacatcacagcctaactttgcgagatagtcgccgtgttcatctcacccggacgaattcgcattgttcattgttagatacgatttaaataataagtttcagatttcagacgatttattttatcgtctcgactgaaatcctattagttatttttcgtcttatagcattgatgattatttgattgaacttctacaacttgagattgttgctctgcttataccattgactgaaattcttctacagatatagattgtttttccgccattgatgaactcaaatcggcaaagatgtttttcggccattgatgaatgaattcaaagtggcaaagatcatgcaagatgcggcacatatcggctgcagtcttccatagactgaaagcaatggctagcacattttatgacgactgatcacttgatcagataagtcagccatgtatccggtgtgaaacttgaaacttcaagtacacatcgataaagtaaaacagaaaatcatgcgagagaaacatcaaccattaagatgcttatgatgaatctttcttatttagtcaccaagctatgggcaaaaaaacgtgttaagatgactaaacgcgttgttatacagcaacaaccagacatggaaaaagaaaagcaataactagttcggaatggtggccgagccaacgatccctgcatctcatgaattcagagaagatgctctgcgagtccctcgctcttttgctctcatattgccggtcggatagatctgattccctatgaacattcatttgttactaaattcgctacgcagaaaaaactggaaacagatcagctgtaaactttggaaacaactccggcaccaactgtcctccctccttccctcagcgcaaatctctggcctgaatagcataaaatgaaacaaatgtgttcacttcaattgcagaaaaccataccaaaaggtcgaaatgtcaaaaatggtggagcatacctggctcaaggggaacaggtgatatcaactcaaatcctgcagttacattatcaccaggcataaccatttccacgccatcaggtaacacaacttttccagtgacatcggcagtcctaaagtagaactgtggactgtaatttgacaagaaggctgtgtggcgaccaccttcatcctttgtaaggacgtaaatttccgcctcaaacttttggtacgtcttaacggtaccaggtttgcacaccacctgaaagcagtacaaaaaatgacaaacataggagcatcaataaaagggtcaaagaattgttattgcaccaagagtagtaatatatcaatccaccagttcgctcaaagaccacaaatgatacgaatagaataaaagatgacttggatcagacttatatgggtcccgctcagagttaggtatgctaacctggccacgctgtacatcaccacgcttaagaccacgaagaagaagaccaacattgtcaccagcctgcaaacaagttgtagctataagattccacattaatagaaaacaaccagtaaatggtttactttcagaacagacctctccatgatccagtatctttttgaacatctcaacaccagtaactgtagtcttcaagggaccactctgtgaccaagaagtgctcatcaaaattcacaatgcatcaaaatagcaacataacatacaacatggaatcaacgtatgacagttccaaagaacctagaaatgtcaagaggctttatgtagcaggcttacatttttctttcaataaccatagttggtaaaaaaatatattagcttaacccattatgacatatacatattccattccgatatttgcgtgaagtcaaatgtgcatatggtgtaaaaaaatcgtgggtaagatataactacaaagattgtggattctcgaatcttcagaaccaagcaggtcatactctcaagaataaatttgtacgtctaggaggcggtataaaccacattactggacttaagtaataaaagacaaatcagatattttactcactggagtcaaacctaggatctcaacatcttcaccagttttgattgtcccctgctcaacacgccctgtcacaacagttccacggccctgcagattgaaatcaattggtctgtgtcatccttatacttgccaaaaacagtaaacagtgttctggcacactaaaactcatagttacaagaacaaaattaacataatataaacaatttaatcatatgacttctcttccagagacttaagggtacaatggttaaaatcttttcaggagttaaatagaatgcctattgacagaacaaagtataaagtgtcatatattcttgctgtatagtttctaggttcccagcagcattcatccatcaacttcaatggctaattttgtataaacagatgctaacaagtacataattcaaaccttgagccggtttcagaattagaacactaattatatccatagatcaagataggttcgctcattgtacttggcacagaggaagtaaattcaatttttaattgcaatcagttcaaaactacagtgaatatgaaaaaaaaatagctgtataccatagcataaagttaatcacctggatagagaaaacatcttctatcggcatcaagaaagacttatcaagctgcctcacaggatcagggatatactcgtcaactgcatccattagtttcaaaatggcattctttccaatctcatcattagtcccctgtaaggctgacaaggcggatccacggatgattggaatctcatcaccagggaacttgtagaaactgaggagctctgcaggaaaaaaagggaaatataccttagaacaagaacaaaacaattcatacaacaatgtaaagagatgcagaatgctagcataccacgaagctccatctctacaagctctagtagctcggggtcatcaacagcatcaactttgtttaagaaacatacaagtgatggcacaccaacctaaaatgccgagaggaatgcttgagtaatcagtaaccagaaatgaaatgatatactaaaattcgcactgaatgtgaaaaagataaagaattgtcagtgattcaaaacctgtcgggccagaagaatatgctctttcgtttgtggcatggggccatcaggagctgatacgacaagaataccaccatccatttgagcagctccagtgatcatattctgaaaatgtgcacattgaaacagagatgtcattggtcattgctcaatattaaggattctagcagttccgggacagtaactcagtaagcctgagtatcagaagagcctactggatttaataattaatattgacagcgcatactacaaatgtgctcagcaatttcataatatccaatgaattagtattacataatatccatggttattgttcgtgaagattgtcaatatataatcttgataacttccactttagtaaaatagaactacttaccttgacataatcagcatgccctgggcagtccacatgagcataatgccttttagcagtctcgtactccacatgagcctacacaaccacaaccacataactcagacttgatctacacatgatgacatacaaggacaccatctggtccaaatgaagaaaaaactagtgctaaggctcaccgttgcaatggtgattcctcttgctttctcctccggggccttgtcgatctcgtcaaaagcaacagctttagccttccctgcctcagctaacacctgcaaagagcataaaaaaggcatttcacgcgttgaaattgtttggactccaaagaaaacaactgaacttgcactatatgtgacaaatcagaccttggtaatcgcagcagtgagtgtggttttgccatgatcgacgtgcccaatggtgccaacattcacatgaggcttcctgagacagattcatacaacaaattcaaaacacaagtcacacacggatcgatcgctagatgctaaccacaggaagagagaaaaccaggcgcggagagcaacggatctgatccaagaaggactcacgtgcgggtgaaggtggccatggacctcgcccacagggttccagccagaggcggtggctgctggggcgccgccgccgcagccgccgacgcatccggtagcgccgtggggcccgagatcacggcggcgcggagggtggggtaggagaggatgcggcgggcgccatggctccggagcactgcggctgcggccatcgcgttcgcgttcgcggcggcggcggcggcggcgctaggtgagaggaggagagagacgggtttagggctttaggagtcgaatggggaggagaggcggccacctcgtagctgtaacttgtaaccaacccgtggaggcgcaaatgggccgtacggcccactagggcccataggcccactagggcccataggcccactcccagtttctcctctgccacaagaaagaaacactgcggaaattacaggtttgccctcgtatcaccacagccaccaactctccctctccctcgccgccggcgcgcgagcttcaccagccatggccgccaccgccgccgcctccgtagccgcgatttcgcctctccccggggcatccctcccgcgccccgtctccgcgagggttcctcttctccctagggcttcccctcccacatggcgcctcagcgtcggctcggcgcgcgcgcggtcgacgcggtgccttgcggcggcggggggtggcgggctggcgccggagatgagggcgacgctggacaaggtggtggggtcgcacaaggtggtgctgttcatgaaggggaccaaggacttcccgcagtgcggattctcccacacggtggtgcagatactccggtcgctggacgtgcccttcgagacgctcgacgtgctcgccaacgaggcgctccgccaggggctcaaggagtactccagctggcccaccttcccgcagctctacatcgacggcgagttcttcggaggatgcgacatcaccgttggtacgcaccccgcctccccgatttgacctgacatcacgcaagctcactgttaaggaattgaatctttttaagcagcattgatttgttatgagaagtttgacatgccaattcacctcttcgatccaacacattgtgattatcccactacgattagtctaatgctgaagacatgctgcggcccgcttatcgtgtctagtccattagaatcctgttagaaacttttcaaggggaccagacgtccctgttgtttactgtggttctgaattttgatgattccctatcctcataggcatagttcagagtatataaatttgagagaatttatcagagtatataaattttgagagagaattttcatggcatgagatactcgcagtatctgaagatctgatcatctgaacgctggttttgcgttaaatcaagatatgctacttgtactggccataaaagagcagcttgtgaaccctgattcatatatataacccgagacgtggctttcacccctctcatcattaccagttaatcatcaccaatagtgatgtatcctaagtatccatgcctagtggcgaaccgagaacaaaaattaacagggtccaacatactaattacctaattgttaactgatatattgatcagcatgatataatttagtttaaattaccagaagctgcatgtaggagcgccactgtctgtgccaccattggttataatctggtttagtgttcttcactgaacaactagcttgtataggtctgctccatgcagttttctgagtgttgccacctatatactcaagaacctactataatgtaagaaataactgttaaaaaatatgtatacatcttgcccagtagtagaaattaagggagtattcactttaatgcaattttcaaccttaccaaattttggcaggatttcttgtatagttaccaaaatttggcagcaaactaaatgtagccacttttttagcaactttaccaaaatttggtaaggttgaaaatggcatcaaagtgaacaggccctaaggtggatggtgcacttggcgaccagctgaccagtgagaacacaaatccatgatgtagcaaatcatcacttaaaatgttcatcatggtagtatatttagatacttgacttgagtaaacccaaatgaataattgacacacaagatgtgaggatgattaatgtgtgtgttccctactgaatgtttgatatgatcagtgtttcagcaattcagctggatttaatgtttgcactgttttatattttgcagatgcatacaaaagtggagagctgcaggaaacactagagaaagcaatgttatcttagtataaacgtcgaaacacaccatagagtacatataaatggtatatggtcctttacgatgtactcttcagccatgacaaagaactggtgatgctaagattgtcaacagttcaattcatcaagcagtgaggtccaactcgaacgtgcaattgtactcatgactaataaattttaatattgatgacaaatacttcctgttgcaacactcggatgtcacagctctaaatgtctggatctctaaatgtctggatggtattctcttatagagctgaggcgatgatcttgtacctaaaaagatccaaaacttggagcgaaatcttttgcccaagtagtccaatctatttgtttttcatcgctcttaaatgtactactccttaactgatactccctccagtttgatattaagtgacgttttggacaggattgcatataccaatgacttattaattagtcaccatattcccttgttatacccttattaaatactctcggatacacatcaaatcaggaataacttctcctcacttggttaaagccaccatcccaaagcatatggttccgtgttcgagcgcttgtagcgctcgttttcatccgattttgcatggtattgtagccgtgcatgcaggattttttttatgtcattttcgctcgcgcgcgcgctgaagttttgtaagctgattttttcgctcgttcgtgcttggtatagaaaattttttggtgcatcttgcagctggttttgagcgttttggcgcctgctgcctcttgcgcatattctctgtgaacaagaccacaacgagagcatggcctcctacgcgcgcatcggatcttgtcaagaccattctcgtggactcggccgcagtgaacgcacacttgcgcgagctgctccacctccatggcgtcggcgctgttgtcctcctgcgcgaggtggtccacgatgccgcccgtcatcatgtcgtccaccggcgcaacctcagcatccatggcgccgatggtcacttcgtcttcatgcgcgacggcggcgtcctgcagcttgacatccatgatgctggtgcgcgacgagcggcgttgtcaagaggcgaagcgacgcaatggccagaggcgagcaactagcagcacacggtggctatcatggagtctttccgcttccgtggccagagtattagtactccaggcattagttaatttttgccttgggacttttccgctggatggagacgaagcaacagcatttactgtttgcatgcatgaatgagggtattctggacaaatacaagggagagagttgtggagagcgctaaaacatcaatttttgccagccaaagaggattaacccatagcgtcagttaatatggaactagagggagtaactgataacaaggttatgtacctccatgcagatatttgtaccattagttaagagcacccgcaatggtaaagtaaggtgctatctataaaacatgtacacctcaacaatagactagattaatagtaaaccacttcaatggtatgtctacatgggtatctatagctctctaatccattgcctcgtttttctctatagactatctccatgttagtagatagctttgctctctctcttcatttaatctcttccaagtagaaaaatatgctgacatggatctcttgtagagagcttatagataaccattgtgggtgccctaagtagcttggataactctgctctaaacagaagatagccctgcccccaaattcaattacttaggcacgagttcaccgtgcttcatgcaaacgacaagatctccagttttatcttctccacatatgatgcatctccagaaacttaaaatcacaacgaacgcgttacagatcagatcatattgagaaccagcgcatctgcagaacctaaaacaagccaggcatctgattgaataatctagaattcaaataatattcgggaagatacacatgttaagcaaattggaggacagcgattgaaccccaacaacaaataatatgtcatcattctgtggtcacagtatttaagatcattcacgcacgagttcccaaagcaaacaggtgatgcttgagctgagaaaagcttgacgtcctgtgattgtaaaatttgaccatagaaggccaggcagagaacctaagcaagccagccaatgcaaaatggtttacagattaagctttcaacaccgccttatggatcatcgtctccttgtgtatttggtgacagctcttctcaacaagatcgaggagtttctcgaggttcgccgcccaggaattgagtataccattactgtcttgtgctgtgcggaagcatacaacacccattggcctgtcaatcttcgcaatcagcgactttgagtttaccatgtccgaaaggtgtttctctgcctcctgaatgagaaaaatgtggggcatgttagatcttggtaggctacaaagtaacaagaggaatacaagtgatgctaggaaggctgggaacacaaacctgcaagctcaagcaaagaagatctgcgagcctcttcagggtaatccttgaatagtacttcgaaacaaccaagatattctgaacaaaagcaaagaactggaaatcaactgacaaatacaaagcaaggaaccaaaagagaaatacgataaagtcaagtaagcaatacatgttcaatgatcctcaatttcagatcctctgcagctttgtcacccaaagctcctccgagaaaattcttctcattcgcatattcatctttaaagaattcccacaagcttgtccactgaatcacctccatggttacaagttgcttcagcagtaacctattcccatccaaacagcaaaagtaggaattagaaagaacattaaaaaccatgataatttgtaatcctgaaagcaacataacgtaccggaaatttggtatctcggagagatttttgtcttcgagtgtggcattgagaaggcttgattgcatcggatcatgaggcgccaacaccaaataccaacagatctttctaagaacctaaagcgaattcaggcagtcagataaccattatagcgtgagtgagtatgcgcacacaccacaccaagtaagacttgcgaatgagagagctttaccggtatccactttgatggatcctcttttattgatggaatttcataaatcgacttgtagcaacggcagatttccaggtaatcattgttgtgcgagtaatagctgaatagagacaaacagaaatcatgtttcaccacatatatagaaaaaaatatatactcttagcaggttataaaatcagttagcgagaattcaaacagcacaaatacagtattcataattgtagcataaaaaaaggttgatggatacaaataaggcattcaagcagtaaccataacatgatgatggtaaacaatcgcaaacatatttgacaggtaaccgcagaagaggaattgatatttcctgagtaaataaaatacaagctacataaacaattgtctaatagcagtaagggatatgacaccacattagttcttttgtttaatcaaccaagcattagattgacttagcagaaaactctaaatagttaactatcactatgtattagatcatgaatcaaacagtcgaaagcaattctttgctgaacaaaatagaactccctccatcccaaaatatagctacctttatctgtgaatctgaacttgtccatattcatagctaaaggtagctatattttgcgacctgagggggtagcattaacttcaaccaacattactagaagcgacatgaactcatgatgaattagtctcactgagcaggaagacataccgaatcatcagttcatagtagatgcgcttcagttccaggagggaaggtatctctgctggggcttcctgaacaatattatcaccttctttcggtttctttttttcctttgacgggtctgcatcaaataccctaggactgattttcctggataaaatctgtgcgcgtacataatcttgacgatccaagcacagccggacctgtgatcatgattacagtaagattccagaacccaggcttttgtaacaatttcaagctttattactgtatttcttcatacctgctctagaatgaatgcaatcttttctgtctttgccatggagccaaatgtttcaacctgaggatgaacttgttagacattatgtagatgcgaagacaacactatggtggttatagtagatgtaactgtgtgccatgattatagtgcagcttgaacttacagcaacttcttgcattaaatcagcagcctcatcaatctgtccctgctcctctttgatttttgcaagtcttttgatcaatcttgctctctctatctccacatatatctacagttgatgcatatcagtgagattacacacatgaaagggcattaaatcttataggtaagcaatatttgagtagccatgattctcacttttccagcagatacactgctcaacgtcttgattagctcaatacgtgtgtccatgtctggcgttaagtcaatgtactccattgctttctgaaccatggcagtgatagcctgtaaaaataaagaattagaagagttgagacatgccacatgtgcataaccaagttataatgcagcagcaatagtattgcatacataaacaggcatgatttatgaaatattgttcaacttgtaaataataactggatatttcaggaagacctaagtatgggatatggagagacaatgctgaaattttggggggagaaaaatgcatgcaaatattgtttcgaagtgaaatatacaatgcactcgattagcactcaacaaaacattagttgaaactcaacctaaacacataatgctttgcaaagaaaagagtaatcttacacaacactatggcatgccttccctaccaccagtatcccttagaaataagggcatatatccaattacatcgagcaaaatatgactattgtctttcagtgagcgttgataatttgaattgtgtaatctatttaagatcactagaacttagaataactctaagttcataccaagattacaaaaataaaatcaatggctggtgattcagagtgacaacataatagcaggtgggtatgctatgttagcctcaattacatgtgctcctcggaaactttggggtttgcatgtgcctctagtcagtagagtataactttgaagatatcagttagatagctaaatacagctagtaattcaactagaactactaaacgaagtccaaagataggagaggacgagagcttgacctgcttaagctggcccctcctcttggagaggaccacgatctgatcgttgagcgtcttccaggcgccggccttgtagcagagctcgacgatgtcgatggcggccttcctcgtgccggcgacatcgccggccagcctcatctgcttctccacgttgaggagcgactctatcgccgcatcgaggttggtactgttaccctcctgcatcggtccacaagaaacagggtcagattgcaaggcatcagatcaacccgcaagagatcgaaaccctagatgagaagtgcgggccgcggcggggcgggcgggaaggccaaaaccccggagaggcgggcggagggtcggggtgggggaggggaggagggaggtgagctcaccatggcgagggagggaccgtggggaggcgccggcggcggcggcggagtcgaggagatctaaggcaaaggcggcgtgcgctttgcttgcgggagaggaagaagaggagagaaggggagtagggctctcgggctctctgtggtgtggtggtggccgttttgcggggaaaccctcgcggcttctctcaattacgcggcttatagcagccggccgccctacctacaccgtaccggcctccttgcaagttgcaacgcacgagttctattaggatttgcattttcacatgattatgttattatccatcgtttcaagatctcataaaattctttatcccattggttagcactcgtctaactttatccaaaataacaataataataatctgatgcagtatttctaatagtgtcttatatactaaaacaaagttttaagatcactgctggttacatatatacacatcgtaaaagctagtttatgacctgatatcattgttgttaaatgtcaaggtaagtcgctttgtattttgttgtgaaatatgtggatgcatatatgttaaatattgtggaaatgatagatggtatatgttaaaatattatggtaaagatatggaaaatgattatttgtgtgcttacatattgagttctaaaatataataaattgcagatgacgtggcatgcttgtatgagatttaagatatatgattactattgaatgatggagtgacatgtttgcatgatgcgctttaaaatataatgtgttacaactatgtagaagatagatactctatttccacaaaaattatcatctgaaaagaaaaagactaaaataggcctgattcttatgacatgacatgctttgtattgtgtcgataacatgtacttttcctctccatctcctatttcatttcatctatcatattgcatgcgttgtatttgtatttgtcgactacaattgtgaaaaaaatggtggcatgattaattattaactcgagagtggtagcatgatgatattacgatggataatatgacacagttatattatataagaagttagcattcaaattagttgtctataagttatttttctatgttgtgtatatatgatttcatacatggcgttttcgtttgttacatacttcaaacctatcgaagcaatcgacctcactattgcatatacatttatatcaaatgaattttgctatcgaccacgtgggctatggtaaggaatatgggtgttaagacccatattacattattttatttcatcctaatgtttcgcgtatgggctattgcagcatgggccgcccgaaggcttggcccatgttgggtctacacctttgcctcttgtactaccacatttaggcctcatggttttctatgactttagttgtacttgtgttgtgttgatcatgtcgcatgcattttttcttagaagcaactactctattgtaaagttagaggggcgtgagtccctaacatgtggtggcccatcgtcatgggcccacatgtcaaaggtacacatcggtccaacgtatgttatgggagactcgtcgcttcttctctctttcatctctctagtttttttttgtatattttgtgccatgcagttgttgattaaacttgtgaagaagaaggggtagcgtgattgattgttgatctgaaagtggcagcaaaataatattatgatggataatatgacacaatctataagaagttaacacttaaaccaatcatttatggagtcatagaagatgtttttctaaggagatgacaaaagcgcacgtatacatgagcacaatgctgatgtacgatttgatttcataccttatcttacatatcctagatccatcgaattttatcgttatgcatacatttacctcgagagtcatggataggagtgtgtgtgttaaagcccatatcactttatatttaattttggaaatacttaatataatttcgttatagtgtttcatccatgggccgcacaaaggcttggcctatattgggtctactccttacctgctacagttagtttgtctttgtactatctcatggtttatgtatttgctcatcggtgggacatcacctaataatcatatatccactaacgattaatatctaggttttattttagagtgtgacttacttcttccgtccgaaaaagatagtaggtttaaaagcgtctataccatatctgataatgtcgatagcatcaactcatgtacaaccaaaataatttatcatgagatacctctattttcagtaacaaccaaataatatactcaccgtggagaacatagaaatcgggtgctcacacaacctccatatttgactagatatagaaggtggagcaaatccatgaattttgtaatagagtaggactagttcataatgtcgggacactaatgttgtattcggttaggtttttttttaagtcctatccccaacctatataagatgggtacacatagcaataataagcataacaccaaggtgaccaatgatatgctcaaaatcttaatggatgttctaaattagactaatttaagtatcttgacaaattttatcgtgtagagatagaggagctagtaattattactagcaacctgaaaaacttaatttggctcctccgtaaaaagaaggaaacggcgaaaaagcggctgcctctgccgccgtcacgctgaacgcgcctcaccggctcaccgccgcggctgacccaacccaacccaacccaacccgggctcgatttcacttgaaatttggaccccacccaaacctgtcgtcgcgactcatctactatccattctattcatccccatggcgccgccgccgccgccgccgcctgccgccgccgcctcccccaccccaatgctgctcgccctcacgggcctctccaccttcagcgacaggctcgtcgagttcttcaatcactggaactccttcatccgctatgccaccgccatctccgacgacttaccaccccttcccgccgccgaccaaccgcccaacctcgccgatgtcgccgagccagaatccactaccccgcacagccccgtcgccgtcgatgagccagaatcctctaccgcgcccaaccccgtcgccgtcgccgtcgccgagcccaagcctgcacccgtgccccagcccgaggagcccaggccgaaccgcggcggcgacccatcggcggagcatatgggccgcatctgcgagcgcatgggctcgggggagctcctccgcttcgtcatctcccgcatgggggacctctcctggctgctccgcgctgtcccgcccgcgctccgccgcgcccccaaccccgcggagctcgtgctccgggctatcggccgctactacatccgacccgggggcaggcacaccgaggccgcgtgcgagctcctcctgctgtcctacgtgcgcgccggctgccccctccgcccgggccaggaggccggggacgaccacctgcgggcggaagcccgcgaggcggcgctctcgtggcgcagccggcttgtgcggtccaaaggacgggttgccgctgccgccgccaacgatgcccgcggccttcttctcctcatggctgccttcggcgtgcccgtggagttcccgtcgcaggagatcttcgagctgttgcatgctgctggcggcctggcctgcgccgaggtgctcaaatgctccaagcatttcttagataagctgcgtggtgagggccacttaccactgaatcactgataaacccttgtgacatttcacctatgcctaattattccagttccttgactaactggctgcagctgttttgtcttgcagatgttgttgctcatatgctgaatagaggaatttatcatcaaaccgttgctacaataattgcatttgaacttcaggatgcattcccgctttctgcgatagcgacttgtgtcattgagagagttgggcgtacaaaggatcaagacagtcaagaacagcaccatctgccaggatcggtacctttgtcgtttatcacactatcagcttattatcatatattccttctgttaatgcatatatttaattactgttatatgatgtgttattttcaatactcaactcctgctatatgtactttgcactaccagtaacctattacaagtggtttacatgatttaatgtttgacatgatatattctttccgttagtgcatatatttgattaccgttatatgatgtgttatattcagtactcaactcctgctatatagtgtagattacactttgcaccacctttttgtgtttttgtgtcaccttgcgccaccattaaggatttgtatcaccctgcaccacattttactatcaatttttcaacctgtgccacatttaaccaataggcgttaacttccaccgattaatgcatccatccaattgatgtgcgcaccaataccttcaacaggtcctttttagcgccaacaccagacaaattgcacaattagatttatatgactgctgaaatgtaacaaacttcatgtcaccatacctataagcaataaactaaaatgactgtagaggttcatattgtagcaaagactaaataaacaccatgccaccaaattcctccagtattatgtgagccaatcccttttgcatctgttggctgttgctgaaacactggtacttcatcaatgttaaacacatccaagtcagcattgacatcaaacaggtcttccgcatcagtgtcagtgtgtcacttatggtccttgtctatcctactgctcatctaagcaatctgctttaagttctttattctcctcttccaagattgataagtcttcatagttatcatcaaaagattgatgatcagctagcgaaaccataggttgcaactaaactaaattctccaacccattccaaccaacaaaaacaaaaagtaaattggatgccaaccatgtttatgaactaatctcttcccatcagagaacatcttcttgagagtcgctgtgtgatggtggtaggatctgaagtggggtgcggaatgctgactgctcgcgccgttgcttggcagcggcactgggaccagggtcagggcatgggtgcggtacccatcatgtgttgtggggcacatcggtgggttgtgctgattcagcactgatcgaacaataggaagaaaaaagtggtgcagagtgatgcaattccttaaaggtggtgcaatgtgagtatgtgacagtgtaaattaatctctatgtttctatatagtttgtgtgtctctgtgtgtgtgtgtgtgtgtgtgtgtgtgtttccagcctcatccctaatgttgtataaccatttctgtgcagaaagagaatgatgaagagaagctagctctactgagattactatccaaatacgtggaggatccaaaacaatgttccacagagaatttcagcattgctgataggattgcgatgctggaacaaagcctcgcaaagccacatcaagcatttacaggaacaaagcgcaagaggacagcacaggaggacagtgtagaatgcactcgagggcctaaatgttcatacactccagctgcttctagtgcctcacgtaacaaaaatcttgaaggatagaagcagcatatctgttcaattaactcagagttcgccaaactttgttggggatccagttgaaccctgtggacaatagaattgctctacctagcaaggtgtgaaaagtataaccatgttttcgtttaattttcttgtggcaagcttagccagacttgcctagtaagcacattatctttctacatgtttgttaagggatgcattttggggttgggggtctgaacctaggaaatgtgcatcatccttagcatcatttcaatagtggcctcattaagaaagctccgtttacttattcctatattagtgagtcgtacaacgttgttgtttatgtttctaactataatacttatgatatatcatggacttacgtatttaaaatcattttcatcaacatccactagtatttggccagacttgttaggccttattagttgagtaagggtcttttaaaatatcttttccatttggagaagatatggatgagttctggaatataatcgaaactttgtatgaagtgcattttcatttcaattggcacaattttctgtcaatttttaatctgcaccacattgaaccaaaaaacactactgtttatttgatataccatagtggattccattactggttcatggtaaaaaaagaaaataaacacgatgccaccaaatcgtccaatctttgagccaacccttttttccatctgttgctcaaaattcaagtcagcaatggcatcgaacaagtcttcaccattggtgtcaccctcacaatgaaagtccttacctaccctacttttcatctcagcaatctggttcaagttctttttttccctcctcgaaagcatattctgcatcatcctcatcagaagattgataatcacctagctgcaaggtatgattctcctaatccatgtcattgtcatcatcatcttactaagggaagcatgctcttgttcatctatagtaacaatggtcgatgatattgtagaatcaacaatatttttccagtggagataaaatcctattgtcatctatcaccatgtaaaacaagactgaaacattacaattcaactacatatctaaaaaggaaaattgtactccaagctgaaaccccaggttgcagctattcttttttttttatctccaatccattccaatcaaccaaaaaaaagtaaatgggatgccgacctctaggttttgaaccaatctcttctcaccagagatatcctccttaagcgttgtctggcaacgtcagtatctgaactagggtgccaaaagctggctgattgtgctgtcgcttcgcagctctcctgggaggctgggaccaggggtcgggacatggggtgtgtgcatcatgggtccttcatattcagtgtaaattgaacaatgggaaacaaaaaatggtctagaatgacacaatcccttaaaggtggtgcaatgtgaacacaaaggcacacataggtggttcacaatgtaatttgctctatatttttttgtagttgtgtgtgtgcgctcacgcgcatctgtttgttttgctgtaatgtgcgtatgtgttttgtcggccacatccctaatgtctatgtgcaataatttgtgtgcagaaagagaatgactaagagaagtcggctctattgagataactaatatgtggaggatcagaaacaatgttccctagaggtttcttgtttcagtattcctgatagggttgcgctgctagaacaatgcctcggaaagccacagcaagcctttatatgggaacaaagtgtaagaggacagcacaggagggcagtttagggtgcactcgagggcctaaatgtccattcactccagctgcttgcaatgcatcacctaacagtaatcttgaaggagcaaattgctcaacctagcaaggtgtgaaaaatactaccacattttcatttaatttcttgtggcaagctcggtgagacttgcctagtaagctcaccatatttctacatgtttgctaagtgatgcattttgggttgggctgttgggttctgaaagactgaaactaggaaatgcacatcatcgttcctttttttttttttgaaaaaagaaaattagcatcagtttgagtattggtctcattaagaaggtcagtttacttggcatatcaatgagttgtacagctttgttgtatcaatttctaactatagtacttatgataaaccattggtttacatgttcaaaaatcattttcatcaacatctactagcgtttgactagacttgttaggccttattagtggagttatgtttacggtcttttaaagcacctttccatttggagaatctatggatgaggatgagtcataatccaaaattacaaactctgtgaattgtgaagagcatttttcatttggagaatcatgcatgagttctgggatataattgaaacttaatgcaaagtgcatttttaatttggagaacctatgcaatgcataagttctgaaatataacccaaagtttatgcaaggtacattttccatttggagaagctatgcctgagttcctggatgttatccaaactctatacaaagtgtttttttttttttcattttggagagggtattcatgagttctggaatgaaattcagactctatgtcaagtgcattttttgtttggagaagctatctgtttgttctggaatataatccaaactaaatagatgcacatttttcatttagagaatctatgcatgagttctggaatataacccaaactcaaagcaaagtgcattttccatttggagaagctcgctccgtttgctgctccgtttgtcaaaacttgcttatctttcgatttcagaatttacattgattttgtttgaagagtgcaattctctacaaaacacatgatctttgaatgttttttaagaattcatgttcatgcattttaattctttttcaagcaccccctatctgcacactggtctggaaatctggttcacagttcacacgttttttgcatgagggcacagggagagagtggtagttgcaggctgcttccaaacttccacctacctccacagtgttagagatcccttcccatttgctgagtaggaagctttcactctctagtagtaggtgtgtcctttacatttgctagtctccactttccgagctcgatcgatcgagcatggaagccacaacctccagcttgctcgtgcgccccgtcgacacgcggctctccgccgcctccctccccatcgtcgtccgcgcccgccggcgcgtggccgtcgtcacggcggcggcgccggagcggaagccggccgcggcggcgagcagcagcaactacgtggtggtgccgctggacgcggcgccgtcggggatcacgcggccgctggtggaaatcctgcgcgacctcaacaagcgcgtccccgacaccgtcgtccgttcctcccgccgccgcgcgtcgccctccgatccggtcatcccctggtacggaacaacctatacatccttggcctttgcttgtgctactggtaaagcactgcagatcttgctgccatacacatttgcttgcaacaaggagcactcgcgatattcaggctcatgtacagcatcgaccaatgacgctcagatcctcacatttctagtggcacactctcaagagtcaagacacaaaaagaagtttgttccttgctgatgtttcacggtttcttgtaggtatcatgccaacaggatgctaagcttttatgctccaggtaagcatatctcgtgtactctatacctgaatctaataccgagctaacggtgctgaacattaatttgtaatcacaaaatcgatgccagtcactggttcaccccttctgtgcttgctcttttgaaagcaacatgagcaaataaagttacataagtagtatgtgttgtatacataacctacatatgtactagcttccaggatgctgaataagtaccgtgtgttgtacacataaactgcatatgccgttttcaggatgctaaataagtagtgtgtgttggtacacataacctgcatatgtagctttcaggatgctgaatatgtagtgtgtactgtacacataacctttataggcagcttaaaggatgctgtcatgatgaataagtgtattttgtacgcataacttgcaaatgctgcttccaggtgctgaataagtagtgtgttttgtacacataacctgcatatgcagcttccgggatgctgaattctctctcatttcaacttataattgtttccttctgatgattgtcaacatttacttgctctacctgtcctatgtctgttgaaatactccaacgactaccaaatttaacacctttaatcatttccagtggatgatagtcacatttccttgcttgatctatcctttatctacttgaaatgcactggtcatgccaactcttcagtcttttacaccgttcttggatttccactcatattatcactgttttttttggaaacatcaggctggtgtggagaggtccgtgatgttatttacactgacaatgggaaagtgacagtgatatatcgtgtcacagtacgaggaacagatggagaggtaagtttaaaggtgttgcctcttcttgaagtcttgtgattttttctctggaagcttcactttctctattgccattctcacttacatatacatgggatgggccctcttcaatagatgggctagcacacaagacacacacacataactagtctatttacagcccaacactccccctcaagatgggtgatagatatctatcatacccatcttgtcacatgaacaattacactctttaacacctaagccctttgttaaacaatcagcaacttgtccaccagacgttacaaatcctaattccaacactccctcgtccaatttttccttgataaagaaacgatctatctccacatgctttgttctatcatgttggactggattattagcaatgttaatagctgacttattatcacacaatagcttcatgggagtgttccccaaaattttcagctcaactagaagatttcttaaccacaacaactcacttaaactcgctgccattgccctgtattctgcttcagcagttgagcgagacactacggattgtttcttgcttctccaagataccaagttgccaccaacataaacacaatagcctgaagttgaccttctatcatcaagacagctagcccaatctgcatcacaatacccttctatcttaagatgtccatttttcttgaaccataagcctttgcctggacttcccttcagatatctcaagattctatacaccgcctccatatgactacttcttggatcatgcatatatcgactcaccatactgacagcatatgttatgtcaggtcgtgtatgacatagatatatcagtcttcccaccaatctttggtatctttccctattcactggatctccagactccgcacataacttatgattttgatcaattggtgtagagactgggcaacatccaagcatacctgtttcactaagcaagtccaatacatattttcgctgtgaaataactatccctctaggagatcttgcaatttcaatacccagaaaatatctcaactggcctaggtccttgacctcaaattctttgcttagattccgtttcaacctagttatctccaagcaatcatttccagtgataatcatatcatcaacatagacagcaagaatggttatatgatctccactatgatgatagaaaactgtatgatctccattacattgcttatagtccatagcacacattgcacgcctaaaccgatcaaaccatgctcttggtgactgtttaagaccatacaaagatttcttcaatctcaacacctttcctttagtttgtgaagtggcaaatccaggtgggacatccatatacacctcttcttgaagatctctatgtaagaatgcattcttgacatctaactgatgcaatggccaatcaaaattagctgcacaagatataagagttcttaccgtgctcatctttgctactggtgcaaaagtttcatcataatcaattccatatgtttgactatatcccttagccaccaaccttgctttgtatctttccacctttccatcaggattttgctttactgtataaacccacttacagttgacaattttcttccctttaggaaatggtacaagatcccatgttttgttcttttcaagagcctctagttcatctagcatagcttgatgccaccttggatcttgctttgcttctctccaatcctttgggatttgcactgaatctagtgatgctataaaggccttatatgtggatgacaaggagtcataggaaacatagttggatatattattttcatcatcaccctcatcttgagcttcaaaaccataccttagtggaggtttacctgcattgcttctcacactctttctaatggcaattggtaagtcagattcttctctaacttcctcttcttctccccctgactccaaagatccttgctcacggcttacatcttcctctacctgattatcctcttcaacttgttggattactggacaccttgttctccttgtgtatacttgaagatttttctcttcatgtggcttcctccattcttgctcctgtgcaacaggaccacccatgggacatggaattgaaccaaccacaagcttttccttctttggttgttcatctccctttggacccaatatttcatctttcatttggtgaccatcatgaccactagttgaatcatcaagatcaatgaataaagaacttaaatctgtcttctcaccatagaatgggacagattctctaaaagtaacatccatacttacaaaggttcgtcgttctgatggactccaacacttataccccttctggccagatgaatagcctacaaagatgcatttgacagcccgaggatcaagttttccaatggaaggtctatgatctctaacaaaacaagtgcaaccaaacacttttggtggaacaacaaattcattctttccaaatatcatctcacatggtgtcttcattccaagtattcttgatggtgtgcggttgataagataagttgctgtcattactgcctcactccacaagaatttaggtacattcatagcatacatcaatgagcgggctgtctctaagagatgacggtttttcctctcagccaccccattttgtggaggagtatcaggacaagaagtttgatgcaatattccttctgatgaaagaaagctactaaattcattgtttatatactcccctccattatcagttctaataaactggacccgagcattaaaatgatttttaatgtatgcatagaaatttagaaaacatttaagcacctcatccttatgtctcataagatataaccatgtcatgcgagagtagcaatcaataaaggtaacaaaatacttcattccactcatagagaccacaggtgaagtccaaacatctgagtgaattagcataaatggtaacatacttcggagtcctctactcacatatgatgttcttgtatgttttccatactcacatgcatcacatactaacttatgtttatccactctacttagttctgctgggaacatcttactcatagtttcaaaagatatgtgccccagtcgacaatgcaaaagtaataccttagcctcttcttcacttgtaggagccatcaatgcaagacatacatcttcacttgtctcctttcgatccaaataccaaagtccatcacgcctgacgccaatcccaagtttcttccctgtttccctctcctgaattaaacaattctcacgatcaagggagacccgacaattcatatgatcaacaagagaacttatcgaaaccaaattcactggaaaagaagggacatataacactgatgataaagtgattgaaggagtacactgtactgtaccctctcccttaactgggcatgatgtcccatcagcagtttgaattgtttcttttcgtgtaaatgggtatggtttatatgatgcaaattctccacacatacccgtgacatgtctagatgcacccgagtcaagtatccaatttgaatgagaactattgatagacataaatgcttggtttgagttacctgaggaagaatgaacaagattggcaacatcaacatttgtagatccagaacaactctcttcaagcgtgaccacattagctctgtgatcacttctatactcatagcctctacctctgttacctctacctgcataacctcttccacctcttgctccacccctatcaccaaatcttcctctcccataactaggcttgcgaggagcgcgataatcacgtataaggtgccccatttcaccacaattgaagcactccctggtctctttactttgtgcaactacataggtggggcttggtgaagatggtgtggcactaggcaatactttcttcttaagctcctcctgtgccatagctgcaatagcctcatccaagctaggaagggtggtttgatgaaacattgcatcccttcttccttcaaactccgaatttaagcccttcaagaactcaatgacccttctacgctcaatccattttctcatttttgctatacaatcagggtgctctaacccaagaggatcataatgatccaaatcagaccacaaatgcttcaattcagcaacatattctgcaacagaacgctccccctgtctcaaaacacttatcttctcttgtgcctccaccattaacatcacatttccttctcctgagtagagattagtaagagttttccacatctcacttgcactagaaatggtctcaacagttgtagcaatagcagggataagtgaggttaataaccatgctactactaacgagttggtagtactccaagtcttccattcaacacttgatatgttctcaggctcctttatctctccggtaacatatccttctaacccctttgtcttcaaaatcaataaagctcttcttgaccaactcaaataattttttacaccctccaacttaatgtcattttgcatcaactcaattttttgcaccgattcagtatgaggaaccactgcactactcgtagttggagcctcattaaacttctttgcaagcatctctaccaatttaccattacttgttccagtccctgattttcccccattttaatcaagcaatacttgcagtagaaagttccttattctcaccttctataagttgtagctactccaaccagcagcagctacacaggcaccaaatcctcccttttcctttcaacagcaacagcacaagcacctcacctcctctctgtctcctccctttttttgttttttcctttcaacagcacaagcaccaccgtcgcacagctcttctctgtctcctctcacagcacaagtaccaaatccaagcagcagcaacagcacaagcacacttactcactccttccttcacaagcacaagcacacctagcactgcaaccctgctccctccttcacaccggccgcactgcagcagccgtcgccgtctccggcgtcgacgtggcctctccgcctcaaccgtcgacgccgccgctccgcctcagcagtcgacgggtgcagcactcttccgctcacagcgccgccgccacacgtcctccccaacaccagcgtctccctcctcgacgagctccggcgaggctagggtttagccatcgccagtcactagccggttggctctgataccatgaagtcttgtgattttttctctggaagcttcactttctctattgccattctcacttacatatacatgggatgggccctcttcaatagatgggccagcacacaagacacacacacataactagtctatttacagcccaacacttcttattacaggataatcatcatatgaatagagttgtacgcacacacctatgcacaccaacacacaccacaatcaccaccatcttgctgcatttgtcctcgagctcgcttgctgccggtgccctctaggctccagcttgagctcagctgctgctgtgacctcaagctctcccgcttcctgccttctcccaagcgggtagtgccacaggtctgcaatagagctggccgccgatctctagcacatggaagaaggggaggggagggggcagaaagaaaggtagaagggggtaatgtgtggtagagatttatttcgcgaacgcttttttttttcgcgaacgcggtagagatttaactgtggtttaacagaatgctatatgagaactgtgataactttcagtgctatatcaaagtgaaccataatcttcgggtgctataaaactaaaatgatggcaccgaaccaagtttgcctttgtttgtttgttttatgtgaattgtttctatggatgcaggttcatagggaggcagctggaacaacatcactgaatgatgcacgatttgatgatcccgtggctgctgcagaagaggccgcattctgcaaggcctgcgcaaggtttggctttggtctgtatctttaccacgaagacgagactccgtagggaagtggcgcagcatccacttcataagttctgcgttggttctcgcctgatttggttcaaaaggctgtggttgatccatctctctgtttatcaaggttttcagtctgtatcaggagttgaagtatcattcatactggaattctctttatcttctgaacctcttttcttgtagatacgagtcaatgaggccccgtctgccacttctttcctttttggcactgttataaagagcaaatacacgagtactcctacggttctggttccataatttttgatgttttgaacaacaacacgtgtttagacgtgaggcatggtaatagtttaagactaatctatacattgtgttctaatatctttaaactatatagttattaatagttaaagtttttattgtctgatctaaactttttcaaaacgtcaagagttatgaagccggagggagtaatgtgcaatagattaaggctacataaaatccatgaaccacagttaagttccttggcgcttgatatagatttaatggatgttcagtgtgttgctacaatcaatttcgaggcacttacatgttactccatctgtttcacaatgtaagtcattctagcattttccatattcatattaatgttaatgaatctatctagatttattaacatcaatatgaatgtagaaaatgctagaatgacttacattatgaaacggaggaagtactaaattttgatagtgttagatgtgtttggttaccaaactttagagcttataagagaagaaactttcaaaaataccaaaatttgaaagagcgatcatggcaagagaatgcttaatttgttgttctaccaaaatcggataaaaaatggacaaagtcttgcacaagttgaacaatccttaacgccttaggctccgtttgaaatagattgctgagaggattgttgctacggattatctatttaattatataaatataaattaaattaaatgttttaataaataaacctaagatgtgcaagcaatatggttgaagagattcttttaagaaaaaaataattttaatcatgaagcaaataagccgtttaaacaagtagtagtatgggcatgttttgatcaatttgttgtggcaaaagttttggcattgaaaatttgctagttggtgtttagatgcatggtaaagttttatcattttattagtaaagtgagagagagcacggctcccaacgcacttttttggtaaaatttgctactctatatttctaaataacaaatgccaaattgacaacttttactatttgttattttggaggaactaatgtaagatttttaattgtggcgttacaaatgtctgtgacttgtgaaagcatttgataatcacgttgtaaacacggatcatcgggaatcacaagcttaaaccagagctgcaactccaacgaaattcatgagtgaacggagcacggacacaagaatttcttggccctgtgccgtgcgcccgcgtgcacccgtgcaggcagcagcatactcctacagtatatacagaggcagaggcaagcgagaggcgagcgagcgtgcggcgcggcgcgagtgcgcgacgcgactattggcagaccagggtctgtgtccacccctggtcggtacacgcgccgcttctcccctcctctcttccttcctcgacccgcccgcccgcctgctcgctcgccggccatgggcgatcccccggcgctgaagaggcccaagctcgagaaggacgactacgaatccgcctactggccccgccccgccgcctccaatgcctcctccgcatccaaacccccccaatcctcttcctccgccaccgccaccgccgccacgcaggaggatgaggaggatgacatcgcggaggaggcggtcctcgccctcatcgcccaccgcgagcgggacgtcgagcgctgcaagctcaagctctcgcactaccagtccctggtactcccccccccccctttcccctgctattttgtctgataaatgttgcgatcttgatcgattctcatggttcccggtacgccgccgtagctggacaccgcggagaagaagctcgccgaggcgcaagatcggctcgcccggtatcgagatcgcaagccgcctccgccgccgacccatagggaccccaagccgtcgctgccaccgacgacgacccagagggaccccaagccatctcctccacagcacaaggcgccggagcggccgcagcttgtcatcccgggggcaaacaaccggccacccccgcgcccagagcccatgcctgggttgaagaagaccgccgctccatcatcctcctccgcatccgtgccgccggagcggcccagggcactggagaagaagcccaagcttaagatcggtactttcttttgattttcctctttaggagaaccactaccatgatgaaattatttcctcagatgtgctcatacatcaggctgcgtttttctctttacagaacagaaggagcatcagaacttgattcagagcgtgaagaaatcatctgcaacggtgcttaggttctatggcggtaccgtaatctgtagccaacacaagaggaagcttaggtgtcttgagctatgccctgtcaatgatcagcttgttgctactaggtatgtttcatgggctgtttaatgtatgccatcaatgcaactgattacggattagaggttagcgatgccaagttctccgcaaaataatgatattccataacaattcagtcaaatttcttgttaatttggaaagaacgacggatggaacatgcacagagaaccaatatctgttgtggttgtctggttggcttccgcattgttcatcctatcagttttatcacccggaagtccagaattttaaaatttgacagccgtacacgcacttgttgaattgttattattttcaatacagagcaatcttctattgggtcataacttcttgcttgcgttcctgcatgagtgaatctaaaattggactcttgcattgatgcaatcttatatttagctgatcttccattttccatcagttttgaatgaaatctctagctgacctttcatgttccatcagtttccagttgtgtttcatgctccatcaactgtttctatctatttatttcttcttttcgaacatacaagtatgaagcattttccgtgcacagtcatgttttgtacatatgtctttggttgggtgtttgccaacaaccaaagaattggttgttgacgttacatcctaatgaactaacaagctatcaaagttacagtctgtttgaggttggtaagtccaaacaactaacagtaccgatcttttaaaaggatagctacacaactatctggatagtatgaacatggaatggaattgtttcagtgcaggatgccagcaatgatgtgtttgtagattaggagttccgagtgatatactatctgtttagacggatatgcttagctaaatggtggcctttttttgtgtgtgtgttgatctccagtcacctatgaactgtggtagatttaatttaatcgccatagcttgtttccttaccttttctcttttaagaactttaatcttacacattcttgtgatgcagtgcattggatggaattgttactctgtggcaagtgcagccaaaagggtaggcctcatattactcatttcttatcatactgtagtttaagttgctattgactgactttgctgcgaataggagctctaggcaatgtttttactccatggttattttggcatgaggcctgaaagttcattcatgtgattggcatcggaaatgtggatttaatctttgtttatgaagcacatattgtgaaagcatacttaaaacccaccttagcacttatgtattccttttttgcattgcctcatgaagcatatattgtgaaatcatatttaaaaacccaccttagcacttacatatttttgttacctcacacaaaagccaagttaattggtaaatcctctcacttttcctttttttttttttttgcattgccttgcctgatgcaacttcacaatgctgagatgttaaacacagcaacttaagcaacataagaaaaactctctggttcgatggaaaacctgtaattgcaacacagtaagtggctgtaaaagaatatgccaacacttctaccaagtgacatttttaacactgatatgaccaaatcccccaaacagttggcttatgaatttaagcaaattataatacctaacttaaacatggtgtggcgtatggacattgaagtcatgacttcatacactactgttggcactaaatgacttcttgcttcctgaatctcattggacatgtagcaaaaaaaaactcttatgtggagatataaaactagaaattgatgtagaaactatagtgataatcctaccataaccacatttttttgtccatttggttttaagcatgattttacaatcacatatattttacttgcagacccgtcatctccttgctcagcacaacagattgcttttctcctaagcataggtggcctgaagatgtagcttggcatccacatggtgaattaatttttgctgtgtacagtgctgataacggcgactctcaagtttcagtgatgaatcgcaacttatcaggacaagtaagaactccgctagaagtagctcacttcttcacatcccattgcaaggttttctccatgcgacgagaaaagtcattagttgttataatccaactaaattggttccaccgacagtatagttgcatgaagtactatcagtttagcttaacttgaatgtgcaaactgataaaaaaaatataatgacacctgaatgattttcctggtggcattctatctgcaaatttgattctgaacgtctaatcatcttaaaccaggttatcacacgataggaactagagaggtagtcttttaagttattcatgtaatcatgctcagagcttcacctcttaacatgcaacttattgccagctaaatttgtactgtttttggtgcttgatcctatcatgattggctgctgatactttcttcattgtattaacagtagcatcacattaaatctttctaaatgatcacacaaaagtcataaatcatttgactatcttgtgctatttcccccgggcaaggatgcatcaagggctactgtaatgtgttcatgtcaatttgaaatactgaggaatccatcataattgtttttagggtacctttttcttaagagtaacacatgactgtgtgtattggatcattactaaaaggtgtttctttaactaatcccctgaaacagaagaaagttagttttctaccagtgaagcctcataccaagggaattattaacaacataaatttcatgccatggtctgatgtatgctttgtgactggtggaagtgaccatgctgtcatactttggcaagaaaaagatgattcatggaaccacaagaaagtgcacaaggatttgcattcttctgctgtcatgggtgttgctggattacagcagaaaagtacaatattatcagttggcagtgacaagaggattatatcatttgatctggcagctggaaggacagagtccaagaacctaattgattacaaatgcatgagtgtattaccaaatccatgtgatttcaacttgtacatggtgcaaacagcgtaagtaaaaactcaaatgctatttctgtgttactggttggttgggtttcgttttacatatcagcggaagtaaaaatgctgataaactagcatgtgatagtcctagcattccagttagagctcaagctcctgttttagtcaaatctatcaactgaaatcatgtaattatcatgttcttatgtcgagtcatttcctgtatgtccttttgatgcttgtgctgcatttctgaaaccttgtatgtgcgtttctttcttgtttcccttacagggcaccaggcaggcagcttcggttgtttgacgttaggcttaggcagactgaagttcatacactcggttggaaacaagagagcagcgagtctcagtcagctcttataaaccagtcatggtctcctgatggttggtacttatcatctggctctgcggaccctatgatccacatctttgacatcaggcacaatgggcagaatccctgccagtcagttcaagcgcaccagaagcgagtttttaaggccctttggcaccgaacggccccagttctgacctctatatcatcggaccttaacattggaatccacaaatattcatgagagaactatctttccggtgccatttttgatgcaatggagaggcaaacctttttgtagggaagtagaactctcagagaatcaagtcataggaattttgtttgttcacatattgcgcatcagtagagttccaaatggagagacttagcctactagccgcttggcttccaacattgcttcttttacttgcaacatgtgcaatttttgagctactgtgcatgcttagccatgagctttccaatcagccattgttgccttgttggagtgatactccgaggagtccccatctgaatgttttgctcctgttattacttgtgcaaactagatgggggaatcccatcccatatatgttgaaagaaagctactgtttcatgatgtctgtgttggctgtaagttggaaatgatgatatcaagtgaaaggaaccaaactgttctgtggtctgaatatctttgtgtgtactgacttgtccaaagcttggcagttggcacttgcccacttgcccaactacgttggcaaagtctagtagttcctatgtgatgtgctgactaggctgacacgtcgtccgttgtttagtttgatgtggcacatcatatgcctcttgacattcattttctttcagtcagtcgccaaatgctaccttacagatatacagtactgggcatccaagtatgacatgttggctgaagatgtagaaaatattttgagttaattttcacaaagaaaacacacccattgaaagctctttcaaattgactgaatttaagtgaaatcacaataatctgatttgggacatgcaagatgtacttgtcactggacagaaaccaaatcttgtcgcattagcaaccaatgcatttgtaagagaagcaattccatccacacatttgttatcgacatccctatctgacacctatctctcctggattctccatgctttctttcgaccttgcatggcatgcaagcatggcacctctctcccccaccaatctactaacaaagttgctctcaagatactatgcaccacaccctacggaatgaatgaaaattctagaacaacttaaccatcaactacctactgtcttacacataatcactatcaactaaacacttaaatacatctcatcaatgcaatacttagactgatttttgccgggtcaatacttgggactgattaacaagataactgaaactatgtatttatgcaacaacatttttttctttaaaagaaaaactagagcaatactgtatttgccactgctgtttgtagtcacaagaaacactaatttgcaggagagagtaatcgatgtgtacaaattgcagtcacccaattaagttaagcgtttgatcgatgtgcggtgtctgtgtccctggctatataaaccggcaggcgaaaaatacaccgggaaaccaagcctctggttggtcgcactcactcactcgcatcctctcctctcaaatactcctccaccttatcatcatcaccaccactaacaacaacgccactgcctgaaccaagaacactgccctcctccacacgacatggcttctcaaggtcaaaagaactgatttgctgtttatttcttcaattctttctttcttgtttgatttgctccggctcaattctttctgatactgataagagacgacatgagtaattgtgtgcgcagaagagaagacgagcgtcaagtcggaggaggcctcgtcggcggcggaggagcagccacctcaagctgcagctccgccgccgcgcaggggtgtgccgccggccaaccccttcgacttctcaaccatgatgaacttgctcaatgtaagcttacctcgctgccgacttatttcactaattgcctactcgtttcagcgtaatttcctcaactatattttgggtataatctcctcttgaacctaagttatccgataattaattaattagcagctacctgttcaagattgagttaattaagcaactcactatataaccaaccaggtgttgttgcttattagctgagatggaagctggattgattaattatacagttcatgcaattactagtaataattagtgagtccattgatgaaatgatgagcagaaaaaataattagatatgaataatctgcatggtaatttgtttgtttggagcaggatccgagcataaaggagatggcggagcagatcgccaaggacccggcgttcacggagatggcggagcagctgcagaagacggtgcagtcgccgccggcgcggggggcggcgcaggaggctgcggcggcggcggcgccggcgctggacccgagcaagtacgtgtcgacgatgcagcagctgatgcagaacccgcagttcgtggcgatggcggagcggctgggcagcgcgctgatgcaggacccggccatgtcgtccatgcttggcggcctcaccaaccccgcccacaaggagcagctcgaggcccgcatcgcccgcatgaaggacgacccctccctcaagcccatcctcgacgagatcgagaacggcggccccgccgccatgatgaagtaagcatagttgcaattggcgccatggctggttgagttcatcgtcgtcgtcgtcgtcgatctcgaaagcaaatgagcaatggcaatacttgttgcttccttcaggtattggaacgaccctgaagcgctgcagaagttcgggagggcgatgggcgtcggcccgtcgggcgagggcgcggcggcggccggcggcgagcacgaggaggcggaggaagagggcggggaggagggcgagtacgaggacgagtccgtcatccaccacactgccagcgtcggcgatgtcgaggtctctaaatcaattctcacttctattactgcctactctctccttttcaagacaagatggtcaaaatcaaaccattttaaatttaactaaattatagacaaatatagtaatatttataatactaaattagtttttttcttgattatttatagagtaatatttacaatacaaaatcaataattgaatatattctcataataaatttgtttaggattgaaaatgttattatttttttctataaacttgtttaaatctaaagctgtttcactttgattaaatttaaaacgttttataatctgaaatcagagggagtactaattatgcgcatttgctcaagtaaaatctgcatcttttccttcatcttcaacacgcattggcatcgttcagggcctgaagaaagcattggaggaaggcgtggacaaggacgaggaggattcggaagggaggagaggcctgcatttcgcttgcggctatggcgaggtaagcatcatgcatgcagttctcagtgaacatcttgttcagttatctgatcgattcgttgcttgtgtttgcgcagctgaaatgcgcgcaggttctcctggaggccggcgcggccgtggacgcggtggacaagaacaagaacacggcgctgcactacgccgccggctacggccgcaaggactgcgtcgccctcctgctcgaccacggcgccgccgtgtaagtccatcgcatctgcaattctgcatgcatatgcccatgccatccatcaatggacatctgactgaaactaacccggtttggttatgcaatgtgcaggacggtgcagaacctggacgggaagacggccatcgacgtggcgaaactcaacaaccaggaggaagtcctcaagctgctcgagaagcacgccttcgtatagaatgaaacaatcgaggccaggccaggccaggccagccacactcctctctctcaattcagagacaaatgctgcatttctgctctgcatatgctcctgttcatccgcaaatgagtacctgtatgcttctgtatgtatcgaagagtgcactagattattttttatttcacttgggagcaaggttaaggtgagattggattgctattctattcatccttccagagttttgtttaatgaataaggaagaaaagtaaatttcatttcagtgtttaactgtttatgtctgaatttgacatctctcattggatttggatccgtcaaaatgttggacttttaggccttgtttagatgccttggtaactgtcacatcgaatatttggacatatatatatatatgtagtattaaatataaacgaaaaaaataactaattatatagattacgtgtaaattacgagacgaatcttttaagcataattgttccatgatctggcaatatggtgctacagtaaacatttgctaatggcggattaattaggcttaataaattcgtgtcgcaatttacatgcggattctgtaattagttttgttattaatctatatttaatacttcaaacgtgtctccgtatatccgatgtgacacgtcaaaactttacacctctgaatctaaacacagccttaattccaaaaaacagattcaaattgagtagggatgcttccaactgaaatagtatagctatcctatttggggattgagatcctatgacgttactgttcaccgtaactgacatatgggtcctactactttcgggctcacatggtcctactattttcgggctcacatgttagccaccaagtcagagggaagttacgtcggaggatctcaatcccttattcgggggcgtttttaattgtatccttcaactctactactctacggccattaccgggatgccgtcgacacgccaccgccaataccatcgccggcttccatggcgatggcggtgggggtagcgcggctggctccgggtgcgtggaggcgctgttccctgtgatcccccagttgttttgggggggcgcgcctcttcacggatccagcggtgcatggtgtgattgtgggaaggctggccgcgtcgggcatgcacgcaggttgttcgacggaatgagtggcgtgattgcaatttgcagtttgtcccttttgacatatgaactcttctccatgatttcattgataaaagaatttgatcttgcgagtatttaaaaatcttcttgcgtacgagatggcatcttctccgttggctctgatttttaaaaggttccatcttttccctcccatgtagtagtacatcgtattagactaaagctgtcaaagtctcaatttgtcccagtttctccctgtccacttctgtccgattcctcctcacctcttatcgattggacgaccatggcggcgccgcgcgagccggaggtgatccgcgacaaggcggcgatgcgcgcatggtcgcgccgccgccgcgccgagggcaagaccgtcgcggtcgtacccaccatgggctacctccaccaaggccacctctccctcatctccgccgccgccgccgccgcctccgctgatcccgtcgccatcgtcgtcaccatctacgtcaaccccagccagttcgcgccctcagaggacctcgccacctacccttccgacttcgccggtgacctccgcaagctcgcctccaccggcgtcgtggatgccgtcttcaacccccctgacctctacgtccgtggcgccggtcgccgcggcgccgcctccggaggcgcgatctcctgcctggaggaggcggccggggatgggcacgagacgtgggttcgggtggagcgattggagaaggggatgtgcggggccagccgtcccgtgttcttccgaggcgtggccaccatagtctccaagctgtttaacatcatcgagccggatgttgctgtgttcgggaagaaggattatcagcagtggcgcgtcatctgccgtatggtaacaaaatctgccaatttcttctcttttttatctttccattttacatatgtgcagtaagtttttacgcattgctttgttctagtacactaccaagttctaaggctgcgtgtttacgggtacatatagcgagttaggaacaaaaggacagctttatgaacaaagtaggatatcttcaatgataacagacaagactgaattttggcttcatcgataagaagcctgaagtaaaaattagtctagtctagcggacccactggttcgcttattcggggaataatcgaaacagcttatttgcaaactaaaaataatttgtgaataaaacttttatatacgtgttcttagcgatctaaaagcaaatactgaaaaataaacttcgatgaaaaacctccaaaatcaactataaatttaaagttgaaatttaaattttggcggataaaaataagcataaacgaaaagatgaggcatgtggttaaaaggaagaaaaaaaaatcctttttacccctcaactttttggtgcaagataattggttttcatgattgcacctcttcttgtagttactagttagtgattcgtttcatgggccaacttggtatgcttagctacaactatttagagaacgggatttgctttcatttcattgccataatgtgtattttcaattgatgctccaaaggtataacttgttttgttcccgttttgatgcttcagtaacatttttaacctgtagtttttcttttccaggagaacctgtaatctttgttggttcagagtatctttcacttgctaatgttagttgattattatgctcatgctgtttccaggttcgtgatcttgattttgccatagagataataggatcagaaattgtgcgagaagctgatggtcttgccatgagctcccggaatgtgcacctatcacgcgaggagagggaaaaggtttgtctctctttcactgtatttcagaaacagcttccgcaacaaaagtttgctttgtgtgattcagttacagtattccttgtgtattacaaataaccagcaagatgatgatagtttgtaaatgcacaattttcttttgagtattcgccagttgcacagtttcgaggtgtcatatctgcctcttgtttcaattgagttttgctgtatttataactaccttgcagaactgcagaaagaaccttttttttttcgctagctcaccatgaactttgccaatggttgtattatttcttttgtaggcattatccatcagtagatcactggttgatgctagaactggcgccttgaagggaaacactgattgcaaacaaatcaaaaacaaaatagtacagacactaactgaaactggcggtcaggttgactatgttgaggtaatgtggaaggcctctctttgttgtttaattgctactggcttctgttcttagagcctcccgttactttgttgatgctggctttcttctagagagcctttggaatctagcacttgcaatatcttgtagcatatgagacggcaaaattcagtacattatcttttctatgatctagcacaagtgaacaacatactggcatactgctgaacgagtttctgattgcaatgcagatcgtggagcaagaaagtttggtccctgtagaacagatcgacggccctgtggtcatttgcgttgcggcgtggtttggaaaggtcaggctgatcgataatatcgaaatcgatacacgatcctgaggttttggggggattcacttgctgtctgctgtgaccttggcattgcgtttgaaataccttttgtttcgcgtgatgattcgcgtcatgttgtacgctgtaacaatcacagagagaaaatatgcaggagtacactgactgaaggcaaatttataagtacaaactgtagaggcctgatgctgtaacaggggaaatcatgcttgttgattacagattccgctgaagtattgctctaatttccgtgatatatactctctccgtccctaaatatttgacgtcgttgatttttttaaacatgtttgatcgttcgtcttattcaaataatttaagtaattattaattcttttcatatcatttgattcattgttaaagatacttttatgtatacatatagttttatatatttcacaaaagtttttaaataagacgaacggtcaaatgtgtttaaaaaagtcaacggcatcaagtatttagaggcggcggagggagtatatctgaacgtatgcttcccaaaattaagcatggaaatccaatacactaatgtagcaaacacagaaatgttccgttggcttctcctccatgctccagttgtcgccgaagccgctgccgtcctgtacaccgaacttacaataaagcaatacgatcttttcgaaaaagattactacaattgcaatacggagctcatcaacccttgcaccgatgattggatcgagttgccgccagcctccaccctacccaatatcgaatcgttcggcatgttccgtcgtaacgccatctctaagatattgtgctatactgctatgcaagacgtgcttgcattgttttatggagataggtacagtgatcatcaggatccgatatggtttataccaacattacagggctattgctaagcattgtgatttataaatggtctggatcattcattctagaacacatcatgtggatcgtggaacgcatcatggattttgtatgaacatggaatgttttcgattgatattttattttttttttcgctggaagttactttggttggctaagattgtcttaagaatcatgtaatacttataacaccaaccctgtcatcttccttctaatctcccgtcatcactgaccaggtatccagtcgacgagcataaccatatcaacaaaaaaaccttgagcataattggataggaattaggaagtcataagaatatgtgcgacgcaattgctcgaatcacttatgttttgtacggttcagtgcattgtacagacggcaagtaggttctccaatcttattagtgctttcgacaattttttccacgataagaaatgaaataatggtactataagggtctcgtctgtcaaacggacggagcagactgcgaaacagtgctgctctttgtaagaaccgaactctgctgttggagggatgagtgcacacgctcgacgcgctccagatacagtgaggtctgcatttctatgagacgggatatctgtgaaacagatgaacattgcagttattaattcaaagaagaatgatgacagtatctaactcaaacatggtgtaccgccgacatgaaaacacgggttagaaattgaatacaaacatgtccagaaattttggaaagaaatataggtccagacaaagtcatgactcatggacagtgctcatatcttagggtttgttcagattgtagccaaaataaaccttaccaaattttagcaatgccaaaattttagcaagatgataatattgtcaaaattttggcaggatttcttatgatttgccaaatttagcaacaaactaaacgttgacatttttttggcaactttaccaaaaaaaatttatggttgaaaatggcatcaaagtaaacaggcccttatactccctccattttaggttataagatgttttgattttggtcaaagtcaaactgcttcaagtttgaccaagtttatagaaaaaaaatagtaatattttcgacccaagataaatttattataaatatatatttaattattaatttaataaaactaatttggtaatgtaaatattactatatttgtctataaacttagtcaaacttgaagcagtttactttaacaaaagtcaaaacatcttataacctgaaacgtagggagcatgtgttattttcatgcatttagaatgcagatattgcttaacgagtgtaccttctaaggagttactgtgagaaggagttactgtgagcttatattcagtaaactggataataaggtaagttctgaacgaaattcaactccccagtgctaatgatacttcactagtgcgtttgaactcaagcaagtagctacaatcagaaagtaaaaatgctatttacttaccgccctacggaatgcaaacatctcttcttggccagacaaaattgccactaggcctgtaggagaaggcgctgcaccaacattaccttctgctaaaacatccctcctaagctttgccccttcagcttcaccttcgaactgaaaactgcataacatgacctcccatgtcaaaaatcactctgaattatgttgcaaattaaaaacttctgtaatgcgaaatattgcagacagctggaagcaccatgtacaacaaagtataaatgcaaatattacctctccaagtcaaaaagaggtccttcatcagttccttgaaaaagatcatcaatggatgaggcagctagacatacaagacggcagtgatgattgtagagctcatcaataagggtgataaatcttcttgcctgaatgagaccaagaagttcattcagcatcaaaataaacacagaaaacacaagcatctggtataattgttaacttctcaatgtcatcaccatgtttaaatagtacagacaccacacgaatccaaatgattctagaaaataaaaaaaatggagcttgaaaccatgagatatactaagatagtttccatttctcttgtcttgacgaattatttcctctcagttttcatgtgttgacacttttgaattataagatctcttccatcttccaatgttttatattcaattcagtattcacactccggaagcacaattaagtagattttagcaaactaaaagaatcagaaaaggagatagaagaagaaatactttgtcacgaatcttcatactcatagctggaatatccgatatgaaaattgtatggtagttcctggctattgctatatagtctgcagctccaacctgataattaaaataaacagtggattatataatgagctgcaatatatcacatgatcccagctcaaaataacaaatactcctgtatataacaatagaattcagttccaagtttagacggtttaaaggatggatactaaacatttttttgtcaagccacaagtgcctgatcatgaaccaattagttcccctcatctacttgcatactaaataaatgtaaattaagaagacaagatattactgggcggccacacagatactcgaagtcaaaccttgccactccattgcaacttttaggaatctcaagatacctattcataatatcaatgttaaattcagttcattttcaacagtatagagatgctttatgctatgtgcgcacctcccaaacattactggaatggtgacagaaataatgtttcctcctgtttgtctagttatatcgtgccacatagcctcatacatactccgaatgtcagaagtgagaggccaaaagtagtgaatctgtagataagatggagaaccattagttgttacatgaagatgaacttattgtgaagatacaatccagttatagaaaaggatacacctaacaattgcattgcattttatggagtcctacagtacaagatagttttagttataggacccacaaaaaggtagttttatggtataccgcgagatttgcaaaagtagattgaagttccatgcttgcaacatacatgataactcatgccatagtcaccaagagatgaatacatgattggtgaattatcaaactcaggttactgaagcaaagcagtgctatcttaccatttaccaatacattgcactgagattcaaaaaaaaaaaaaaaagaaaaagacattgcactgaatggcaagagagcgaagtcctagtgtcctacaatatgatgaagtccaatggccaccgtaatacaaaccaaaagttcttaaaagaatgtcaacagtcaactagaagattttgcaaactaaaattgaggtactgatcatgtgatctgctcacccccagcttatcagcacaaaattatttctaaaaaatctaaaaagtgtgcaaggaagtgataagataacatataaactacttattttagtctctagcacatgaaaactagaggtgtatcattttatgcagacaagtgtcataaatctcctattgctacaaacaggtagaggttaacctgagttaagccgtcagttggaattaggcggcgataatctgtttcggttccaacaagaattttgttgcagttctcgtccaacttagacaataagtcaaggaaaatttcccgctgcatcccatcctacaaaaccaagagaaaaacaaaaggtgaaagggaagcacaccattgttttaacttcaagtcagcaccttgtaatttctagtagatgaatgttgtgccttgaaaacagttagatcacaagaagatattcatgtataaataggtagtagtagtttaagccatggaatgatactttgatgaaatttaactgctaaattcatcattaactagaagaaacaaagatgcattacaggaattatttagtgtctgcacctcttggcttagttggacaattctagtttagctcctctaaaaatccaagattgctacttgagatactctttccatcatcttatatatgtgacaagttgttctgatctctaggagtaaagttgaaaacacctactgaagttcatccccaggttaaagttttttttgggccagaatatgaagtatttgataaaaaagtagaaaaaaatcataaaaaacgacttgcctgattcagatcttcaggtgctttattactggtcgaaacaagcacagttcctgtgcttaacaatctgctgagaataccagacagagctacaacggcaaatacatcgattgtctgcatagatgaagtttcccagtgtattaaaaaaatactatggataccagaaattattacattaacaatggaa

SEQ ID NO: 7215 - DNA, 19672 bp, Oryza sativa
  unsure (1)..(19672): unsure at all n locations
attttgtcacgcgtggcgaaataacaccgctagctaatactctaacccctcgtgatgtggcgcaccgtacgtgttagcaacaactacgggtgacattgtgacgttgttttagcacgtcaggcgggataccatggtctaaaggttcagatttaaaagtaaattttaaaacagcttatttttaaaataaaaaaataaaatggttcaataataataataataataataataataataataataataataataataataataataataataataataataataataataataataataataataataataattcggatgaagtagtgagcaatcagcagctgcagtacgtcgtagctaattggtgtgatgagtgatgagtgatcactctcgtcgatcggaagctccagctccaatcattcacgttttgatgatgcaagatgagtggccgggcggtcgctgtcggggaaatttaagaaacgggagccgtcggcgaactcgatcgatcgatcgaggtgccgtgtgcgttgcagctggcggcgctgctgccaaccaagctggcaggagagcgatctctgctgcgtgggtgatcgacggcgacacgcactgccctgtcttcctccctcgccgtcgtccggtcccggcctcttcgtggtcgtcgccgtccgacacagctaagattgcttgtgacctccgacttccttctcgccggactttcatcttcgcttcacttactccctccattccatctcaagtgtaattataagtttccgtgcctaactttaatcgttcgctttaaattttttttataattagtatttttattgttatgagatgataaaacatgagtatgtctaactttaatcatccgtcttatttaatttttttgtaattattatttttattgttacgagattatgtgatagtttatatgtgacttatgtttttaattaaaaaattaaataagacgaagatcaaagtactatgttttcaaataattgattttttttctaaaatataagacacaactatttaactttagatatgttgttttatatatttgacaggaaactgaggagaaatttatccctttttttcagcagtttggatacgagtaaagattcacgggtggcgggagaaaaaaatctcacgtgcaggggctcgatcccatgtacgaccttacatccactgagctactacatgtgttgtgtggttttatgagtcttacacctaaaatatattgtaattactttctaattacactataattatattaattaaggttgtactgtagtcacattcgataaattttaattttgagatgatttttttcaaaagttatataactaatccctactactgtatctgtcttataatataagaaattttgggtggatatgacacattctaatacaatgaatcaggataaattaggatgtgttatatctacccaaaatccttatattataggacaaagggagtatttgacttttgacctacaattacactttaatgacgtggtttaagtgtttgtaaattatttgtaagaggacgaatggttaaagtgtgaaagtgaatgtctcctgtcagttatttaaaaacaaattgaaggtagtaccaatctgcctcgtcgtcttgcacgcggccaaagctcatcgtcttttcagacatttacagtcgacagctccactctccatgtcaatgatttagtccagaacccaaatcaaaactgctgataagttaatcatcatcttcttttctttttgtgcactcaaacaaagttgttctagctttgctctgaattttgggcaacaatcactcaatcagtagcagtagacctgattaaggataagatgagatcaacgacgtgagtgcttgggcaaagagagggcagctttaatttgtgatcacaagtgcgagttcgttatgaatgtctgtgtctgtgtccatgtgtggtggtggtgcattttcagagaaggggattctttatagttcgctaataacaatatatacagggatgcctgtggctgatggctactgtcaccaccaacatcttgttattgttcagactaaagtgttggttgctagctcaggtttagctagctccaaatacaagtcttcactcataataatggtgttgctggtccatgcttgatcaaccatgcaagtgtggtgttctttgagttgggtgttgtcccatcaaaatcctctgtatatatatacttccatttgattcgtttgtgcggtttaagcacagtgtttagctttgctttgcttagttgatgcccatgtctgaatcacactgagaatatgccctctttgcttaatggacatgtatatgcctgttgctggtgatgttggttaaggcaattcatttctttttttttctaaccatgattgattattctgctctaataagatgagagatgcatgtgtggtgttggcttccactgtttagtgatctcagttgctaaccacctatcacaattggccagctgttcactctagctcttggacaacaatgtcattgttgcagttacaacggtgaaggagatatcctccaattggcaagataaagatcagagatggaaccaataaccaacctgcagacaaaattaactgcaagttcttccaattcttcttcttctttttttatccaagcaaacacagattgtaccaatttcattgaatacttccaattctctatcaaccaccatcatggcagaagactgctagtcttgaaaggcagttagctagttgtagatgcaatctattgcagggagattgacagattattggagcccaagtttcgtcgaaccggagacgcaaggaataaagggcaaagacaccggtcaaccatgcatgaacgtaaccatgagcacacacgcaacttgtgcctacatgcatttttcatgccagaatatattaacactattttttatcctatttttaatgatactatagtgggaccaagatggtccaactgatttgatatattaaaaataaataaatagacagttgtatacagcattgcatctgaaattcaaacttaatatgacctattctcactttaattttgcatatagaaattgttaatacattaaaaaaatagaagatatatttcttccatcataaatccatattaattatatctctcactttaatttacagatagaaattgttagcatattaaaagatataaaaagcaataactgatacagggttgcatcagaaatttcatattatttctatctcttgcttttatttgcagatagaaatatatatgtagatggctagctaaaggatttatttcattatcttatactccctccattttataatgtaagacttcctagcattacccatattcatatagatattaatgaatctagacacatgtatatacctagattcattaacatttatatgaatatggataatactagaaagtcttacattatgaaacggaggaagtagaaaaaaagaaagctaagatgcaaggagaatgccggtccatcacgtttgccatctaggcagcacactctaccagaagcctgaatgcaaagtatgcaggcaacctacccatgcagagacaaatcaaacaccaaaaaggtggcaagagatttcaaagggagagacaaatccttcttggcacgggactgatcatggttagtggcggcagcagcatcagcagccagtgattggtactccggatggagtactaattaattagctggctaacaccaatatattgcttctttctcaatcatttttcttcggtttaagtctctctttttctctctctctctggtgctgattgcaaagccactcacacgcaccacccataatgtaatgcccacccgaaagtccccacaaaatcacatggaagtcgcctcttcccaatcacaaagcatgaacaaaaaaaggagattgttccacagctcacaaaatcagctaaccccccttattcctgcctccctccctccagtaaccaaccacctgtaccgggcgcgaaaggacgaatggtctctcgcgctcggttagttcgttcgatggtgtacaatggactgtccagatcatcttaagacggcatttgtattgtcctaagtcgaacaaatggtatactcccttggtctatcttgaccacaactccataccatatgcatacatgccttgaaactgtggttcgctatcctgatatcagataaaaatcgctcacgagcagtatcttcggattttgtagaaaccattgataaaccaaaagaaaaccgatgaaatccgaacaaatctggaaaaaaattaataatccatttttattttaattttttaacttcacacaaaaacccgagcggtttatgttttagacatggtccgaaaaaaccagatttcacgaaatcagaaccggttttctcccgggataataaacccctgctgggaacaaatatccatatcgtcgcaaaccgaccgacgtatcggacgatctcgaccgtccgataccgatcgggcggtgcatggtagaggacccggatccgggaggaacagtgcttgccgaataccgacggcacgaaaaggtaaagtgcacacatgatagtgcattacattgctactactacatgatatgcattacattacacctgtccccagatgcgccaggcagacgggcctcacgcctcctcacgggctcacgcggtcacgcctataaaacgcgccacccctgccctttccacgcatcatcacatcatccactgctctgcttctcctcttcttttcttggcttgtgctctgttttaatttctttgcaatgatggggaggcagagctcgtcggcggcgaggagggtggtggtggtggtgtgcgcggcgatggtggtggcggcggcggcggcgcagaagtacaatgcggtgtacaacttcggggactcgatcacggacaccggcaacctgtgcaccaatggcagcccgtcgcagatcaccttcacccagcctccctacggcgagacctacttcggctcccctacctgccgctgttgcgacggccgcgtcgtcgtcgacttcctcggtaactttgattctttctttgattccttcgtcttcttggtttgcttgctccggcgagctgacggcggcggctggtggttgttgcagcgagtaagttcgggctgccgttcctgccgccgtcgaagtcgacgagcgccgacttcaagaagggagcgaacatggcgatcaccggagccaccgccatggacgccaacttcttccgctccctcggcctctccgacaagatctggaacaacggccccatcagctttcaaatccagtggttccagcaaatctcctcctccgtctgcggccagagtaataatcactcactcactgttcttcccaccacacaatttcaaaatctctgacaagaattcaattcgattcgattcgattaaatttcagattgcaagagctacctggcgaactcgctgttcgtgttcggggagttcggcggcaacgactacaatgcgatgctgttcggagggtacagcgcggaccaggcgagcacgtacacgtcgcagatcgtggacaccatctccaacggcgtcgagaagctcatcgccatgggcgccgtcgacgtcgtcgtccccggcgtgctccccatcggctgcttccccatctacctcaccatctacggcacctcctccagctccgactacgacagcctcggctgcctcaagaagttcaacgacctctccaccaaccacaacaatcagctcaagaccaagatctccgcgctccaatccaagtacaagtccgcccgcatcatgtacgccgacttctactccggcgtctacgacatggtccgcaaccccggcaactacggtacgcacaccactccgcttacactgttacacaaaaataactaattctacggccctgtctagttccaaagtttttttctaaacttccaactttccatcacatcaaacatttcatacacacataatttttctatcacatcgtatcaattttaaccaaaacttctaaacttcagtgtgaactaaacacagtctacgtatatattgcccgtacgttgcaacgtgatttggattttttttaaaaaaatttgtgcacgagggagacagggggccatgtgagccgtagcaagattcctcagttttgtgccagtgaatgagcagtttgcttaagtagggtagtagtgtccgacatgggcaatccgagctcgtgattgccattttatatggggggaacagtagtcgtcttgctccaacgactagctagacacccaaattatgccagattaatggcagatacgcccggttaggtgtgtggacttatgtttgtacctacgaatccaactgcacgcacgttcctccgttccctcaccggaactcaccccatgttcccccaactaaacacacatgtgagacagtgtcaaacgactacccccgagcagtggcgttttggcagtgtgcatcctactcctttcgttctgaaatataagagattttaaacggacgtctaaattcgtagcactaaaaagagtcacatccattcaaaatcgtttatgttttatgacggatggagtagatgatacagagaccaaagatgattaaactgatgagctatatatattttttgacatgtaggatttagcacggtgttcgagacgtgctgcgggtcaggcggcggcaagttcaactacaacaacaacgcgaggtgtgggatgtcaggcgcatcagcgtgctccaacccggcgtcgcatcttagctgggacggcatccacctcaccgaggcagcttacaagcagatcactgacggctggctcaacggcccgtactgtagcccggccatcctccacagctaaggcaaaatgactggaaagaacgagccattagttaatttattactttattattaaggctggtgtttattaattaagcgggaattaattaaaggggaattgtttgggttcttgatttttatttgggtggcatatatggtgggtggtgtgacggtgaaatggtttacttgcgttgccaaaaaagcaaagaaagcgatggcatctgtagaataaatgttggttactgttgtaatttgataattgtttctcttccagaatcaaatgaatcatcaatggtattatactcagttattttttttcttttgctttttagaaagagacttttttgccatggcagcttatgtttggatcttttgcctggccaggggcatgtggtctgtgctttaggaaaagcaactgcagaaaattcactctgatggtcatcctgtctgagacggtcttgtcattattagtcagagactctgaaagtgaaagtgacagtgttttcttctcattgcaaacttttagctaactaaccactaggttgatgaacaaattggacactcctactggggaaggaaaacctgagcaaatttatccaaggatagatagatatgcagcatatgctccaagtacaataatgcaaaaggaaagcaagctactcttgcatagtgatgcactcgctctcctactgctgaatctagctagttgcatcaaatcgacttgaatacatgagatggagtaatatgcagggcatgtgggtgacgcaagtgggatggcctgaattattcgtagctgttggaattaaatccaacggcgacccatccttggaaggaggagacgaatcttcgtatttgattgcctaacacatctattgattatgatagtgatgcacatttgcaaactaggacagggcacacaagcaagtacaagcatgaagcatcaatcagagcggctgatttatacttacataaacgcagtaaacaaaaaaaagaaataaaaacatggcatgcgtaggattgaaacacagaaccaagcctaccatagaggttgaaggatgttacgtatagcgaaggttaaaaaaatatattcaaaagtacgaagcatagaaactgtgtgttaatttgtgatgcattctactactatacaacaaaactgcttcacaagggcacatgatgagcattcctggcaagaatatactaccaagttctgaagtcataagcaaatgagaatgtgacaagaatgtggaacaagagctctgtgatcccgtgtatctgacgcctgaaatcggcggtgttggctgcctggacggcgcgccccaggcaatgattgtgcctggtgaagtcagtgaatgctcgggcaatccattcgaggcgtcagtggtcaaccattctgtcatcatgttgcctggactgtagtccgtgtagggacgataatttatcggtcgtcagattcagacaccgcagatggaccacctgtacattccttccttcgatgaagctccagcatctttacctccgggtggcatagccctggatgatgatagatttgggaacatgttagcatgcgtcagctagactgaaagatcttaggcattagtgtccttgagaaaaacaatgctttgcaagtttcagaaccagcttctgcacaagcacatccctcacttttattcatcttcctaacaagagtttggttttttagtactatgcaatacttgtgcaggttaatgttaactttattgattctcagcttcacagacctatatgggctacggcctttgtgatgttgaagttgatcaaaaggaaagtgtgatgtgataatactttaagggccacgcaaatatatagataaggaaaaaagataattcaccaagcacttccacttcaaatgacatcaatataagagtcaagaaagtaaataacctgaacattttggaatatcccaaacagcaattgaagactctgtgcactcaggtgaacaaagtgcatgtgtgttctcatggttgacgttcatagcaagcatccaggatccaatagtaacatcctcattgctgaacatacggaaactggagaaacatatgtgagaatccattaaacaaacatataacgtgactcgatcgtggatgaagtttaacagtgatgcaaaatgaaaaacatgaatgcaacaacagtcttatgtacgaaacttctactgctgaagcccatgacataaccatgtagtatgtttactttaggctccagggcttctgagtttaatatatcgtgagcaattaatcaataaccacacactatttcccttcgctcttaatttgttgagccagaaaagggaaagttttgctgaaaagaaacaccacttcttttacatgagagggctaaaactaccaagaatagctcagaattgtgggaacaaggctaatatgaaagccagtaagacagcagtaacagtcaatacaacttctttacagaagtatatggatttgcagtgcagtagtgttgctcatgttagtcatacagtgagcggtggcctcaccatcactggccatcaaagcagggaaaccatagacccaaaccaacattgaatactatttcataggctaactggtttgagaaggcaagttgaagaatgctgcttcacaataagataggatgagtactgttaattacctgttgttcctcaaggcaaccaagcttgccaccacatcggctgataaagcgtaaataggcccatatgcatgaaggaagtattctgatccgagcaaaaaggattgtggctcatacctgcatttggaaaaagagcagaaacaatatgataagcagtcattgatgaatggtacatggaatatttttgctgtgtggaacaatagaaagtctgaagtccaaacagcatgtggtatactcagcatatatgccctcacaccatttgccacagcaacatgccttggttatagaattctgtctatactaccctaaaagctaagctaacaactgtcttaaaactataatagcaaagaggaaactgaaaatcacgttggagggaatagactcacaaactgaacactttgtgcttgcaccaacttgtaggatcacaagagtgcttgcacagctaagctagcaatattttaagcacagattcaaaaatgacagctgcactggtgaattggagggtggagcgtgtgacaaaatacaaaactgatgaaggatatatatgattttctttgatcctcgaataatactgataagatgttgaacctgacaaaagtcgttaggattcaggaatcctttatacttacatagttcatccccactaagtgtagttaatgctatttctctcctctcattaagccacatcaccccaattatttctagcctttggatgatagatctataatccaaattgtctcttctttcttctctcttaaaaacatgcaatctcaattatttttaggctcaaaattgtatcaaattgttttagttttgataatcaaattacatcttatttgtacatattatgcaacttaattttccgcagcaacgcgacggagtattcatctagtttgggatacatgcgcattaacatctgaaaaacaatcaagtaaacacgttccttgctaatcctttccttcgccttccaaccctacagatcaagtgcttgctttacacaccatatctagtgtggtctgtgcttaactttatgagaaaccatccggatattgaggtaccagcagttctggttttgtacaatataacatactccctccgtttcacaatgtaagtcattctagcatattccgcattcatattgatgttaatgaatatagacatctatatctatctagattcattaacatcaatatgaatataggaaatgctagaatgacttacattgtgaaacggaggaagtaaacacgtaattacgaatctgaaactgagttattttcagttcatatttatacagtgatgaaatattttttgacaccataaaattattaacttttttgtggaggtgtgagggtcgcatctggacgaaaaaatttctttattatctaatttacatttgcttagcatgagccacgatgctgtatgcatttcttcatagagttaaactttctcaataaaaaaaacaatatggcataaaaggggttcattatgtcatacaagactaaataacagaactgaccatttcagctttgggtcagtaaaaacaggccccttcttcatgcatccaatgtatgtttgtgtatgtgaacgctccttagccaaaagcaatgaaagtctatctgcagaatagatatcagtaatgaaagtgccagccattaaaaaaaatatgatatccaagtcaaaatctgtaagaggatatgtagggcattggtatgcacctggtctcaagtagatatcatcatcagctttaacatagaagtcagagtcatacaatgcatacgcagccttaaagtaagctaacctacaacataagaataaatcagcatctttctgaagaaataacaaaagcatatgataatagttctgctatttacgttttgtacggaagcttgctatactcctcctccagatctaaaagcacgaaatcatcgtattcttgaacctctctttctaaagctgccatcttagacttgtcattactttttccaatcacaaatctgaatgccagaccagttgcttcctccaatctgtaatacagtgaacacaaaaatacaactattgtaatggcagttagccaaaatcaccattaacggaaactgaaatacagaaacagagatggtgatgatcatctctttattaagaatggttggacttttggacaacaaaagtccacttaggctgaaaccgaagcaaaacagttaatggctgctcatctactaggcagcatggagctggtttcagctggcaggccgctttagtcaaagtttattgaacctacgaattaaatatattccggaacctccatgtgcattttcatgtacattgtagacttatagttggatctcacgacataagtactagagaaaaaaaaaactaacaaatccacatgatcaatcccttcttcaagaatagcagcataattcttcctcgaaaacaatgagaacagatggaatgaattaagagcaggtacaatagcaggctataagctagctgtaaacatattttaaagagataaaggaagagagagaagagcagcgggctacagatttgtagccagctacagcacggactccaggacataatgtgtgtatggtaggtgggacattgatagtatagtaagcaactattgtatgaattggctattagattggctatagatgaattagagctagcaatgggccataccaataagcagatctcactaaagcaaatacaaccttatagtgatgagtgatctctatctcatgtttatttgacaacgaaccgtaaaattacatctaagatcatagaaatgaacaaattagattacctacgtactaaaatctaatcagtaactatttccgctccactcccgtaattaggtaaccagcaacatcaacagttgaacacctaaaactaaagccagatctcgagcaacacaagcagacacgaactagcaaactgtgataccagcgactaaccgaaggagaccctgccgatccgcggggagccacgtccgccgcagcgcgcgtcgccgcccgacggagccgaacccggtgaagatcccgacgaaggccatcaccttgtgcctcccgcgcgacccggtggcgtgcgacgccgggagatccacggcggcgcccgccgccgccacggccccggcggacgcatccccgggccggcggtcccacgcgacggagacggagagcgggcgggaggagtccgggcagcgggcgcgcggcgcgctccccggcgaccaggagaaggagagcgcggcggctaggaagcccgcgagggccgaaaaggaggcaggcggcggaaaaggccggggtggaaaggatgcggcggagcgtggcgcggcgggaggtggtcgccgaggagaagaccttctgcgagctcggcatggcttcggcgaacttgccgccgcgccgccgcgtgggttgacggcgaggcgcgccggatcgaacccgggggagacgaggagggggaaggggtggtggtggacgctgggtgcggccgcgtttgctgcttctcctcctttttgttttgagttggtagagagagagagaggggctgtgttgagcccaactggtagcccactaagattcagcccaagatgatttcaccggcaaattttggagggctgtaattcgaaatgggcctagaatttcgttcgaattttatttgaaactggaattgtacgtgatccttctgttgcgtattataaaacgttttcgttttgttctcaatcaagtttaatcaatgtagcaacaagttcaaaaaaaaatgtagcaactcttgtagtacaaaacagatatatctctactattataaaaattaaagttgtttttgcggtattttggtacgtcgttcgtatttgagctgattttaaattcgttcgcttttgaaaatacaaattcgtattttagtcggattttaagttcgtttccttttgaaaatacaaaagaagtcatataagaaatcccttttaaaaaacttgcatgctaacttgagatgaatgttgaactcctaattgcagctcatgattttctagaaaaaaaatatctaagcgaattcccacagtggatttcaccctagccaaaccgtataacaataataaaaaaattataatagcattcacccgttacaacacacgggcatcttttcaagttataaatatatatattattcggtcgtagatttaatgaaagtaatctggtgttctatatgttaatatatttttttttgaaaatctttggtttaataacttgaataaatttggcttgggataggaacgaagggagtatataattattttttctagttgcacacatacaactattatcttctttttttccgtttacatcaaatgcgtactcaagtgcttctcctaatacacgttcagggaaccggagatgaacaacaaatcccaacaaactgaattttattcaaatccacagcgattacaatggtaaaaccaagttacaacacaataattactgtattcgagccagagaaaattgtccgacaaatcaattgcagcacggttacatctctgctagctcttctgccgccgtcagctaagttagcttaactgcggcgcttggtcttgcggtggtggtggtggtggtcgtcgtcttcgtcgtcgccggcggcggcggcggctttggcgagctcgcactggtcgatccactcgctgtagacgtcgatgggctcggtgagcgcgtgggcggtggtggagtagcgcgcctggcagacgaaacaggaggcctcggcgatcatgtgcttgatgtcgatgctgcactccaccgcgccgccggggtcgcagaacgggcagctgaacgccgtctccagcttcggcgccgccttcttcgccgtcgccagcatcttcgacacccgagacttcctcttccccatctccgactccgacgccgacgatgcccttgctttcttgcttctgctcccggcggcgaatcgatcggcgaatgccaaacgattgatcgagaaagaagaatgcatttgggtttttccccccnaaaaaaagggggggccccgcgggggcgccgcgcgtgcttatatcgggagctcttcccagttcgcgtcggactcggactcggactcggactccttcacgaacacggcccgcattaagcaaattaagtgtccaattagtacggactaattaaaatcatttcttccatatcgattttgcaaatttgcagttcgttctgcggctacacttgacttggatcaagagatgatgattaattgattgattattaattaagcctagtgttttcttggtttggttcatgcatccatccatggcggcggcaggtggtgcagttgatcgatggttctagtggtgcaggatgggagggtggcagtagggtcccctgagccagccgccggcgacgagccggttcgccgcctccgtcgtgtggacgccgtcccagcacacgtgcctcgacgggtcacggcacgccgccgcgcccttcatcccgcaccgcgcctcgaactcgtagttgtactccccgccgccggcgccgcagcacgccgtcatcccgctcctgaaccctgcgccgccgccgccgccgccattgccacccccatcacatcagatcacaaccaccaactcaaaccaaacatgcctctccaagatcgattaatcggtaccgaagcgcgccggcgtgtgcagcatctgggcgaccatggtgtagtagtcggcgtacatgatcctcaccggcgccggcgccgccgccgccgccgacctgtacctggcctggagtccggcgagcctcgcctgcagcagcgcgttgtggtggatggccagatcgttgagcggccggaggcatccgtgctcgtcgtagtccgactcgttgctgctccggagcatggtcaggtagagcgggaagcaccccaccggcatcacccccggcaccacgatctccgccgcgcccatcgcaatcagcttctgcaaacgattgcaatcgcgcgcgaaagatcagatcgaccaagaaagtgaacaacattttctggatgattcattggttggttggttgattgcctcgacgccggtgatgatggtgtcgacgatcttgggcgtgtaattcctggcctgatcgacggtgaagccgaagaacagcatggcgttgtagtcgttgccgccgagcgagccgaacaggaagagtgacttggacaagtaggctctgcaacctgatgaacacttagagtaattagctcgtgagcgattgattagctgaagaaaaaatgggagtaattcgatcgatttgaattttgattcagatttagaatttgatttttaccctgtggttgtgtggcgcagatggaggggagaagatggtggaaccactggagctggacgttcatggcgccgttgttccagatcgggtagccgaggccgatggacttgaggaagtcgaagtcgagggcggtggcgccgacgatggccatgttggcgcctcgccggaagtcgccgccgccggcgctccgcttcgacggcggcagcagcggcaaccccagctcctgcgctgcattggcaatgcaggcgaatcttggcatcaatcagcaatggcggcggtggcgacggcggcggatgcgtgtgcttaccgaggaagtcgacgacgaggcggccgtcggagcagcggcaggtggggtggccgaagtaggtcatcccgtacggcggctgcgcgaacgtcagcagcagcgtcgccgccgccgacttgttcacgcagatgttccccgtgtccgccagcgagtccccgaacacgaacatggcgttgtacttgcacctcatcccaccatcgccgccgccgccgccgacgccaccggccaacgccggctgcacggcgcaccagcagaggcagcaaaccaccagcacgctgccgacgacgtcgacggcggcggcggcaagcgcgcctcctcgccgcgccatcactcgcaacgccacagctcagtgacgacgcgagacagtggcatacttacattatatacacttggtcttggttggtttaatgagcagtgacgtcacctcgccgccattgttgctgtgcttttgtacacacgtacacgtctgatatctcgtcgtcatcgttgggctaaggctaagctgcgcaacgtttgcatgttgcaaccgatagaccgggctgggccggcacgacaaggcccatgggccttactgggctatctcggccggaaagtgttctgccgtaaagtaagttcactttgactcccttaactagaggcttaatctaattcgtatccctaaaccacaataccgggatatctcgactccctaattactaaaagagaaagactacacaacggtataccgttgaatggtataccgcttatcccccatgacgcggccccgcgtgccggcttctcccgagtatgtcgcgtgctgctaggattatcatcacgcatgtttgctatgtgtatcagtgtatagtcttgttcctgacagctagctaatacccagcatgcctgtcctgcctttgatactagcctagctattaaataaaaccgaaagtactactagcttgctgtgcatgtcaaatccctgtaatagctactagtagtcccgtaccctagccatgtagggtacttattatggcagagcctagtagcctagctatgtgtttaagatgggttgcatctatttgcatgtgtcctataccatgcatggattagaccagacaaataattacctaaattatatatggatacaatgtattctaattagatatgtcatgttgggctcttggttataccacatcttagaaactctagtatgtgatatatagatgctagattatcatatctgatatccaagtactgggtcgaatacctaggtaccaagtatgaaacctataaatacaagatctgatgccgagttatcgggtctgatacctataagtaccggatccgataactaggtatcgcgtctgatacctatgagtaccagatcggatactcgggaatcgggtatctgatctgatacctatgagtatttgttctaatacctatgcgtaacgggtcgaatacccaggtaccgagtatgatacttatgaataccaagtctgatacctaagtatcgggtttgatacctatgagtaccggattcgatacctaggtcaggtttgatacctatgagtaccagatccggtatctcgtatgatacctatgagtatcggatcggatacctgggtatcgggtatctgatctgatacctatgagtatcaattctgatacctgtacgtactaggtcggatacctaggtaccgagtatgatacctatgaataccaagtctaatacctaagtattgggtttgatacctataagtaccggattcgatacctaggtcgggtttgatacctatgagtaccggatccaatacctatataccaggttaatacatattagtagcggatctgataccaaatatagggtgtgatggtaggagacttcagacgtgataccactaattctgatatttatgggttatatacttctattcaaccatcaaataaaaagatggaccatgcatagctaggccagaaagtacagccaaacttgctcatgtgccgctgagtgcttaattctaacttgctgacatgctttgtttaggctcatgctactagctctagtgcttaattctaactttgctagttgaagcaggtgtgagacccatatggacctaaagaggtgtagaagtagtgttgtattagagtatttcatagctattttgtactgtaggagaaaagagacctctcgtcagtcgtcactagtcagcagcctccatgtgaaaggacagcacacgacatgctttcagagagaaagaatcgatgagtgattggtaagtataaattataaactataccgttgagacggtacaccatcccatagtttttctcttattaaaaccggtacaatttaactcggtggttttcaagagcggtttcgttgatgtggcgtctacatgacggtattaatctggcatgtggcattgactttatgccatgtcaatgccacagaccaggtcaacagtgccacgtggacgtcacgttaatgaaagcatcctccaaaattatcgagggagttaaattacaccgatattaatagttatgagtcgagatatctagtattgtggtttaagcactggtttaagagtttaagagagtcaaagtaaacttattccttctgccgttgttgtcacgtacagccgtacaggagagaggaaattcggatggttattggtggctcatctgggtacacactacacagtattcaatggcgattcagagtactacacggcattgcatcattcaatcatatgcaacctggtagatcgatcagggagaaggcaccgcatttggaatctatatctttactcttcataaagaaactgattttaagccaaactttactctttagcatgtaacagtagtagtaagtacaggcttaaagatgcttaattttgttcttgcagaagagtttgttagccttggacagtaaggtggagaagccaaaataaaaaaaaaaaacagacagaaccaaaagggatcctgcattattttggtttggtatctaaaactggggtgcatgcatcatattcagacttaaagtttggccaaacttctttaataaagaaactgttttttttttccctgtaaataaactccaaagcaacatgcacagtcactcactctgtgtagcatagtttctgtaccagaaaaggaggtgaagcattcattcactagttccatacaagcatgtggtcatgcgatccaggattcctaacttgtattaaagtttttttctttctttttttgagatggcagcaaaccaagttgatgagcttagataagatcttgctcgcatttatgatttcatccggatccagcatgtgcgtatgtgaccatctccaaccaaaccatgcaacaaattactaagatttaattaattaattgcaacacataattaaattgcctcccaatctcatacatactacacaaatgtgcattacctaaaacaaaaacaaattaaccacccacaacgaaaatcaactaatcaccatcttattcatttcccagtcgatcgcaagatgtcttcttcttcctcttgctatccatttttcttctcttcttctgctaaacaaatcaaatcagcagcag

SEQ ID NO: 7216 - DNA, 16095 bp, Oryza sativa
  unsure (1)..(16095): unsure at all n locations
gtggggcaagtacggggcggagatccgcgtgtcgcagcagagcgcgcgcgtgtggctcggcacgttcgacaccgccgaggaggccgcgcgggtgtacgaccacgccgccctccgcctgcgcgggccgtccgccacgaccaacttccccatgacgccagcggcgccgtcgcctcctccctcgcgcgccacctacgccggcgcggcgtccgggtacgacgagtccagcgacgagtcgcagctcgtcggctcgccggtctccgtgctccgcccaatgccggcgcgcgcaacggccaagaaagaggccaagaaagaagacgactccgcccccgatatcctcggcatctccgccggcgacggcttaatctctccgttcacatgcgacgtcctgaatttcccaccgcccgacgaggacatgtacggcggcggcatctctttcggcgagccgacaccgccacccatggtgttcgacgacgactgcatggcgcgcctcggccacgcccccaacgacgacgagcacccggtgacgagctcgtccttcctcgacggcgatctcggcgacctgccgtcgtggacgaaggtggacggcttcttcagcgacgtcggcggcgacgacctgttcgccgccgagccgttcccggcgctctgagactgacagttttgtcgcgagctttgtctacgtacgtacgtgtgcttgtgtagtgtgtgtttaattaattcgtttattattagcgattgcaaatatttcttgtgtcaccgtgagatcaccggagatcgccgagggaatacaaatatttcttgcaaatatatatcaccggagatcgccgggggaaatgcaaatatttcttgcaaatatatatcaccggagatcgccgggaatgcaaatatctctttgcaaatatatagcggcggagatcgctggcaatgccaccggtgacggcagcaaaccggcgtaatatagaagacgcgccggcgtaatatagaagacgctgccgatattatctaaccttcggatcccatgcataaaaagtgcatctggcgggttcggagataaaaatatccgactccttttgggcttttttcctttttatgttttctttttctatggttggaccatgtttcccgcttggttctccgtgcccagtgtagctaacgggccgatgtaattgtgccgtccaatgattttagacccaacgtgcaccgtgcgaaatagaataagttcactttggatctctgatcttgacaccaaattccacttggtgctatcagtctgtttctacagtggcaccgactaggacaagaaattgggctagattaaaagcccataatttacacggacacgaaagttttggcccatgttgatgaataaggtggaatcgaaccctttcgaattatttttcatagttttcaaattaggaggattcggagattaaaacatcggccctcttcattatttttttctaccttttgccatcatggcctgataactttgggacaactttggttaatcgactcgaatattacggacgcaacaatcgttttaatatatcagcaggcttatacttgaaaaaaatcagcaattgcaagcacatacgtaattaagctcgtattaattggcttgtaatttacaaattttcccttgttttcctcaagttttgcccttttttgctgtcatcgtaatttacaagtattacgccttacaaatgcacatgaacgaatgaatgggtcgacgaattttgcaagttattaattgatgattgttgtttgattaaattcaccacgcttcttcgtagtggccacaatggcggcgacggaggctgtgacgaccgacgacgcgacgatgatggtagtgtgtagtgtgtgtttgatttattcgtttattattagcgattgcaaatatttcttgtgtcaccgtgagatcgttgggggagtgcaaatatttcttgcaaatgtatatcaccggagatcgccgggaatggaaatatatatcgccggaggaatgcaaatatttcttgcaaatatatagcggcagagatcgccggcaatgccgccgatgattgcggcgagccagcgtaatatagcagtatcttatctcagacgccgtcgacattatcgcgtgaagacatggatgtatcgagcagttagatacttagatcgccggatcacatgcaaaaaaaaaagcatctgcggggttcggagataaaaacttcgaccccccatttggacctttttccttttcttttaatttcgtttttctcatcaggttggatcggcagtgcggtgattttagtcccagtgtgcaacatccaaaatccactcggtgctatcaggccatatccatagtggaaccgaccaagcctagaaattgggctagattaaaagcccatagtttacacggacacggaagttttggcccatattgatgactaaggtggaatcgaaccctttcgaattatttttcttggttttcaaattaggagggtttggagattaaaacatcgaccctcttcagtatattttttctacctttttccataacggcctaataactctgggacaactttggttaatcggctcgaatattatggacgcaacaatcgttttaatatatcagcaagcttatacttgaaaaaaatcggcaattgcaagcacatacgtaattaagctcgtattaattggcttgtaatttacaatttttcccttgttttcctcattttttcccttttttgcggtcatcgtaatttacaagtattacgccaaatgcacatgaatgaatgaatgggtcgacgaattttacaagttattaattgatgattgttgtttgattaaatttttcacgtttcttcctagtggcgacaatggcggcgacggaggttgtgacgacggacgacatgacgatgatggcagtgtgtagtgtgtgtttgatttattcgtttattattagcgattgcaaatatttcttgagttaccgtgagatcgctgggggaatgcaaatatttcttgcaaatgtatatcaccggagattgccgggaatgcaaatatatatcgccgggggaatgcaaatatttcttgcaaatatataacggcagagatcgtcggcaatgccgccgatgattgcggcgagccggcgtaatatagtagtatcttatctcagacgtcaccgacactatcgtgtaaagacatggaagtatcgagcagttagatacttagatcgtcggatctcatgcaaaaaaaagcatctgcggggttcggagataaaaactccgacccccgtttggacccctttttttcttttaatttcctttttctcattaggttggatcggcagtgcggtgattttagtcccagtgtgcaacgtccaaaatccactcggtgctatcaggccgtatccatagtggaaccgaccaagcctagaaattgggctagattaaaatcccatagtttacgcggacacgaaagttttggcccatgttgatgactaaggtggaatcaaaccctttcgaattatttttcttggttttcaaattaggatggttcggatattaaaacgtcgaccctctttagtatttttttctacctttagccatcacggtctaataactttgggacaactttggttaatcggctcgaatattatggacgcaacaatcattttaatatatatgcaggcttatacttgaaatgaaaatcaacaactgcaagcacatacgtagttaagctcgtattaactggcttgtaatttacaaattttcccttgttttcctcaagttttgccttcttttggagaataaaatggaattttaggtcatcgtaatttacaactattacgccttacaaaggcaaatgaacgaataaatggatccacagattttacaaggtattaattgatgattgatgtttgattaaattcacccacgcttcttcctggtgtcgacaatgatgacgatgatggcggcgacgaccgacgacgatggtggtgtgtagtgtgtgtttgattaatttgtttattatttgcgattgcaaatatttcttgtgtcaccgtgagatcactgggggaatgcaaatagttcttgcaaatatatatcaccagagatcgtcgggactgcaaatatttcttccaaatatatatagctggagttcgccgatggaatgcaaatatttcttgcaaatatatagtggcggagatcgctggcaattccgctgataatggcggcgagccggcataatatagcagtatcttatctcagacgccgccgacattatcgtgcgaaggcgtggaactatcgagcagttagatcaccgaatcgcgtgcaaaaaaaatgcatctatggaatctccgaacccccatttgaacctttttctttttcttttagtttccttttctcatcaggttggatcgaacgtgaggtgattttagacccagcagtgtgcaacgtccaaaatccactcggtgctatcaggccgtatccacagtggaaccgaccaggcctagaaattaggctagattaaaagcctataatttacgcggacacggaagttttggcccatgttaatgagtaaggtggaatcgaacccttttgaattatttttcttggttttgaaattaggagggtttggagattatggggctgtttggatgctatactaagtttgtcaccattcaccatacatttataccacacttgcctaagttgtggctttaaaaaagaaatccacactttgttgagttgatgacgtgtagggtcataatatatgagaaggagttttgccacaagtatggctatgaaccaaataatagactaactttgtcaaacttgcctaatataaagtgtggcaacctatggcaaactttgggagcaaaccaaacaacccctaaaacaccgaccctcttcagtattttttttctaccttttggcatcacgtcttaataactttgggacaactttggttaatcggctcgaatattatggacgcaacaatcgttgtaatacatcagtaggcttatactttaaaaaacagcaactgcaagcacataggtaattaagctagtattaattggcttgtaatttacaaattttcccttgtttttctcaagttttgcctttttttgcgggagaataaatggtattttaggtcattataatttacaagtattacgccttacaatggcagatgaacgaatggatggatccaggaattttacaagttattaatagatttgttgtttgattaaattcacccacgcttcttcctggtggcgacaatggcgacgacggaggcggcgacgaccgacgaggcggcgacgatggcggggcggtagcggacgaagaagttgttcatccgcttctcgtggaacaccttcaccttctcgacctgcacgtccatggccatgaacaccgacgggtaggtggcgtacccgtcgatcttcttgatgagctcgtgcacctcgccggcgcccctggacccgccgcgcacgacgccggcgcggcggaggatcctcacgtcggcgacctcctcgacgagctcgttcatcagttggaagtagcgggtcaccggcttgctctgctcctccagctcccgcgccaggaggttcctcgccaccgtggccagcttgaagtcgaacaccagcgccggcagccgcagcgtcgcggcgtcctccttgaactggaccacggcgcggccgtcctccacgccggcctcgagacggacgcccgagcggcggagctccttcgccgtcgggatcctcgacgtcttgccgcctttcacccctcccgcgccgccgccggcttccgacgacggcggaacaaggctggcgtgcaggcagtccaggagcgtgagctcgccgaagatggcggcgtcgtcgggtttcttggcctgttcgtccttggagaagaacggcgagtagtacgagcagaacgagcggatcacgccgtcgaaattcgcgcgcgcgaatccgagcttgtattcccggagcgccttcgcgacgtcgtccttgagccccgggatgtcgccggcggcggcgtggaccgccgcctcggcgaggtcggccacggcgagcaggtgcttgatcgggagctggttctcgagcttgatcacgtccgtgacgatgtcctgcatgtgcgtcgccttgaagctctcgtcgacggcgtcacgcctggcggcggccgcggcggcgcccttgccgccgccagtcgccgccgccttggtgagccgcgggaggaagccgacgacgaggaagatggcgtcgatgacctgcttgttctcctccgtgccttcgtcgggatgctgcgtcctcttcgccagctgatcatcctccgctttcttcttatcctcgtctgacacataatattcgagtaaattttgtcaaattgctccaaccaactacaacgctcttgggttcgtttgaactccattaaaacacttccttcgtttcaattacaagtcgtattattttttttctaattatcagcatttacaatactgaattagtcccattaaaactaacatttaatatgcttgttttatattgaaaatattgctataatttttataagcttgatcagaacgactttaatatataacgccgttgatttattgataaacgtttaaccatttatcttatttaattttttttgtaaatataaaaaaattatgtcatgcttaaagaacttgacgataaatcaaatcgcaattaaataaatgataattacataattttttttaataagacaaatcgtcaaatttatcttaaaaagttaacgtcagcaataaaataggagttaaagtatataagaaataagattgaatgtgatatttactacttcctcagtttcacaatgtaagttattttagcatttcccacattcatattgatgctaatgaatctagatagatatatatatatttagatttattaatatcaatatgaatgtgaaaatgctataatgacttatattgtgaaacgaaggaagtagtacggactatctatccagattcatatctaaagtagtgaaaaaactaaagtttttcatcatctcagtgcgccacatcatcaattaaatacagaccatccgatggaagaaagattcattttgaaccgttggatctggagtgtgtctgaggctcagtaaaattctattgtcgcttccatctcacgttcaagcaaagaagcacaggcttcaggaagcttcgcccatcttcctgtcactcccgtacttgccatatgtgatcagtgatcggtggtaaccagacaaggatgagtctcctctgatgtaaagtcagaggaactttgtcactgacatgtgggagtgacaaagtccctctgactttacgtcagaggagcgcgatccagcagacaaatagtctacttatatgatgtgtgttaatatgcatatgtaaaagtgtagcaagtcttcttttaagcatttttgttaagtactttctctgtcctatattaagattatttttagctcatcccatttatctcaaaataaattgatttttagtaataattatatcaaagtttataaaagtaaagaataattgcattggaagtagataaagtgataaatagttatattaggatgagataaagtagggatattttagtcttttgatgtttgtattggtatgtgtaggatgagtgaacaataaacttattttggaacatctgtattactaatatgcatttgtactaatttttttaccaggtatgcatatgtacaaattactccctttattttaaaatgtattgagatatatataaatataattaccttctcaaacaaactttccaatattatacttttaactactactgttttctttcgtttattatcaatacctacaaaatcgacgccatataaaaatagtcaaataaaaatctaacaatactactttattatataatgatataaaaatcaaataaaaagtcataacattaatcacatatccaaacctgtacttttaatccattcattagacaagtttttatgttttgatttttctcaaaataaaaatgccttatatattttagaatagacgaagaaaaaagttagtattcctttatcatacaataatactctattgtcataaatatataacgtttgttttttcttgagcaatctttcaaaattttttccatcaaggagatctcaacaacagggcaccgttggactgacctatatatacacatattttaaacgggtcttaatagccacacaacgcgtggcttatgtggctagttaatagtagaaaatgttttattcagttatatgtccttatattttgggacgacgtaagtatttaacaagcctctgaccttctgaaagggcctgcggtctacgtggtgaagggtcggggtggacgtgggggcatcagtaggcggcgaggttgaggaggaggtcgcgggagaggtgcctggtgtggtcgtcgacgtggtcgccggtgacggactcgtagacgagcgccgccttgacccagaagctgttgccgcggtcgatctcgttctcgaggccggcgtgcgagaggaggaccctcctcggcatgaactccgacgggttctctgcacgcatccgcgtgtacgccgccgaccccagcatccccgccgccgccgtccacgccgccatggctttgctcgtgcgtgcgtgctctggttcgatgggtggtggtggtggtggtgatggtgagtttgattgcgtggtggatgggagggaggagtatttatagcggtgtcgtggatgtggggggcgatgggcttgcagtaatccctttcgtgacgtggttacttaactggagggcagctgacgtgacaggggagaagaggaatgtaggagtactagccaatggctcctacagtagtactagcagcaataggcacgttgctgcattgcattccgccaacttttcttcagaacaagatgagtagtgattgatacacccccattccaaaataagcttatttatagttttttttaaccgtttaactatccgtcttatttataattatttttataattattattattattattattattagatgattaatttatttcttttaattttttgtatttttttaaataagacatacggttaaacgttgaataaagaaatccataaataaacttataacttattttatgacgaaaggtgtagtcaaagaagatcaactagagaagtaaggtaaagtattaggaaatgttttttttttcttccatgtgagcatttgtaatggactattggactgtgtcccttcctctcacaattactcatttttgttttacaaaaattgcattgaagacatttttccttcccaacttaatgtccatcattttggttcgtgtgttcgaggctttgagcaatgttctctaccttggtcccagattttaacacttctctaaatatatttttgtgaaccaattataaataatgtttcatctacttccttttctcaaacaattataatatttttcattcaattttaccgttatcttgatacacgtgtctaaccccataattttataggaagaaataaatgagcagctaaaaaaacagtataaaaattagtggcgaaaaacaaaatattatcctaagatcacaaaatcccttatacattttaggacaaactaaaaaagacagaatgtcaaataccttatattgcgcgacggactgatgtacagatgtagtatttgtttctatcttgcggtcgatccgttgatggctcatgaatcatttctctctctttttcgaaggacgggaatctgggttggtcactcacaaagatgaaggattgataccttaatgagatgcctggacgtctaggtatggagcactggaggctcttctctatgccattaggccatattgcccttacagcaggttaatgagataacaaggggtaggtgatcacggcatcacgccaaggataattggataaagcaacttgatttgattacaaggggtggaaaaatgtgctgcatatgcgagtgcctgtgcctgctaacacaaggcacacctgactgatgccgcatgcttccaaacactactccctccatttcacaatataaatcattctagcattttccatagaatgacttacattgtgaaacgaaggaagtatttagtcttcaccttgtgatttccaagatctcttttgacacttgacatcgcagtagctacagcttccaaacactatttagtcttcaccttaagactcaacaatacagttacctaatggactaaaatttatcttcacacaaatataagaacagcacaggcgacaaagtattaagcaaaaaagggtacaactgtaattgatgggagctaaatcctattgattccaagactcacatttcgatgcattgagaggttgcttgcgtggtatcagccacatgtgaaaccgcttcaagcatcctcatcttattcttcactactcacaagtgccattcatctgaacctgactctgcatatggtcactggaaccatattggccaagtagcaggcctacaagggtaaccttgagtgatcgtttgcaactttgcataactggttccctttccatgtagtgtacaaagttttcattccgctcatgaaagacaggaagattgagggtcctcggagaaattcgctgcttccttcaaatccatttacatgacatatggttgatccatgaaggcccattcgaagatctgttcatactgtgaggcggcatggtcccatgtaaagtcgcttgacatgcctcgcttcattagaccctcccaagaggacttgtgttccctgtatgtcgaaattgccatccgcaatgcctgcaagaaacgatgcaaatttttagtacatactccaaaagttcatatggtgtaatgcttgtgccctgaaaataccattttcaatgaggcttttattactgattctacaatgttttctcaacaaagtttgtagctttccctaattattatcttgactacttgagtacaaggcaaaacaaaactgactagtactcacattaaattgtagacaagcaatgcaaatctttccttgtcaaatccatttttttatcagtttcatttgaagtgttcaatgacacaaaatgggccctgtttccctgtttccacattcgaagtatgtaccaaacatgcaattcaaatcatggactggtcagtcgagcaatttagcaacctaagcacatatatgcttcagggttctattccccactaattccagtttcccattaacccaccaagtgctgagccgctttcttctttggatttcaatcacgtgtgttccttttctttagtttgcttgtcaactctttcttataatatttacttaaatctgaaaactaacaagtactaggagttcaatcctactggaataccagacaataaccagaactggctggaacatacgtcatgagcctcaccttgttttatcctttttacttctggcaagaatcaaactacattatgattaccggcaagaaaaatagcagtatacgatacaaccaaaatgcatagttgaaatcatcatgctattgatgttaagagggccaatagtattgatgttgtatggcatatataatgggattaaggaatggatagaagaactaaaactaggtgcaggttcaacataaacttacccacagcattttttcaatggttagtggcgagaatgcccacctgcaatatgtcccaagtagcaacagttaaattaattggttataaattgaataatatacaaaaaaaaattgaatttaattaattccactaaaataaaataaatctgcaattttactttaatgaagcattccttaccctgtaccctgctctcctttctcagcaaacgggttaaaattctccactgtatcctgttgaataaataaaaaaaagtgagcagctctgccttgggtgctgtgctgacataagtgtcacactataggaaagcttactctgaggcctccagttccatgaacaacaggcactgtaccatattgcatagcatatagctgattgaggccacaaggttcgaatctggatggcatcaacaatatatcgcaactgtacaaaaatagaggcatcaatatttcaaatgtaactttatcagcaaaattaattgagatttcaaatgtaaatgcatccttagctgacaaatgactattattggcgaagttattttgcataccctgcagttattcggtgggaaactggaacactaaatccaacccatccacgaaatttatccctgtaccctgattctgtggatctcatccatccttcaaaacctgggtcaccagatccaagcatgacctataccaaaaaaaacaaaaggtgtcattttttttaagaaaaaaagaagtattaaaaggtgtcattgatcaatcgatttcagttggtggctaaaatatgtggataaaatttttaaaacccactcaaacactactctgttttagtctccagttgaaagccagaaacccccaacaatgaagtatttgggataagcacgtggttgcagttcatcaagacatttgctgcctacaagttagatcctactgacttaataaatggtgatccttttgtctgcatgtatacgcgtcccctggtgtctgtcagaagatgttgtttagtgtacccanaatgtataaagggtggaaataacagactggctggccaagcaggtgctccaattgatatcacactggatggttgctaataagtcatacagtggtcaagttatactactgctatctttcttttatgacttgcatatgcattttttcttatagcactaatatttgcatctgaaatactagtttacttgcatatgcgttcacaatgaaagcaatagctgcatattacattccttagattcatgataacaagctatataagtgtcaatatactactatatacactaagatctatcacattcactttctagtctcacgcagaaaaagaaaacagaacttacgaattgaatattgtcccgcatgagatctggaatggcaagtttaattagatcaatgcctttttgatagtccaatcttccaataaagccaatctgtaaataaagctaataaatccaactgcccataaaagaatactaaaataaataatttcataaatatttgtatctaaccagaggcacatcgggccttataggtaaacccagctccttctgcaattcagctttacacttggcctaaacatgaattcgaggtttcataaattagtctgtgaaagaaacgacgaggtgcaaagaaaaaaatgaaacgagatgacaatctgtatatacatggtactatacttcacctttccggacaggtcatcaacagaataatgataagggagaaacttgtctgtggatgggttccaatcattaatgtcaattccatttacaattcctacatatccagggaatagattgaattaatttgtatcatccaccctattacaatgatcagtccaagaacaaaatataaaaacccaaatataggtaccattcaatacactcttccgggagcttaagagctcattgaggccttgcccaccttcagcagttgtgacctcccatgaatacccctggtaatgaaacataaatgattccttaattgagtgcaagacaaaatgaacgaagaatttgcggtttaaaagccaaggcataaaaatagactaggatgggaaaaaaaaatcaactctaaggttaagttcaaatttcaaattttgactgtggccgtaagccaactagtagacgaaaaggaaggaatctcacctggctgacagtcacaattcgatctgctgtcacaactgcgccttttaaaaaattgactgcctcacccttgtcaagggcatgccgccttgcccactctggaaacacccattctaatgctccataccattcaggtggcaatcccaggtcaggatatgtactggcaggctccacaccctatcacattgaaacacaatgaaatactaacatactgcacttacaaagtgccattacaaaactacttaaaagatatgcaaaatgataggctcaaacctgatgtgctagattatgtatgacaagaacactgcgggcatccctgtaaacaccatatggtctatattttgcagcaagaaggctggataaacaagataaaagttatatttaaattgatatgtaaggaaaaccaatttaacattcagcattgaagtaaaaagggactaaaaaataagtgtgatgagtttttcactggcattagtatcttatccaccgtgaggaacatgccaaaacaaaggagtagcaatgtagcatctgatggatcaaaccatattcataatatgcagcgaaagacattacaccattaacctcatgttgttctgaagtgtcttagaagttagaaagcatgtaccacgcactctcttaataattataacatcaaattatggtgtgaaacaagcagtttaaatttaccacaaattagagggttgcaaactatcacctcagtcacctagtagcatgataggccatttagactacaggatttttcccaaatcctttgggtattgaattgtatctgtagaagatgaactcaaaataggcactaccataataagaaacttcgcactagctcagaaatattccaaaaaaaacataggcagggagattttcagatcagctatgaactagtgtagcacaaaactaaatcatttaaacacataaatgatgtactggactgttcatgtttttggaaatatcaaaatgattgagaaaataatgaaatgaatcgcagttctcctgcgcttttgagaaaaaaaatgattgagaaaatcctcctattcactcaatctaatattttgttcctcttatctaacatagacacacacaaacacaaagcaaacgtatgaaaaaaatggtttataagagatattcaatgttaatcaatttggttgcagagtttcagatccagaacatacactggcacaagactggcatgccaatcattcacaacaaacatgcatttctgtccatagatatatcctcccagttcaagaattaatggggcttcacacgccgcatagcacaggagtgtgtatctgaactgcagtatatagggaagtcaagtcgaatcaatgactcaatgtgatataatttagactggtcaaataggatcttgatgtaagaatacctgattatcgccaaaagcaccaaaattatctccatacaaatttccaggtctatgatatgagggatgatcaacaaacacctgaacaggagaagtgaggtgtaacaaaaaaataagtacccaaaatgcaggtatgctttctacaatcagcatgttgtgtcatgggtgatggtgctgcggagtgaacactaccaagttccaataggaataagtaaacatttggtaaactcaacaaggaatcaatcttgcaaccaaaaatgctagaaatgtttcctcctaggttatacacatccttgttccttaatgattatcatgtcatgccatctacatctattaccagttgtgacaatacatgtttcaatgtaacccacatgttcactttcaagaaataaaaatgcgattgaagtacataattcccatgatataactacaatgttactgatgactattaatgcaatggaaaagccaaacagtacaacttattaatattaagtgcttgttgcaaacagaagtcacaaatgcttgagacataaaatggatacattaagtcatatgaaggaatcttttgcattttgatctggaaacaccagacatcaaccagtgcacaagtgtatagacagtaagacatagaaacagagtacagaatatgatatgatcatgtcttcagtgggataagaacaaaaaagataagcagatagttgttttcatcagaaaatagtaaggagattgaatactcacccaatcaacagaaatcctatactcgtgaaaaaaagtaacttcatgttctccgccaaagcatggaatcttaatgtgcttctcagtgtaaaatgcgtttgcaaaatttttggtcaaggccccgttcatgtatctcggcattacaaccatcacacgatgaccacgaagagcaagagcaattggcagtgaaccacaaacatctc

SEQ ID NO: 7217 - DNA, 15667 bp, Oryza sativa
attcctgcagcccagtcagtgttgtttttcagacttcagatattgctccttacgcatactccgttacaatattccatttgtcacctatgactcttgggtggttaggatgcgccttcacgcatgatgccactttggtcaccacagataatatgatgtcgccaaagaactcgatctccttcagctttggtagattctccagacctgaaatcccatacttgggttctcgcaggaatgacaatgtcagcctctccagattagtcactgaacccgcatcgaactgcatcttctctatcctctccagattatcaatgatcaacagcttgagcttcacgaatttaccgtgacaaaaaactatgcagttgtcagcatatgatttgtgatagagcttgaggcagagcagatttggcaggtccccaagaactcctatggcatcagcatggagttcggtgcgacgaagagcaaacctggatacgtttcgaagcgatggtatccatggaggtagcctttccaactcaccggccaggctaaacttggttatgaatagaggaggcgactcaacaaaggctagattatccagtgataagctgtgctccttctcatccagagtgtggatggagagagagcgaagagggccaggcaacttgctcagagactcaaggaatgcgttccagttctcttccacaccgcgcaagagaacattgagctttgtcagattttgcagcaggccaatttcccgcagtactggcgatttatccttgactactatatggacaagtgattgcagagccaccatgttcttgaccaccccagtcgccacctccaaacctgaagattgtctcaagaacttcacactggctgtccttgtaagctgtaccttgtgccccgcaaacaaatgcttgagacaactcaggttgcctgcactagctggtagcttcttgataagagttgccctaatgtccagcgtctctaggtgtttcagattccctagaagatgaggtaatttggacacgttggtatttctgaggcttaggtacttcagctggaaaaacctgcacatacaatgcaaagtttcgttactcaagcagctgcagccttgcaagtcaagtactcttaataaccgtagctgcggaaagaagaatgggacttcctcaacagaagcagacatcgtgaaggagcgagcatgagatacattggcacttgttttttgagacgaattgtaactgctgtggatggagaggcgacggattttgtcatgggaagccaatgtactcccattgtcacataagaatgatgcaaagttctcctcaattgacctggagacaatgacatctaacatcaaatcatgaactctgcagctcctcaccttgccagtccaatcagtcctcacaggctgcacaatgcttctagccacaaactcatcaaagtaactttctgcaagctgttccatgctttgtccatgcctttggctgacgaaaccttcagctatccaccttctcaccaagggtcccctcttgatcacataattttcagggaaaatacttagatacaagaagcaggccttcagatgatagggtagatcattgtagctcaaggttaagacttgcttcactccttccagggtagggttgttttcaagttcagatcctaagttgttacaaaccttctgccactcctccttggtcctatttgtcttgcttgcgagaaggctgccgatgttcactattgctaatggcaagcctccacatttcttcaaaacggaatttgacacttcctcaaactcatcagttggtgatttatcatctgcaaaaccaaatatcttcttgaagaacagttctcgtgatgtcgtttctgatagtcgctggatattgtaaatccgatcttggggacgagaacagcacgtgttggccacatctgcattccgggtggttactattatcctgctaccctttaagttgtcaggcaatgcacatctgatgctctcccatgccgatacagtccatatgtcatcaaggatcacaatgtacctagaagaaacagttcagtaaacaaaaggaaacgtggtaacagataggattagctaggaacaacccccccccccccccaaaaaaaaaaaaagaataattagcagtaaatacgcctccttttcctttgcatcggtaaaaaagggaaaacagaaaacgaattgcaaacaaataggtgaaaagtccttcattgcatacgatgttttttctcttttacactggatagtgtaacactgtaacctatttggatctttgttatatttttcaggtacacatgccttagatagtggaactttcaagattcatcaatactaaatagtggttgggccctctctctctctctctctctcctatatatatagatagatagatactagaatagtagaagaccttacagatgatttctccatcacaactcgtaaaactaattttctggctttgaatggttcacattgaatccaaattattaagccaactctaggaaattgagactcgatttgtatgatggccttgcattttgccaatggtggcttgagccaaatctctgtatctggttggttctatatgaataactagttgtctctggttctagatgtgaaggttttatctgcaatctgttggtttgttttctgctcccttttgaactatgtaacatggtttatttaatggaaatgagagggacctccttataaaatggatatggtcctatatttaagttaaacacacttatgttttggcaataaatacacaatttcaaattaaattgcctgacagttaattacatccagcaactacctcaaattgaataccaactggtcctataaaatggagacggtcctatatctaagactgccattttgacgttctacttcaccataaccagcaatatctcaaaagaaaatatggattatttttaaagcacaaactattatagttcactatcagggaggaataacaaaaaaactctggcataccttttgtcttggaaatacctcctgagattcttagtcagtgctgcaacctcccacctttccattccctccaggtaatcatctgtaataaggccatgcttgcatcctgctattgccatcgccttgtgtggctcctggattagctcccttaccatgtgctgaaaaagtgccctgatgttgaacgtctgtgaaatgatgaacaatggacagcactgaaaatcagcactcttcaccacagggcttccacacaccatccttgccagcgtcgtcttcccaaggccaccaaacccgacaatagcaagcacacgaagccgaaggtcctcttccatcagccagctgacgagctcattcctaggctcatcgatgccaaccagctgagcctcctccgcgaagagagcatgcaactgtggatcgatatggagagaggcatgcctggtgagtcttggatgtgcttcttcatgtgtggcctttgctagctccaccccgtaccttgaacgccggtcaccgacatcctgagcacgggccttcagttcttgtagctggagagcaattcggtgacgacaggctagcttgcgaagcatagatatgagcccaccaaaaaatcccatttctgatgactcccctaggttatggatgaactcatcaatacaatcctcagagtcgtaggctatctccctcacctgcttcatccagatcctaacttggtcgtcatgaatctgtgatatggtcagattgcgtaggaatgcattcatgcactcgagctcatccttgatgtactgtatctcaccatggacaccctgcaccagccaagtatcctcagttagaaggcagccaagcttgcacagcaggctcctgactgcaccctccgtcaaactgaagacagcaccctccatatcttactatggagcatggaaatggaaacactgctgctgttgaagttaggatgctcaggttatatttgtaagacatttggttagctaatggtggaagaataagaacattccagaattcagaccatggttttcctggtcaaggagacatgcaatgacaaggagacctgcggttcgccgctgatggcaaacagaaccctgaaacatgctgacaaggcaacttgacttcatgtcttacaagcctgataagcaaataatagtattcctgtggtgcataagaatatcataaaaagttacaactcatagaaaaagtcaatcagtacggaaaactcattgctgtatgtatatgtaagaggccaaaggcagcttaaaaattggtaaaagatccagtaatacttagagaaggtataaaagcagtggggaagagtatgaacaagtgataccctaaggtttgttacattcatagctggatgaaagggtgatccaaacaagtacccagacaaggacaagcagcactgaaaagaggacagaaaacagctaggtaactctgacattttgacaacacaactcatacgtgaaatggaaagaaggcggtataggacaacagtcgtatttttgtgatgaatagcttggtaagattggtaaagtatttcgcccgccttcttacatctgacctatgagattagagtgctacttgttttaacaatgtgaacattgtacaacaccatatataaagcagagtgagaaaactatggtagcaataagcagatgaacactaacataatcacagataggacgtggcgacagcaaagcaaggtttagttaataaagatgaaatgcaagtcaaagtattgaagcatattatatataaataatcaaaactgttagctagtgtgacacaatgaactgtaaaggcatatatgcaagtgaagcgaagttaacatataagagaatagtgcaggaaggcaacaagctactcgaggtggttccatatactttacagcttaatatgcaccgatcgcaattgcacaaataagataacaatggttaaagcattgcgtgttccccttgtaattttgtataataacctagtactagtcaccttgaaagaaatggcgatgtcgacataaatgcagaaaggcaatcaagcaaccattggaaaaacaggcacagttaccagcatcatcttgactgtagtgtttgactctcttctttttccccttaaagatttgcataaaagatgaaaccgagccacagcatatccagtcctgtgaaagagactccaggagctcaatggttccatttgagagcgcaaaagaaagttgacatggaagaagacaaatcaagcaccttgattgtgaagcacttcagcgggggccgagtcgagcaagacctaggagagcttggttgttacacctgcgacatctctgatctctcccttgcgaaacattcagggccagctgctcgccgccgctacctagtcaggcccttctcgtagactagctgggtgacgcatttcatcgaacacatgaagcacagagccgcccacccgcgcgcgctcttcgattagccaccaccacgatccgtgcttcacccggctcccttgaatcttctgcgcatgcgcatgcgcatccggccggaatctctacccggcacgtcctccgccgccgccatcgccggcgcggagggctgcggctgcggctctctctctctctctctctcttttccgaaagagacagtaaggacgcgtacattcataaggcgtcaccgaacttcataggcgtgtgcctcccccacgtgatacagaaatacgccttccaagcacggatgtgtgttttctacttttgtttaagtcatgctcatatgctatccttaggtgaaaggaaaatgacggtggtaatttttttagaacatttttttttaaaaaaatacagtacaaacgtagccctagaaacgtgcgtgtacttatctttttaaaggaatcaacacgagactatactatttcattaaaatagaaggaaaagtacaacccctagggataaaactatacaaaactgataaggcctagatacggtttagtagaaaatcccgtatcctccttgctcccgccatagcccaagttcctgcctcctcttttatttttgccataaggctaaggtcgcaatctccttttgttcgaaaacctgctgatttttttacttccagatttcccaaactattaaaagaattagggtccgcaggcttttcttggacacctcatttgtattggctagcatttcccaccaattttggacgctatggcacggagcccagtgacaagggtccacctattggtaggggcacttatccttataaacacacagcatatctctaattctttataagcacccctgaaagaccaggcatgtatatcttgataatgacaaagtctccacaaacgtctcattgttaacgggtatatcatctatccctgaaagaataaatatccataaatacaagcactcgtgtcaagcctaaaatttaaactcgaataggcaggttcaatcacaagaaacctaacaaagtagttgacaagcaaaatgttgtgcttatgaaataggagtacatttgataagtttaaactagcaggggaggcctagccacaacctgcagaacactgaagcaaacgcaagcttcagatgaaatgcttcttttactgttttacacctcaattgtacaccgtcacaatgttccatttgtcacctacaactctcggatgatttggatgatccttcacacatgacaccactttgctcaccacagatgatacgatgttgccaaagaactctacctccttcagtttcaggagattgttcagacctgagatgccatccttgggttctctcaggaatgacaatgtcagcctctcaagattaggcatcgatccctcattgaaatgcaacttttcaaggttcaccaggttatcatcgatcagaagcttgaccctggcaaatcctccctgtggaaaaacgaggcgatcatcagcatatgatttgtgatagagtttcaggcagagcagattttgcaggcctccaaggacatgtatggcatcagcacggagttggctcctgcgaagagtaagcctcgagacgcttctaagtgatgctacccaaggaggtagactaccaagcttgccagtcaggctgaagctagtgatgaaaatgggaggtgacactaaggaagaaagcatctccagtgatgagatagagatgtttccttgtgcgtcgaagatgtcaatggagagtgatcgcacagagccactcagcatattcaacaactccagaaagggcttccagtttacctctataccataaaagagaacactgagcttccgtagattttgcagcaaggcgatctcctggaacactgatggatgttcttttatctctacatggacaagtgattgcagctttgccatgtttctgatcactccatggctcatctttagacctgaggatggcctcaaaaacttcacactggatgtccttgtaagttgctctttgtgccctgctaacaaatgctttaggcaagtcaggttagctgcactactaggcagcttcttgataagtgtctctcttatatccagtgtctccaggtgattcagattcccaattaacctcggaagtatggacacactggtgtttctgaggcttaggtatttgagctggaaaaatctgcagatgcagtccaaattcttgttactcatgcaacggctgccttgcatgtccagcactcttaacaaccgcaattgtggaaagaagaatgggatattgtcaattgaaggtgacattctgaaggtgcgaacatgagctacactgttgcttgttctttgagctgatgagtagctactgctgcggatggagaggcggcggattttgtcatgcgaaaccagttcggttccattgtcacagaagaaggatgcaaagttttcctcaagtgacttggagacgatgacttcaagcattatatcatgaaccttgcagcttctcaccttgccactccaatcgattctgacaagatgaaccatgctcctgctcacaaactcatcaaagtatctttcaccgacctgttccatgctcaatccatgcctctgggtgacaaaaccttcagctatccacattctcaccaaaggtcccctcttgatcacatgattttcaggaaagatactcaaatacaagaagcatgccttcagatggtagggcagatcattgtagctcagagttaacacctgctttgtgccttcaagagtaggatttgactcaagttcagagcccaagttgtcacaaaccttctgccactcttctttgctcctgtttggcttgcttgcgaggaggctaccgatgctcactattgctagaggcagccctccacatttcttcaggatggaatctgaaacttgtttcagctcatcgtcgtctggcgctccggcatccgccatgccaaagatcctcttgaagaacagctcccgcgatgccgcatctgagaggcgttggatcttgtagatgcgatcttgggggcggcagcagcaggtgttggcgacatcctcgtttctggtggttactatgatcctgctaccctttttattatctggaaatgcgcatttgatgctctcccatgctgatgaagaccatatatcatccaatatcacaatgtacctatacaatgtaatagttccacatatatgaacaaactcggcaacaaataaaataattaactacatatatgatctgtttttttagctactacctgctactggaaggaaattttgtacaaccggcaagactgagttgaatagtagtaaaatcgagtttggttcaactaatcaatagattatgattctctaatagagaacaaataacccgagcaggagaaggttgaacttcatcaaacctacctaataaaactaataggataaattcaatggaagagtgtcattgttggaaacaattttgtgttactgtaactcattaattctccccctatattataagacattttggtttttctaagtcaaacatttttaactttaagcaattttatagaaaaatgtagcaacattttgaacacaaaacaaatatagtatcaaaatatatttaatgtttgatttaataaaactaatttggtattactacggtttttctataaagtcaaacttagctgaagtagtgttcttagttacttgaacattttctttttcttagtatagtaatactaatgttctttttcttagttgttatagtaatactggttagtatagtagtactacattgttgtaactcgagaaattaagttgaacaaggaaaggaaatactcctcgcgtttcagattataagtcttttttgactttgatcaaaatcaaactacttcaagtttgaataagtttatagacaaatatagtaatatttacaacaccaaatcagtttcattaaatcaatagttgaatatatttccataatatatttattttaggtcgaaaatattactttttttttacaaacttaatcaaatttaaagcaatttgattttaactaaagttaaaacaacttataatctgattataatctgaaatgaagggagtactaaccttttgtcttgcaggtattccctcagctttgctggcgagcgctgccgtctcccacctctccatcccctgcaatgcatcgtacgcgacaaggtcgccgccgccgccgccggcggcggcgacggcggccattgccttgcgcgggcgctggatgagctccctgagcaagtgctggaagagcgccgtgatgctgaacgtctgcgacacgacgacgagcggcggcgagcactggaagtcggcggcgcccttcacccgggggctcccgcacaccatcctcgccagcgtggtcttgccgagcccgccgaacccgacgacggcgagcacccgcagccgcggctcctcctccatcacccaccccacgagctcctccctcggcccgtcgatccccaccagctgcgcctcctccgtgaacagcgcgtgcagcctggggtcgagccgcccggacgacgacgacccgccgccgcccctgaccgccgccgccgccagcgacaccccgtacctcgtgcgccgctcgccggcgtcgcgggcgcgggccttcagttcccggagctgggccgcgacggagcggtctcctcctcctactcctagcgcgccggccagtaggcggacgaagcggcggagtgaggccacgaggcgaccttcgtctccggcggcggcggcggggtggctgcggccgcggacgaacacgtcgatgcagtcctcggcgtcgtaggcgatctccctgacctgcttcatccagaccctcacctggtcgtcgtggccggcggcgtcctccggcgacgtggagacgctgcggaggaaggcgttcatgctctccagctcgtccttgatgtactgcacctcgccgtggacgcgctgcgccggcgagctctcctgcgcgagcacgccggcgagcttccggaggagcccccgcacggcgccctcggtcaagctcacaatggcgccctccattgatttcctaacaccaaacgtctgaaaaaatttgcttcttaaaatatataaacatgttgaattttaaatactagctatctccgtcccaaaataagtttatttttcatctatcacatggtaccaataaaaaaataagaagactagaatactcatattttatcaattctcaatgcaattattcatcaattatctactcccagttatccctccgtcctataatataatgtgttcacgtattttaagattctaacatttaaaacatttgagcaacacttagtatatagtataaaagtataacataaaatgaatttatttgttaaaaattatattattagattgagatttaatttactttcatatgctacaaaacttatagaatatgagaaattagaagctaaagattagttttgaagactgtgccaactttgaccacgttttatattaccggatagagagagtacaattattccttactttcacaaattccgatgcaatgattactctaaaaatgaacttatcttgggacaaataaaatgagctaaaagataaacttaatatgggacagaggtagtataacatttgggctatcctctcatattaatattttttatacaaatatgtaaaaatatgatgcttaaattacttttaaccacaaaataagtcatgacaaatatcaaatgaatggtcggacaccgtggtgaaaagtcaacgacttcctatatttaaaaacgataatagtaccagtagtgaccatcaccctatatcattgcaatactgtgtggagagagagttgcgcaaaaatatgccatccgaagacaacctaaccatgtaaacaatttcacaaagaaacgaatggaatcgagaggattccccgctcttacaagcaaggtaaatacaatacagagttgtactttcaactactcttgacaaaccaactcagcttgtcttcttaggaacacaccctgaaaaactatcaatacatactgtccagctggttacactacactttctgcattgcttgaaataagcaatgcaaactacttcccaaaatgcaagcatttctggctttaagcctagacaagcttgactagattcaaagctagaaatacttatatttcgagatgaaggtacaagcattgcccaactagctagctgaacctgaacaccaaaaccaaacaggcctctagaagcaatgttgtttagagcttgctccttaagcgtactccgtcacattgttccatttgtcacctatcactctcgggcgatttggatgtgccttcatgcaggatgccactttagtcaccatggataatatgatgtcgccaaagaactctatctccttcagcttcagcagattctccagacctgtaatcccatccttgggttcttgcaggaatgctattgtcagccactcaaggttagggactgagcccttctcgaagtgcacattgcgaatgttctccatattatcaataaccaacattctgagcttcaaaaaattaccatgagcaaaaaatatatggtcatcagcgtaggacctttggtagagcttgagacagagcagattgggcaggtctccaagaactccaatggcctcagcgtggagtccagtgtcacgaaaagtaatcctggacacatttcgaagtgatggtatccaaggaggaagcctctgcaacttgcctttcaggctaaaatttctgatgaatagaggaggcgactctgcgataagagctagatattccagtgatgagctgtgctctttctcatccagaatgtgaatggagagcgagcgaagagatccagtcaattttaccagagactgaaggaatgcgttccagttctcttccacaccgcgaaacaagacattaagtttctgtaacttttggagctggccaatttcactcagcaccgctggccgctccttgaccactatatgggcaagtgattgcagagccatcatgttcttaaccaccccagccgtcatctccaagcctgagtccggtcggaagcacttcacgctggttgtccttgtaagttgtaccttgtgcccaactaacaaatgcttgagacaactgaggttgcttgcactggctggtaatctcttgatacgcgttgccctaatgtccagtgtctccaggtatttcagatttccaattagtcgtggtaatttgccaatattggtctttctgagtgtcagatacttcagctggtaaaatttacagatatagttcagagtactgttgttcagacagctggaaccttgcaagtctagtactcttagcagccgcatctgtggaaagaacattggaacttcctcaacggaagctgacattgtaaaggagcgaacatgagatacgctgactcttgttctttgcaccgaattgtgactgttatggatggagagacgacggattttatcatggcaaaccaatggatgtccattatcacacaagaaggatgcaaagttctcctcgagcgacttggagatgatgacttctagcatcatgtcatgaactctgcaagtcctcaccttgccactccaatcaattttcacaggttgtacaatactcctggccacaaattcatcaaagtaactttcggcaacctcttccatgcttagtccatgcctttggttgacaaaaccttcggctatccacctcctcaccaaaggccccctcctgatcacataattttcaggaaaaatacttagatacaagaagcaggccttcagatggtaaggtagatcattatagctcagggttaacacttgctttgcaacttccagggtaggattagtttcaagttcagagcccaagttgtcacaaatcttctgccactcttccttggtcctatttgtcttgctcgcaacaaggctgccgatactcactattgctaaaggcaagcctccacatttcttcaaaatggaattcgagacttcatccaactcttcatttgatgatatatctgcagaaccaaatatcctcttgaagaatagttctcgtgatgcagcatctgatagacgctgcattttgtaaacctgatcttggggacctgaacaacatgtgttagccacatcttcattccgtgtggttataattactctgctgcccttcttattgtcaggcaatgcacatctgatactctcccaagctgatatggtccatatgtcgtcaaagatgacaatatacctacaggaaaaaaagtacttatcactttatcagtcatgaacctatcatagaagataacagtgtttcttacccaaaacaaaaaggatagaaggaactacatatattttatataaaggagtgagcacattaacccacgattagcaaattaaggctttagggatgatcctgattttaaggggaaaatatatgtaccttaaatacctttatttgaaaaatacgaaaaacttagaagcctttctcttggctaacaaaacactttctagttctataccagttctgcatcacatccagtgagtttatttacagcaaaaaaaaccacctgaaagtgctatcagccagtaatcctggtacacagcataaaacttggtgatacgggcaacagtagggaacagggtggaaacaacctttccattcctatgtagagcagcacagggaaggtcgtgcaccctctatttctcatttagacagcctttctatgtgagcagagatcattggaaatcaatggtcaagatctgacataggactaaattctcctatttcattgctgaattgaagtaaaaggtgcatgattgtctttgattaaaccttttcgcaagcaatgcatcaatcatctagatatattcaccaaagcaggaaaaaggggagtctaacagataatcaattaccagtaaaataaaacaaaagcactagttaccttttgtctagcaaatactgcctaactttttcagccagcactgcaacttcccatctttccattccatccatgttgccgtccattgtatgaccgtgcttacctcctgctacagccattgccttgttcggacgctggatcagttcccttatcatgtactggaacagagtcctgatattgaatgtctgtgacacaatgaacaatggacagcagtgaaaatcagcacccttcaccattgggttctcacacaccatccttgccagtgtggtcttcccaaggccgccaaaaccaactatggcaagcacacgccggcaaggatccgcttccattacccagcggacaagtttatcccttggttcatcaaggcccaccagctgtgcctcctcagtgaagagagcatgcaactgcggatcaagatgacgagatgcatgcctggtaagccgtgggcctgctccttgaagtgtggtctttggcagcatcacctcatagcgtgaacgccgctcactgacatcctgtgcacgggcctttagctcttgtagctgcatggcgattcgatggcgacagcatagtttgccaagaatatagattagccgataaaggaaaccaattcctgatgactcaccaagatgatgagtgaactggtcaatgcagtcctcggcatcataggcaatctccctcacctgcttcatccagattctcacttgggtgtcatggtcctccaacacagtgaggtaccggaggaatgcattcatgctctcgagctcatcttttatgtattgtatgtcaccatggacaccccgcacgaaccaactctcctgggagagaagggagctaagcttggacaggaggctcctaacagtgccctcagccacactaaaaatagcaccctccatgtctaactatgagcatggaaatgcagatgctgctgctaatgcagttgtgttccctaggccacacacgcacatatatataaggtatccaatagactaaatttgaaagtgatagcaggataagagcgttgcaggcaatagtttcctagtcatttccagttctcaataggctacatttggactccagcataataaattgtacaaagggaaatatgttgattgcagtgttagctgatgacaaggcaatgaaaaggagacttcaggttcataaggtgatgacccgaatgatgaacaaacatattgacatggcatcatgacttctatttgtttattctattctccatagcaatttatgataatccagacgatccaattcacatttccactgccactatatacaagccaccttactgattgataaaggaatcataatctaagaaggtgc

SEQ ID NO: 7218 - DNA, 1358 bp, Oryza sativa
gtttggagttgatcgtaagactggaacattacttcgagattcttctaagttgtagactccctcatccattattctagtcttttgccaattatttcattgcttctttttacgttataatgcgatgttctggtgcttgcgtgcacgttctctccagccaaactcaaaaactcatgtacgctacatcccataaaatgtggtgtatgaactggccacattatcatttcatggagttggtatagccgtgtaggttgtgaactcgtaatgccatctccatctgcgtcgtatctcaataatgcaagaatgcaacctaactaaataataaaaataataataatgtttcactaatttattttcaactgtacgtctgtgcgaaagaaaaaaaaaagcttttgtggacaaaaatacagtaactagctagttttctatatccacactaaacacatcgaacatactccatccgtcccaaaaaaaaaaaactcaacatagaaggggatgtgacccctcctagaacaacgaatctggattatccttaggttgagtttttttttttgggacactgcttactactgagacaagtcctacactcctactagagaggcaaaacctttgctttggttatttaggaaaccatagttattatacttctgaccatgcagcacaggggactgaagatcttataagttggcacggaaatatttccgtgactcctgctgttttatgctgtccgccacatgggcgatgacgccggcaccggcattgtgaagccactcattcttaacctgcattgcattgatgccatgaactccagtggaaatgaaaagaacacatttaatttggtcaaaatggtatgcagtacatactactaacatacatgtatgttgttatgagcaaagtaaggccatagtgctgtatggaagttgacatctactttcttccaaccgaccctctgcaagccatggatcatctcctctgttaccagaacacagaattgatgttcatagagtgagaaacaagggagacatcaagatccagcacatagtactagtctactgaaaaaggtcctactcaccttccatcatttcgtgatattcttcagtgttttctttgtttggtctactctgtgcagcttctttggctctggcagcttgcagagggaaatgagggccatcagatgatataggcgaacaatattccatattcacaatgtgcttgtagccatccagtgaacgatgtgagggctgcatatggaggaggaaaaaaattactgaagtattcacacagtgctgcaatttggtttctaatcaaattctagtggagatcactgaacacctttgtaaggtctttttctcttcttattg

SEQ ID NO: 7219 - DNA, 4256 bp, Oryza sativa
ctgtctgtccctgctaattaagcgaaacgttgcccgctaattatctccgttgtcgttaatttttaaacatgtgttccaattatgaaaattgctatacgtaggacccaactgtttaactcacgtacaactgaatttgattaacggttgcaaataattacaacgcaaatgaacatgttttcctttgattgatctatagttgcatgtctctagttgtatatgagttatacaactaggtcgtatgtatagcagtattatttgattattcgtcttttaaaaagattttattcgtcttttagaaaagattacgtaagcatcatgtacctttttgttggttgttttatcactaaaaatattttaaatatggtttatatcttacgcattcacacaaaatttttaaacaagacaaatggtcaaacatgcgccaaaaatcgataacgtcatttatcaaacaaccgaggtagtatgtgtatttaggaatgcctccttataaattttaatactcccactgtctcattatataaaaggtcctcatcagatggctaaatgctttggctgatcagccaaagctgcctccaattcagccaaactacaatgcatattggttagcttattttgcttaaatggctgatcagtcaaagcatttggccatctgatgagaccgaaatatttttctccttccgtttatctcaatatatagtgtattttgaattctcgaggactgaaggacaggagacatcaaatctactttaatatgtccatgtccgcaccgtgtcctctacggagtttttataaatgtttgtaagtgtcaagtgattcaaattatatgtttaaacgtgatatgtataaatgaccgtaaaaaaatacatggcagtggtgacaattaagtcccacactaaaatgtacgactctgacatttccgtcaattgtaacccattgttgtttttttttcttttttttatgcaagtagtttattcccgacatgtatctctatggtactatcttaaaatgggaataatacgttatattatgggataaaaagagtacgtgtttgaaagacgatgaagactaataacaaccaaactaatacctccacgtacataaccgtggccattataattcatatcaaaatgcacgttactaccgtctaccgttgagtctgacgcaattcaatcaatcaagaataaaaatataaatcaatttgtactggaccaaacgcaaacccaagttccagcaccatcgtttcgaaacggtatatttgcaaattaaagtgatctccgaataaaatttttatatacatgtttttagatatctaaaagtaaagtttgaaaaataaatttcgatgaaaaatcttaaaatcagttttaaatttaaggataaaaatttaaattttagctgataacacgagcatgggagaaaagatgaggagatgaggtccttcgactttgtacaccacacgagctcagccagtacacgcgacggatgagccgaaccgtttcatcccggccgtccgcgtctaatccgacggcggccgcggcggcgccagacttggccaacggtcgaccacgccgccgacgcgcgtaacctacttgcgccgacgccgccgcgttatcctactcggttgcggcgcggggacgggatggcgtccacgctttcctctccttgccaccaccacctctcctactattatagccaccaactccgacgactgcggctacgcctccgcccctccaccggcgtctacggtcggccgtcaggttcttcgatcgcccgcctttccatacccattccttctgtatttcattcttgattttggggggaagatgggataaacaattggttatccagtagataacttcgttgatcgattgacgtcgatttttatttttattgctaatggagaagaagctaggtgatattaacttgtttgtttctagcaacatgagggtacaagatctctttcagttttgacacaaccaaatgagcatccaaagtaacactactgtacttagtatcgcgatgttcttcaaaatgctgtgttaatgaaaatgaaatagtgtgctgacagttgattcatgcagaacttgacagtggtagagaactttattcccatccaacgttcgggggaagccgtagccgtgtgtcgcgttcatctttcatggaaaaatcccaaagaaagcgaggaccagatcatctgctgattcttgtccatggtatcattgcaaggtgagtatatcctgtcacgataacatagcacctgtctgaaaatgcatagcaagattgcagtgctagttgttcctgtcacaattctttcttgagctttgctgataaatttccttcattgttctcccttttaatgcagccccagtgactggacctatggagaagcagtgctaaagaagaggttaggtgacaattttttcatctatggtaggtatgacatatagggatcacctgcccattcctattggctttctgacaaaattgagcttaggatcagatgtacagactacagaatacctatatttttaattagtactgcaagatgaaattcacaccacttcattactgtagctacattggtttgcactttgcaaatgagaacaattcgtttctagccataaaacttacagtgaactatatcattgcagctagttcgtcaaatatctacaccaaaactttcgatgggattgatgttgctggaagaaggttagcaaatgaagtatgtactcgctagttagtcctagcaaaaggtttcaagtattcacctttgtagaaactgttgtctgcactcatggctgcgcttaagagggctctgacgaaaatccgctatcgaagcaggtattggatgtgattcagaagatggctggattgagaaagatttccttcctagcacattctttgggtggtttgtttgcgcgatatgctatttctatcctttattcaacagcaatgaaggatgcaagtcaaagtgctgcttgtatagctcctacaactggagggtctgaaaagttggagtgcacttcaggattaggtgcaattgctgggctggaaccaattaattttattaccttagcaaccccacaccttggtgttagagggaaaaatcaggtgggtctctaaatctattaaattatctgatacatttttattcccctcaaaattagttctgctggaagcaaaaactactatattggactttgagttgcctagtaagattttagtataaaactattgttgcatagctaatcggaggccaaagaccagtaaccaagtactacttctgaatatgttgtgacttgtgatcaatgtattaattacatgcattttctgcaataatattaccagcttccatttcttcaagggctatctattctagaaaagattgctgcacctttggctcccttggttgttggccgcactggtgcccaactctttctcacggatggtgaacctagcaagccacctcttctgctagagatggcatctgatcatgaggataaaaaatttatgtaagtcataagaaaggtcttaaggctaacttattatagtagaacatatcttcttcgttcaaacattgtagtagaacatattgtttcttcaatgttcctcagatctgcactagcagctttcaagaaccgcattttgtacgctaatgtttcgtacgaccgtatccttccttactcctagttagtaccacatgatttcctctgcctgatatgcaaacgaatttttttttgctccaaaccattttctattttgctgctcttgttttcttgaacatatgccagatatggtcggatggcgaacatcttcaataagaagagaaaaagaccttacaaaggtgttcagtgatctccactagaatttgattagaaaccaaattgcagcactgtgtgaatacttcagtaatttttttcctcctccatatgcagccctcacatcgttcactggatggctacaagcacattgtgaatatggaatattgttcgcctatatcatctgatggccctcatttccctctgcaagctgccagagccaaagaagctgcacagagtagaccaaacaaagaaaacactgaagaatatcacgaaatgatggaaggtgagtaggacctttttcagtagactagtactatgtgctggatcttgatgtctcccttgtttctcactctatgaacatcaattctgtgttctggtaacagaggagatgatccatggcttgcagagggtcggttggaagaaagtagatgtcaactt

SEQ ID NO: 7220 - DNA, 12313 bp, Oryza sativa
gatccccccgagccactgcacctgtacccgacgcgcgacgcggcacaatgcccgcctcacctgcacgtacgccatgcctcccacccctccgccgctccgcgcgcccatgtgtccaagattccggaaccgacgacgtacgtcgacgtacgtgagccccccccccccccgccatggattcgctgcctatatatacgcacgcgatcgagctgatcgatcagtgtagcgatctacgagatgaggccgtcgatcgtgctgttcggggactcgatcacggaggaggcgttcggggagggagggtggggcgcgcacctggccaaccactactcgcgctccgccgacgtcgtgctgcgcgggtacagcggctacaacacgcggtgggcggccatggtcgccgcgcgcgccgtcgtcgccggcgcggcgggggcggcagcgccatcagccgccggcaccgtctggttcggagccaacgacgccttccttcccgggcgcgccagggcgctccatgacgtgccgctcccggagtacatggacaacactcgcgccatgtgagccctgctcggcgacagctggcccttcgtcgtcgtcattctcaataacccggccgccgttcacgaaggcggccgtgtccggtatacacaatcgctctcatcttgcatcaatttatttggttttctcgatcgtcgaacacaatgcaagaatggatcaccaatggcgcgccgccgcgcgcgtgcaggtaccagtacgtcggcgattgcgccggcttgccggagaggacgaacaagtcggccggcgcgtacgcgcgcgcctgcgtcgaggtgacggcggagtgcggactgagggtcatcgacatctggtccaagatgcagcgattccccggctgggagagctcattcttgaggtaatcaaatcaaagcaaatcaagcaaacacctcatcaccttgttcttgtgatgagctgctgagagcaagtttagtactgtagctaactactagcctcaaatcacgttaacaactaatttatataataattatctataaacatatactacattattaatatatgatcccacctatcatatatacattatgttttggagtccgtgtttcaaatagctacaaatctgtagtttgccttttattttctcttctattttctcttctcaatatgtgtttataattggtttatagtttactgttatacccgctctgatgaaatttggcgcgaaatttgaagggacgggctgcacctgacgccgcgcgggaacagggtggtgttcgaggaggtggtgttcgcgctcaaggacgccagccttggcctcgaagcgctccctgccgacctgccgctcttctgcgacatggatccaaacaaccccgtcaagtccttcgacgaatgactcatcatcgcaaaaaattcgcattactgatttgagaaagagaatttgaattccttttcgttgcgttttttttaatttacggtgctatttgctggagaaatgtttgaggttataaatgtctcggttattattgttttgattctttagaaagattggatgaataatacatgtatcgaccgtattgtcatgtaatgttttctttggacaatgaaattcaatacacgatcgagctgagctttttttaagataagagctcctgcttacgggccattacaacaagttcagaaacaatgatagcaacacacggctaatggtgaaggtacattgtttaatttggtggacttgcttgtaaaccgttgcaacttttgtcattctgaccatttcatggatacaaggattgttaggagaaatgaacagcccataatatgtttttttttaaataagggaggccagaggacttcgccgggcaaaaacaaaccaaataaaaaaatattggtacacgctgtgaattggattaacgtccaaaatagcctaatcaaatcgtttctcaattcatacttactccctctatctcaaaatatgttaaccaagaatgtgactagtgtcagacgtaacgtagaggcggagaggtctttaagcctccactgtttgaaccatggaagcactccaaaaaatatatatatattgccacacctccattgaaaggcggggcttggaccttggagctctattttagtttcgagataattttgttcttgtctccactttgatgtctaatattgattttgcccttgttttttagggttttcgtttttacccctacttttttgaaacgaaacaactatttgccccagttccattaattcttactaatggtgttaaatgtagggttaaaaagacaattatacccttagatattttccggtacttttgacaatcaaaacacaaattgataccatactatagcagtaatttaatttgtcaaaattttgtgaaagtttgccaaaattccttatctcaaaatagggcaattgtgcaagtggtgtacagaagtatcagaatcgctctctctctctctctctctctctctctctctctcctgtcctacccaattcccaatcttgctctcaagccgtagcactcagcatcgcagcggccgggacaacggcgacgaggcagcgcaacgcaacggcggaggaggcgatgaggcgtagatcccccccaggtggaggtggtgaacgattgaccgtcgacgatagaccggcgatgcgccgaggcgcggccgagcggagccacaaggcagcagagacgacatcagggccactgtctagtgtcgaaggctccaagtccaagggggaaattaatttcaagacttcaaggtacataaaatttgaaatcaatatcaagtccagttgtgtggtaatagttaaagttcagtgctcagttaaaatttgaaatcaatttcaagtccagttgtgtggtacggagtaatagttaaagttcagtgctcagttaaaatttgaaatcaattttatgcttgatttaatgctttctgttgctactttgctgctcacatctcaccaactgagtcctataacaaacctcactcatcaaatccaatgatccagaatcatctaatccaacgctttagatcgtcccacgttacccctccccctccgcacgcacccctcctctctcagatcaatttcaatcgcgccgccctcctctctcggtcactctcctccccctcaaccgccgccgcatccgccaccgctgcctccacgtccccgatccacgctgcgccgtcttctacgccggtcgagatctccgccgtcgtcgccacgcacagccacctgagctgccccctccgaaatcgccataccctgcacctgagtcaccgaggtccgcgccgccaaaactccgtcgcgccaaccctccatccgctatccccgtcgccatcggccacctcctctacggctgtccctaccacgaagactgcctcctcctcgcttgcatcgtacatttgaaggtttccgcctcctgattctatccccgatcccccaaatctctaaccccaactctttgcagttcaacggagaaggccggtgtcttcttggtccttccgttctgatctccattcctttactccaattcccattctctgattttttttctttgttatttgcgtgtgagggtgggcccaccagtgattcaagggtattcagacgtatacccaagatttttgaaaaaaaataagtatatatactccatacctcgtatatgtattaaaaaattaaagagaaggctaaaacttctcattttgggtcctgttttaccatttcttctctattggatctaaatttcccacttccttccctcccctttcctctcagcccacactcagcttgggccgcaactagttcatttcccctccccgcttaggcacagcaaacccaaatcgggcaaaccactgaggacgtgcgcggtgcggcggcggcgtctgggcggcggcgactgcaccggctgcggcggcggctgccggctgcgtcggcggcaggcggcaccgaggcgagtaggtagcgcgtcgggtaggggtgggcagaaaaagaccgaaccgaaaagaccgagaccgagaaattcggtcattaattcggtcctaggtagtgaaagaccgaattttgttcggtcaattcggttagtctcctcggttaaccgaatggaccgaaaagaccgaattatcaaaaaaaacgtctaaatgcaacatacaatccactatgtttaataggattaaactctaattttcacatccctacttcttctaggcatgcaacctaacaagagtctttactcataagtgcttacaaattttttttttgatttttgtgttgaaaattttcattatttctttgcatatatgaaaatgttcttgaatttcggtcaagactgagaccgagacggaatttgtcggtcctaacattttttttcgctgaaattcggtttttacttttcaaagaccgaagacggagactggaattttcggttagaccgaatgaccacccctagcgtcgggcgtgcggcggtgactgcagtccagtctgcagcgtgctcgtcggcggctgcggcgtgcgtggcggcgtcggcggcaggaggcgccgaggcgtgcaggcggcgcgtcggcgcgtcgccggcgtgcaggccgccagtccgctaggccaccacacaggtacgcgatgcggcggccgaacgaccacggctcgccggcctggcatggattgcgtgaggggcttgattcattgcattgatttgttctaggtagttcaatagtagttatgttttctggcggtgacggcttgattcattgatttgttctttagtagttcaatagttcactagcactgaaggattcaacttccttagttcctgtcttctttatttttcagtgtcaactgttaagtgtatatttattgacagattgatagtataaagctgtaaatattaggaatttagataacttagaaccataatatttaattttcggagtgtaaaatttatatatatgatgatagtatgaggctatatatgagctgctgttaggaatttagagaatttagagggggtgttttcttcgatggactatataaaaacaagaagcaagatgagcaacaatctacattcattggaagagaattctttttacaaggtaaaggatgaggacatcatcactcatttttaaaataccaagcatcgaaaagttctcctctaaactgtaagagttttttttatcattttaccattctccatcctttacatgttttatatgttgccactttcatatgtcgaataattagtacttatatatgttaaagaatttggacttatgatcaattctaccaatttataaagttatggccaattttgtgttctatatgctataatattatacaattagtaatgtgtgatattataccaattaattattggacttctggaggtaaaaagaattttgttttacccctacctattttgaatacccaacctctaaatcttaggcccaccccttagatatatgataagttcatttttgatgttcttattaaattctcaaaagtcttagcattgatctgaactctgatgaacatgttttctatatttggctttgttcaaaagattgctacctttcagaaggcatcttgttatcaggtagtgattcacctaagcatgttgctcatggtagctaagcatgttaccatcataattgtaattcagtacgctcaactgattctatgataaataatgaatccatttcagaaatatataataataatatatatctttgcttggatatttggttttcaagatatttcaacatttgtattgccaacatatatatccttttcttttaattgtttgatttacacgcattacgatattgtgtcgttgcattagcacgtgcatgttactagtattattctagtttaagaaacacaaataatgagattgcaagtcagccaaagaggctagagcagaagttagtcatttggatataattagtgacccagggattcgaaaaccaattgaagattatccacgtgagcatcgcattatctattggagaattgttttgtagggacaaaattgcttgcctatttttaattttatgtatgtgtaaatgtgtagccaatttatacatgaaacatgttaatttttttctagattcacccttgttttcagccgccatggacgcggcggaaggtggaggtggcggccgaggctggggtgacgccgtggttgcgctgccgtcgacatccgcagcagcaatggagggctgagagagggcgctcaccccgatgatagcgtacaaaggggaggaagaccttcgacttccagagcggccagggtttggttcaactggaagggaagtggttgtcaccaccaaccacttccatgttggcgtcgagaacgccacaatctatcagtataatgtaagtttcttcctcacagtcgcataatattctactcatctttagttcattttagaagcattcgcttatttcatactactactaaataaatcttgattttatattgaacattcaaagattcgttttttaataatactagttgggtgcccatgcgttgcaacgggcaaaaaaaaaaactatacattaattttaaattacaccaattgaaatgatgggaaataatcattgagaaattttaatatagcacaaacaagaaatatgccataattttatagtcttcatatattagtaacacaaagagcaaaaatggttgaataaaacgctcgtaaggaagcacaaccatgtatgtaaatatttcaaatcatagttgtggttcaaattttattgtattggccgtaatcgtgaaactaaatagacaaaaccatccatagatatcacaaataatttttttttccaaagtcttcttaatagattgtgattttagtaccgacgaagttgactacaaatcttagtacattccacaatgtgataaattaatttttgagcatttttttccactgacttcatgattaggtttctatgaaccccgagccaaaatcaagagctaaaaaaggagaggtactttcagagatggtagagttgcatgaggagatgacttatgactgcaaagtgcttgcctaattgatccaggctgcttatgggcctctgccttctgtcccaatgcccatgacactacaccctccttttgagcagctcatcctcaagctgcaacacgatctttgttggctgagacaactccctaaacaaggcctaacatgactcaagccatgcagccgctgcacattgcttcaatccatccgcctctgaaaatcgtgccgatgcatgacgaaacaaagccatctcacctggaaatcgcgcccaaggttgtgtcagccgttgcgccgcaatcaccgcagtcgttggtgctagaggttgtgagccctaagaaacggccctgctcgtggcatcaccctgcatcgcggtcgccgacgacgacgtcgttgccaagtccaacgtcgaggttgagggcttcctggacctggccgttggtgacacgaatccacctgcctggacaacttgaagtgacgtggacacggtagtggttgctgatgccgtgtgacgatgaccttcgtcagatttgttgtgtctcctgcttcttccagaggtcagccgccatcttcgcccgaggcgatggtgccacagccggccttgtcatcattatactcagcaccatcttctgctgcactgccacctcttgctccatcgcgaaggctgccagcgggaacggctgagttgaaggtgcagtggtcagagatgttaacatcgtgtccacaacctgagtagaacttgttgccggtgccatgaagtcactagtcaagccatcgccaaacgacgtcattgctgtcctccttgccgaagaagaatgttgtccatctttgcctccaagacatccagcatctctaacttcttaaggatggccgtcagcttgtcatcgatcgacataaccacaggcgtaggagattctaggggtggggaggggggaggggtggggggaggttcttgtcaggttttgaaaattcgaggggagagatgtctggttttgagtttagaggtgttatttgtactcacctaatagttcgggtaattcgtacttttctcataatttaataatgtacatcttttgtgataaaaatgctactatatactctctccgtttctaaatatttgacgccgttaatttttttaaatatgtctgaccattcatcttattcaaagaaaacaaagaaaacaccacattaatatacatattgcggagagatacactattatcgtctgttacaaacttggtcattcttgtccttttaggccttcattactaaatacagagatgatcaaaccatttgtgtataatacgaagcatagctaatcttcttcctttttgaaaggggaagcatagctaatctgattgttcaaataatggcgaccacttggcagtggccgaaatctcaagaccgtccatacaactagaacagcctccacttgcagtagaactcccctcgttctgtggtacaaacgacatactcccaaacaacacatcctcagtgacatgctcaaggagatcattaacaccaccaccatgactaaagctcttatcatttgaagggctgttatacgtgaagaagcgaagcaacagaattccatcaccgtccacgcataatgtgaccgggggcaacttgccaacgctcaacttgccgtcaaatatcatgaattgtccccactgtacgcagtaacctgcaacaactgtaagtgaatcaaaacagttctctccgagatcgagtacctcaagctccaatgtgcccagtactgccttatcaagggcaaccatctccagagcaacagtgccacaatgaccagtgtcgatgtgccaacggtatctatgaagttctgaatagaacgatggggcatacatagaatgcccgtctatcaacactttatcgtctttcctttcttgacccttaatgacaaggtagtattcgatcaacataggcccaactgcatatatgcctctaggtggccaaattagaggccgtatcttattagagccctgtgcagtaatttgtgaaagaaacatcaaagttattagacatacgtgcatcaaatgttacaagaataaaatgaagtattaattctagtgcctaatcatctggtacataaaacacttgtcccagagataatatattggtgttttaaccactaatccctccatttatgaatataactgttggtgtctattactattttgactctgaccgcaaattactcttaaatgattagagtttgatgaatgagagcttcacgtttgtatatatttaagatgccatacactacgaaaatatggtgtacttttttttttctttttgcgacaagtggacaaagttaaaaaatgaataattcccaatgtcagttatttcaaaaaggagatagatttatgtcaaagtttaaagagcacaactacagaaaaggaggggacccttttaagacaaaaggtataaacaaaacaaacttagtcatgaaatctctcaccggccgaagcttatatggtttgtccctcgagtattgaaagacatgattacgttgttggttgtttcgtacatctctaaatgcaaatataccgtagatctccattggttcatcatggggggacgatacattcaaatcatacacctggattgcacgccgacaaggttcattcctgtggttgtatccatttacccaacgatttttccactttggcagctggggcactgcaacaggatttcaataaactagtattacagacacaaacaccgtgagtcattaacttgtatcctgcattctaaacattatacaaaatctgtaatcaatatttgtaaactatacttccacatgttatatgtaaagatatagttcaaacgtaaaaattaagttgttcactagaaataataataactaaatggacaaaggccatgtttggtgagattgagagatcctgggtagctaggtaagaatatggataaacaggggctgcctagcttttggtagctactactaagtcttagaatctccagcaagcatctggattatttgagagaactggatatgaagctctcctaaataggatctaaaaattgaaggaaaaaaaactatatatgatcatttgtgatttatacaataccttgcttatataagattaataaatactccaattatttactagaagatgtagcatgttaagacttacatagatgctccgtcgacaggatatctggatccaaatgacatggcccttcaacatgtagagacccctcaaaaataggacaaaagaaatcattttgtcgttgctttgcaattgatactgtgaacttcatttgctccataacctgattctcccatctctcctccctctcagcagcgtagtaaggatttccatcctcgtagcggaattcataccagtatccgtcgaaagaatcgcattcatctggatcaaccgagaattcactttcggactggtaattatcttctcgagggcaggcccagcctggaagtgtcccttgccattcagattcttcattcagaatagagtccatgtccttgccccagagccaagtgttgagcacctcacgctccaattcctccctcatcatccccaaatcccggtccaaatcgtcagcctctttctcctcctcctcctgctgcgaattcccgtcaattttactaaaacctactcccgacattgattcttggggggatttcagccacaaatcaacaagaatcgcgaagcgggacgggaccaaaaataatttgaatgcctaacctttcctccgtagcttgttggccccggctgctctacggattgggattgcgattggaaagaagcatagcagcatcgagtgtgtgtatgtacagtacaggagcaaatcgcttccaacacggactctgactctgagatgcattgcgaggcggctagggttttccttcctttcacggacgggaaagcagaggcttttagtgggcccagcccagcccagcccagcccaagcccgtacaagctgagctctttctcattgggctacatctcagaaaggcctgtttctgagactcggctcggctcggagccgacgtgcctccaccaccactcgtcgcacgagcttggcgaaggtggagggagtggctcgtgggcttcctccgcggccgacacggcttggcgggtgggcgggcagagccgcgtcgggtagcctcctggtggggcggagccacccccagctgcaacggccccagcctcacaaaggtgacatagggtgaatctcagccctagaaagtaaatccaatggctaagattcgtccacataatcacgagttaaaattttactcccaatacctgaaaatttactcctagtaaaatttttactcctaaataaatctgcgagtaaaattttaactcatgatgacgtggatggatctcagcagttggatttgttttggagggccgagattcacgctatgtcacattgtgacatgcctaccttatgtcacccaatcccaatccgagggagagagagcagtggaactgaggaagagataaggtggagactaaggataacatgtggggcccactttcattttttgctacatcagtgtctagtcagcacgagtggatcgggtcaaattgttacgtcaacaaaatcagatgtatatactgctataggatccaaattggatggttttgtatagtttaggggtgaagatttctggtattgaggataatggatgtcaaacaaactcagtgtaaagttgagtgacggcaggtgaacttatacctttacttgggcatcgggttgcaggaacggaagaggaggaggaccaacaacgcttcctcctcaagctcatgccttccacaaggaccatcatcagcgtcatcggtcggtgttcgcgtccgagctacatagcggcaggcaggaggcggaggctgacacccatgacgacgggttcgctggaccaccacaaatttctaaggctctctgatcaagagcccgaggagtaggttctatgtgagttttatttttttatgtcacgccatccaaaactatactcaacactgagacctaatgtgatatgattttataaggttatggatgtgttatatccgatattttgatttatgggtgattttgaaattcgacgacatggaacataaaagtgaacattttctttatcccatgtaaatagttaatatgggcagattgtcgtgaaggccgcctacattaactgggtgccaatgcaaacatcgtaaaaatggcacaacacgtgtggtcaaataatttactcgggcagtacttctctatgtctgctcaggtaataa

SEQ ID NO: 7221 - DNA, 40318 bp, Oryza sativa
tgcagacatatactccctccattccaaattgatctacatatagtttttttgaggttattcctaaatgatcatcatatttgtgttcattcattaagtctattcgttatttgtgcatttgagtaaatgggcattgatgcatgcatccatgcacacaagtatttataacccacatgtaatatcttgatttgctattggctaagaaatagtggggatggtgcatgcatcgagtttgttgttagagtaaatatagtatgagagttattagcttttcttggtcttggtgtacctatgaaatatgtagataaatttggaatggagggagtaagtgataagtagggatttaatcaaagtgccttttaggaagcgaagtgccaacaattatactggccatgattcctcttagacaatgaataatacaacccagaaggaacaacaaaagcatagcatgaacttgctacttgacagctgtatgattcttgatttcataataatcaagataaccaaaggaaacttactgtgccttcggtctttgggacctctccaagtactgaagctaaaagtgttgattttcctgatcctacctcgccacagattgcaactttctccccagatttgaccactaaatttatattcctcagagtatgtttcgacgggttctcatcccacgagaagctgcaggagtttagcgcaatgggatactcagtacccgctatatatttcttcctgcattgcccattcagctcaggagcatcaagaaattttacaacccgggtgaaagcaactttagcttgaatcacaactccaataacatctggtatctgtctgattggatcttgcacgagacgtagagttgccacaaaggtgaatacattgctagcattcagaggaactcttaaaagatagcaagtcagaaatgttgctgctgaaaccagaactggtgatgaccaaaacaggaaactgttgtatgccttcctaaggttgaatgctgacagccacttgtactcaacctccctcaacccctcaatgaccttcttgaaatgattttcccaagcatataatttcaagaccttcatatgaactaaagactcagacatggccttcaatctcacatcttgtgcttccataagtttactctggtacttgtgttgcagttttgccagtggagcattgcagagtacagtaataatgatgacaaccaacgacgataccgtcgcaagtccaactgcattgtaaaggattgccagagcaatgcagagctggacacttgttgtccaaatttggtggaaccaatacgggaattccccaatgcggtaggcatcgacagtcacatagttcattatttctccagaagagtgcttcatttttgctgagtttgatagcttctgttgcttcttgtaaatagctgctgacaggaatgacctcacctggaggcctaacctccgatgcggaaataccactgtctctgagccaaagattcacagaatttgcaaacgaacattgtcacagctagcacaattccttcatatttgaaggtcccttcccccagcgatacattgatgagtgccttgagaagcaatgggcctgaggataaggtaacaaccttgagcaatgcaaagaagcctgagatcagaatcccactcttatggcaagaaacaatggtccaaaatactgatggtgtggcatgtgactgcaactgcttctttctattcatcatctccaagaacatcaagtactgattctgcgctcgatcagtggagcctaaaagtggcatgtctttctcttcgagaggcttcgcgtaacccatcttcatcaaagggttcaaccaccaaaatgacatcacactgaaaaatccagctttagcaaaaggagttacatgactctctgaatcagccgtcccatgatccctctctgtattcagcggcatgtataaagcattttcagttgtttcataaccctcttcatcacggctgtgccgaatggcataaagaagaaggataagggctccaggtagcaaaagaacatctaaacaagctttaatggtgatctccttctctccaaccatgtagacaactgaacagcaacagatgaatgctgcacatatggtaagcaaaagcgaccagaatcgaacaaatgtagctccaagaaatcgaggtctgatgctaaaactgaaactagtaaggatcaaactgaatccttgagccaagatcacaagccaccaatgcggccggtaaatggaggtttcctgattgaagctaatccccaccatccacagtcctaggccaagattaagcaaacccaagcagccagtgaacactacagcagccaactgcagcagtgaattgaatgcgacaagctgccgcgcagatgctctactctttggaattttcatgagcaactgatgtacaagcgcaacagtgagcactgcaacaatggaaatcaccaccagatgattcacgcaagtcgaagaatccaatgtttccttcatagcacatgagaccacatcttgctcggagcaaattgggctcccacacaagctcatcgcccaagaacctgaaaaatcattaccccccaaaaaaatcaatgttaggcggtgtttagttctttggccaaattatttttgaagcatacggacacacatttgaagtattaaacaaaacaaattacagattccgcatgtaaactgtgagacgaatttattaagcctaattaattcgtcattagcaaatatttactgtagaatcacattgtcaaaccatggcacaattaagcttaaaatattcgtctcgcaatttacatgcaaattgtgcaattagtttttttttcgtccacctttaatgctctatacatgtgtccaaacgacacatttgatgtgatatttttggccaaaatttttgggatctaaacacacccttaataggaaagctcaaaaaaaaatgtgacagtccaaaagtgaaaagggctcaatgatgaatcaatgatgcaactgtcaagcacgagagaattgtgagaaaacaactaacttatgagggaacccatctgtccaatctctgttgcaccgtccgttgaatcagacagcttaaacctgcagcaaagcaaactagtcagagcaaataagtgaagaacatggactagatagggacttgtactgcacaagattagtactagtgtttcgggtggctatagaagctcaagataaccacagaaatttcactatacccagcacaaacatcactatatcaccgaaagaaaaaatcaagaaacttaaataagtcagcagaagaagagagaaaatggtaataaagtctaagattgcaatgtttcttcttaataagtcagcagaagaagagagagaccaaaaaaaaaaaaaaaaactgtatgcatgagtgttcatcaaccagctacctcaacagtcaacaccattcattcaccgaggaaaggaaagaaaatattcagggaccagtgatccaaacgagaagaacaaatcgcaaccaaaatcgcatcgcctaggggtaaaaaatctcgtcccctcgacaaatccccaagaactcccataggaattaatcaagacaatgcgattgacgttgtagattcacgatgccctcgagcccagagcagccgcactggagaagaaggaggaggagatcacgggagaagcagtaaccaaccaaagatcaaaaaacctttttactcaccttctttttcagctctccaaagcacgactccccaaaaacagcttcttttcttttcttttctttttctttttttcccctccttcctgcgccaaccaaacaccttcccaatcgtggcccccttcttcctcgccgccgtcgcactcgtgtgttgaggcgagcgaacagcggagacgacgagacgacgcgctgggcgcgcgcgcgcgcgggtggtgtttattataggtggcgcgcgtcgcgtcgcgtcgcggcgcggcgcggcgaggcgggtggcgcgcgctgggcagcgcgcgaacgaacgtgcgatgtctcgactctcgacttcgtcccaggtggcgacgacgccgacgtgccggtgccgtggcgtggccgctggtggcgtctcgcgcgccatccgtttcactggcgcgcccggcacgtgttcgactcgttgctccgtccgcgcgagccaaggttggcatactcacgttgccgaaacaagccataggccctgtttgggcttttcccaaaagccgcttctgctagaaactgccccaaacaattcataacttctgagaatatgtagttacagattttaaaaaatgaactaagaagccaaaagctggagaagctgggtttcggagcttttctagattctcagaagctggctaccaaacagctgtttctcagaatctaaagctcccccgaacaggcccataatcttattagctagcctgcctgactaataaaatcaaagccgcacttttactataagaaagcaagtttgcaatgctttaatgtgttaataatatatgggacacacatcctgatgaagaaattttatcattaatatggcacgaactaaatgaacgtctaatttagtcaaacatgtctcattttagatgtggtacagtaaggtaaattgtggtagtgcaccaaacaggctctagtcacctagtgtgaataggtgactctggtcaaacgctgctcttctttaagacaaaagaaaatgcgcactggtttttcttattagcagtttagcacatctctgcgagattcgtggtgtcttgaaattgatcgacaaatacactctatcattcttactaggagttatcgtgatattaacaaagtcaatatatatatatgtatatatatattactgataaatatatctgttttactaaacaataatttattataaatacgaacatccgtgtcaaattgaccataccataaataaagttaagtatgttcgatcaagttacttatcgtttgatcacgtgttatagatttcttcattattacatgagctttgtatctcgttgtaaacttactctcttctagctaatatatggcttttaattttattagtcacatgttagtaaaaaaaagtatggtgaattttgacgatttgagtatgccaatcaaactaatactcaccaacgagcttgattcccaattccacgtaaagttctttaggtgattatatatgtatatagatcgaccgagttcatgattagtactagtgtttagtaaataaatttactaagggcatgttcaaattgttttcaaaataaaccttattaaattttagcaagttgacatattactaaaataggatttttttcatgcatttaccaaaattggcaacaagctaaacgtagacatttttttaacaacttttttaaaaaatggtataattaaaaatggtatcattctgaacaacccctaacgttacttcataaatagaactctcttgatcaaccaccactactccataagtagaactctcttgatcaaccaccacatgtcataccatatactccctccgtcccataaaaaacgaatatatagaactgaatatgatatatcatagtacaataaatctggacatatatatgtctaaattcgtagtattggttttttataggacctaaaaagagtagccactggtgcgactgcagagcagagaggcagagtggtcaccggcgcaacgccgtgcattcatcagcgccactagtgcgagtgtgcgactgcagagagccagagcgatgatgatggtgattggccctcaatagtcccaagatgagaccgttttaaagtttccggatccatctcaagatcctagtatttagtttatgaattaaatgaaacgtaatagcacatgacctcactgctgccttcacccaaattatttgtttgcaattactcctacttgcaaggagtggtggaacgtatacatctatgtttctattcggaacaaatacgaattactccctccgtttcaaaatggttggtatcgttgacgttttagcacatgtttgactgttcgtcttaataaaaaaaatttgcgaaatatgtaaaactatatgtgtacataaaagtatatttaacaatgaatcaaatgatataaaaagaataaatagttacttaatttttttaataagacgaatggttaaacacgtactaaaaagtcaacggtgtcaaatattttgaaacggatggagtacctctctaaactatcacggttgctcgatttacccccctcccctaactataaaaccagacattttacaccctcaattgtttatattggacaaataacccccctaaacactgttttgagcggttttaactggagcgtgcacatgtgacgccaacgtggagatacagtcaacaaaaaaaattaaaaaaaaacacttccctggacccacctgtcatacccctcccttaacccaatccttccccaccattctctctggcgcgcacacatactcgggtggctggctatggaggagaaggcggaccgggcggccggcggtggacggctaaggaggagctcgcccgcgcggctgaggaggtggactagtgtaacgacccacctctcctaggccgggcccgcttacatttgatagctttcataggtcggtccgatggcagaggcggagatcgcccgcgcggctgaggaggtggactagtgtaacgacccgcctctcctaggctgggcccgcttacatcgcggaccgggcggccggcggtggacggctaaggaggagctcgcccgcgcggctgaggaggtggactagtgtaacgacccacctctcctaggccgggcccgcttacatctgatagctttcataggtcaatccgatggcagaggcggagatcgcccgcgcggctgaggaggtggactagtgtaacgacccgcctctcctaggctgggcccgcttacatctgatagctttcataggtcatagactgtcctcacataccaacacaagaggtagactagtgtaacgacccacctctcctaggctgggcccgcttacatctgatagctttcataggtcatagactgtcctcacataccaacacaagtcttttctgcacactttgtcctcactcgtgtgcacccgggaagaatttcccggtcctcacataccaacacaagaggtggactagtgtaacgacccacctctcctaggctgggcccgcttacatctgatagctttcataggtcatagacacactttgtcctcactcgtgtgcacctgggaagaatttcccggtcctcacataccaacacaagaggtggactagtgtaacgacccacctctcctaggctgggcccgcttacatctgatagctttcataggtcatagactgtcctcacataccaacataagtcttttctgcacactttgtcctcactcgtgtgcacccgggaagaatttcccggtcggtcacccatcccgatattgctccaggccaagcacgcttaaccttagagttatttcgagatcggcttctggaaaagaagttgcaacttattgatatgagtattctattaatcctattaagccctaggccgggatgtcacaactagatggctggcggcagaggcagagaacacccaggcagcgggcgactgagggggagctcgcccgggaggcccgcggcgaaggcagagatcgctcgggcggtgagcggctgaggtgaagctcacccgggcgcccggtgaaggaggcagaggcggaccgagcagccctccccaacgcgcctgccacttgccctcccccgctgcgaccttctccgttcggaccaccgccgcggccttctccgcccggaccaccatcgccgccgcactacaggaaaggagagggggtgtgctgggagacggcggcgggcttgtcgcctccttcatgagagctacgactccgccaccacagatcccgaccgacggcgccgcgatggtaggtcaggcggtgccatccacgcagaggctcgaggcggagccgttgaccctcgaggaccgctgttgcctagccttctcgctcatcgagatcgatgtgcgagacacggccgagggagaggatgtggcgaggacgctgccttccgccggggatgttgccgccgccgccgccacctaatgcacgtcatcttcctccgctgtctcatggtggccatcgtcgccttcctctgcctcctcactgctcctgttgttgggggacagagaaacagagatagagagagtgcgatggaaaggagaagaggtggaagaagatgctgacatgtggagcccaccgattttttttctgactagattgccacgtgtgtgccacgtagaatcaaaactgcttcgggctgattcagggggtgattcatccaatttgttaagttcgaggtgtaaaatgtctggttttgtagttaaggggggtaaattgtacgaccgtgatagttcagagggtaattcgtactttttcttttctatttttaaccttttttaatttacttcaaacagtgtcaagtcattttgggcgtgtttacttggctgcttcggttgcgacttttagggactcttgtttagaagctgtttggtttatatgatttataagtcaataaattttaagtcctaaatttaatgatggagtcatatctctacctcacataatgagaaaagcttttccaacctagcttttggcttaatagtgctatagtagtttgcgaaaaaaactgcttgtttatttagtcctagattttttgactcataagctaacttataagcctaaacaaagagttttgacgaattttggttagtatgttttggggttgatcatatggaatgtgttgggctttggggtgaagccttatcaatttttttagagcttttaagagtggaagctacgggaattaccaaaatttgtagggtatcaatgataaaatatatttagtttgttgttctagggttgaaaataattacaaggtaaataggctcttcgtgcgtagcttgtggacaatgatttcacttgcagttgcacttggttgtcaagtcattttttccctgccttgttagttgttagaagtattaagtacttcccctcttataattatttgacgtgtagctcaatatttggcatttatgaaactcttaaccatcattagttctctcaaatgctcagttcttttttttaaaaaaaaatatagtatatgagttggtttgccttggaaagtactattatattatcataaaccattattttgatgggaactacggtgagcatttgacagcatgaactttattgatgtttaaaagatggttttacaagatggctgtattacagttgcactggtggggggaaaggattataaattgcctcatcttctcgcttatgcttatacttatcagtaaaatttgatttttcaaccttaaatttagagttggttttgaggttttttcattgaagtttaattttcagtgtttttagatcgctaagaatatgtatataaaagtttttttcacaatttatttttcgtttacaaatagaccgtttggctaattccccccaaaagtggaacgatagggccgtataaccctgcatggcaagagcatatttggcggctgctttgcagcttcggttgatttttacaaatatgaagtccgcttttttcttatacttttatacaaatacaaatgtgagagcaaggataatagtgggctataagcaaactatatgcttaggtggaagagagagataaacaaaagtggggtgtgttggctcttatgcaagagctaactacacacaagctccaagaaatatgcattaaattcatagtgagagaaagagagaggataaagaaaataaagatgaccttatagccaacctactatacatgttagctttaacattgactaatagtaaacagtgagctatactattattaaacttgctctgatgtagtaactcgtacagcctgtttatgttactttctgtagtctctctaagcaagcatcaaagtcttgagagcaatacacaaacgacagtagcaaaatacctgctccaaaatttgtgtcgtgattgatctgaagctaagggtaccctgtactggtgaccagacacttagtccctgtttagatgagactataaaacttttaagtccctatcacatcgaatgtttggatattaattataaatattaaacatagactattaataaaacccatccataatcttggactaattcgtgagacgaatctattgagcctaactaatccatgattagcctatgtgatgctacagtaaacattctctaattatggattaattaggcttaaaaaatttgtctcgtgaattagctttcatttatgtaattagttttgtaagtagtttatatttaatactctaaattaatgtcgaaagacagggactaaagttaagtccctggatccaaacaccacctaagatcttgttgagtagtactactaattattgtcccgtcaacctgcacaattacacatcttaaattgcactcttaaacctgtcaaattggtacagtagcagtacagttggagtatcaaaagcagtcaaccccaaggacaataaacttatgggaaaaatttcaggggatcagaagaatttcaggggggaaaaaaggacaccgaatgaaacggacttcctggcagctttgacaccacgtgttgcagtttcagactttttcaggtacagacagaaatcttaacttagggtgtgtttgtttcacggtcaaggttggatgggatatagcgatctatattttattggatatgtcaatccagtttttttgtttgggagagtgaatatgacgatccagttatttgtttggttgtagggatgaagatggatttgatgatccatttttttgtttggttaggaggagtaggatggatgagtggttgcaatcacctcatcattagaggtggtgagtatacccccttcaaattcaccaaacccaaacattatcaatctactgcaaaataaaaaatcttaagagaaataaaaaaatcacaaagaaataaagggaaaaaggagaaaacagaaaaaagaaaaaaaatcacaaatcttctcgccgcctcgctcctctcgccggctgtcgcccgcctcaaccgccgcctcgctcctcttgccggccgctgccccgctcctctcaccggccgcccatctcaccttctccagatccggtcgctcctctcgccggcccactcgtcggctcgctcctctcgctgctccgcctcgtcgctcgccaaccgccgccacgctcgtctccttccccaccggccgtcgcgccgtctccttccccaccggccgttgcgccgtctccttccccaccggccgccgccccatttctcccagatccagccgtcgtcgtcgtttccatccccaccggtcgtcgccggtctccatccccaccggtcgtcgtcgtggtgcaccggccgctgccgccgccgcgtaccaggcgctgcctcacttgcgtcgtcgtcgaggtcgcgtggtgaggggtgacgcgacccatgttggtcgcttgccccgctcgcccaggcggctgcatccggccaaatcggccggatcccccatccagcatctgggaggaatattcttcttcgggccgccctatcccacccccgcccaccaaccaaacatccaccaaagatggaccgtcatgtcctatctacccaaatccctctatccaaacacacccttattgggtcgttggatccatgcaaccgtcaagctacttaccgtcaaaaaataattatgggtcactcgtttagctagcacaaaacgaagtttgcaatgtcatctgaagacgaggaaattttgtattggcaaattcaccaagcagaaggcagaaagggacctcaagattggattgatcatgtaatgtatgcgtgaatgattcattctttttttgccccctcactttcttagacgtatatacgtccatgtccacgagtacatgtttgcgattggaatgaaaacatggctgtgtcgtttataagttaacaccggcatcattcaagactatattgattgcggggttgtgtgtggggttgagtgttcagtataccatccttcttaaaaataaatttatttatagagttctgtcttcaacattgattgatcgtctgttttatttaaaaaattttataattagtattcttctttatacgtggcttattgtttctaatttcttcataaattttgcagataagacgattaaacgttggaaagaaaaaaactcacgaatatattttgagaacggagggtgtacttcagttgtcttgtcattttggttgttgtgtcttttttttctttggagaaatacgtacggagtacaggaatcaatcgtcctgtattgtcgccgaccgatgtcgatgcgtgcagttgttgcgttcgcgttctcgtcctcgcctcgcgcctgacgcgccggctgctgtcagcgacctacctacctacatgtacgaaacataccctgtgttacggacaccgggtaaatctcaatttctaacacaagttacgtaaagtactctatctgttctggaatatagggtattttgtactcttaatatgtccatgaatataaaggagtttaaggcctcatattttcgtttatacttgtcagctaaaatttaaatttttatcttaaatttaaaattgattatgaggttttttcatcaaagtttatttttcaacatttacttttaaatcgttaagagcatatatataaaagttttatttataaattatttttcatttgtaaatatgccatgatgggtccgttaatttacccgaggctaacaacgacagaagtaatcgatgccagccattagatattaagtactccctccattccaaattaatctacatatagttttttttgaggttattcctgaatgatctacatatttgtgtcaatttattaagtgtattcgttatttgtgcactggagtaaatggacattgatgcatgcatccatgcacataagtatttataacccacatgcaatatcttgatttgctattggctaggaaatattgaggatggtgcatgcattgagtttgttgctagagtaaatataatatgagagagttattagctttcattggtcttgtgtacctatgaaatatgtagatcaatttggaatggagggagtatccaccagttcccatcaaaataaaaaaacaaagaatgtacaccgttcaacctgccaaagtttaattaagtacacccttcgtcacattttaaacgcaaccataagtttacgtgtctaattttaatcgttcatcttatttaaatttttatgattagtatttttattgttattagatgataaaatatgaataatactttatgcgtgacttgtattttttttagaaagattttcaaataagatggatgattaaagtttgatacgaaaactcatggttgcacttcaaatgagaaatgagagatagtttattccccaaagatgtactttgtgcagtttattcactgtgccagtgtgtactctagatgtctgagatgcactctttcatccttcttaatttgtgctaggtcagaaataatcccctatatatacctggatggagggagtgtattgtatctctatcattgactaatgaaatatcctactattaaaaaagtgaaataatataccatacctctataatttttagagtaaatttcacaaaactacatatactatgactaaattatcacaaaactacatatttaactcagtgtatcacaaaactacacatttaacaccaaatttataacaaaactacacatttaagatgaagtgtcacaaaactacatgtttagtaactaaattatcataaaactataggtttagaaccaatttaaccacaaagtaataatatttatagccaaaaattgtagttttgtgataagtttaatattaaatatgtatttttgtgatacttaatctaaaatctgcagttttgtgatagatttgatgctaaatgtgtagttttgtgatacaactccttaaacctgtagttttgtgataatttagtcaaaatacctgtagttttgtgaaatttactctaatttttatttcaagttcctcaattacactgcacggtgcacacgtgtggcaactgttgctccgtcaaccgggttttggttgctcgcattgtttgcagcactgtccatccagtcctgctctgtttctgcggcaggtgactggctggtcgctgctgctcttgaatgcccccattacaatagatcgaccaaggatttctaccaagaaattttaaattctttgggaatggtaggagatttcggaaagaggttttggagagaagtctgtgtatgaggtgtaatctaaaactctctgttttatattattagtcgttttatttttttttctaatcaaactatgttagatttgattaagtttataaaaaattttagcaacatccaaaatactaaattagttcattaaatataagattaatatatttcataacatgtttattttgtgttaaaaatatctttttataaatctgataaacttaaaaaagtttgactaaacaaatagttaaaaagacttataatatgaaaccaaggaggaagtattgaaaaatttcctttaagcctatgctccctctattttacaatgtaagtcattctagcattgaatgaattacaatataaatgtgagaaatgctagaatgacgctagaatgacttacattgtgaaatggatgaagtagcatatcttatcaagtgttttttcatagcctattcaaatattcattcatgtattcctttcctttttatatgtatatctattgagttctttttccgtgttctgtcaggagttccaaacgaggtttaaggcccgtgaaaataaaatattccatgcgtacgttttcaaataatcggcagtgttcactttaaccaccgataacttttaaacggttaaaatatgatgctgaaattttttatgcttatattttaagctgcaatctactccatttcgatactatacattgacaatttttaatagtgtttatagtttctctaaaaaaaaggaagatggccggtccacgtctgaagatgaatacacattgttgattagtaattaatggagggaacacatgaataactctcctactacgtatgttctagtcaaagaacgcacgtgacaatttggttatcaacgtcaaatatttaaattggtggtggagctgatgacaacggtttttagagcacctgcaatagtaaagtaaggtgctctctatataaaacatgtacatctcagcaatagactcgattaatagtaaaccaccttaatagtatgtctatattggtatctatagctctctcatgcattgtctcgtttttctctatagactatctctaagttagtagatagctttcctctctctcttcatttaataccttccaagtaggaaaatatgctgacatggatctcttgtagagagcatatagataacctgtaacgctccgcttctcgtgagtcgttaaaaactaattcgccaaaatcctatatgcgaaaatctcgttctttgtgtgagagtctaagttgtgccaagatctcaattcaaatctccatcgttgttctctctcgtcgccatcaaaatcctccacctcaagtttccaatcccgattcaagactccaaatcaaattccgaaattcaattccaaatccaaatcccttccaaatcagttctctgtgaaagtctagtttgcctccctcaagtttttgtgggtcgaatccttttccctcggcccatccctcctctcagtccgtttccctctcccctcgcacgtgcgttgcacgcagccgagccgagaaggagcgccgtttctctccctctctctcgttttctctctctccgacgccgcatccaccaccgctttgccggttcccgccgccgcctttgaattccgtcgtgccctcgcgtcgcgcgcgcgcgcccgcgtggtcgccgcctgcaccgcccgtgccgcgccttgcctgcccgccgcctaaaatggaaggggcaaagccccctttcaaccgccctatctccctttttccctctccggttcgacctctctctctcccgcccttgtccacttgcgcttggagacagagacgctgacgccggtgcgccagttcgccgcccccaccttgaccgcgccgagctgcccctcccgcgctcgcgaatccttttccaccgcccgatccaccgccttcgccgctccttgcatcctcggcatccgccgctcttgcatcgcccgtgaccgccaatgtcggttccctctcccaaaccgacttcccgtgcctataaaaccgcagccgagcccctcctctcaacccctcccgcttcactctccacgctgccacgccactgtcgcccctgccctgcagtcgccctcaccgcccgtcgccgaagcaccagggagaccggtgcgtgcgaaggacgcgagaagaggactccgggcacccttctccttccccttccccggcccgaggccggagagctcgccccgcgccgtcggccgcccatcgctgcgcccggctcggtagtgcctcctccgttctccctccccgctctctctctctctcatgcccttagcttttgagctagcaaccgtagcactaccgaacgcgcgtggacgccgccccgagccccgctgccgcccggcatggcctcgccgccattgccgtccgctcccggaggccgccgctcgtcgccggccctcctcggtgcccctccgtcccatccggcgccggaaacgggttccccaactcccatggatgatcccaccgccttgaatcgacctctcgtctaccgccgccgtttcccctctttgctcgccgccggcatgcgccgccacgattcgtcgtcgccggcctccctccagtgaatccgggccggtgattcgcttcctcttgtccctcccatcactccggtgtcctccccctcccttgaatccccgtgtgctgcctcggcgaatgtcgccgccgtccgccgtccatctcggcctcccccatcttcctcctcccgccggcccgcgtggctgccacgaaggcaccacgtcggcgccagctcggccggactgggtcaaagctgacctcggtcagccgcctccctccgttcctcactcgcgcgcggggtccacggagagccgagaggctgcgcgtgggcccgccgcacaccgcgtccacccgtgcgccgcgcgtggaccgcttcctccccgaaccctagcaccacccttgcgtatgcccatccctccgtgagccgtgtcaccgacaagcgggcctcacccgggaccccgcgaggtgaacttggtccaccggaccgctccctctctcccgcgcgcccctaatgggccgcctcctcgcgcccgcgccggcccatttggttcggccgagccgcaatagccttcgggccgcgccctagccgcccgaaggaagtctaaatgacatccctctttccttttctttttcaagggacttaataaatcctttttcctttgtcccataaatcaattccttattccaaaattccataaaccattcctttggtcccgcacgtcagtgactgtcaataatattcttgagaatattatttctataaattccataaatcatctctcctattccagaaattccgattaagcttccgaaattcatatctctcaatccgtagctccgattgactccgttccagttccaataattttgtaaaattgagatctatttaatggcactattatttagtctaaataggatctttcttttggtcttttgtttaggtttttgattgtttgcgtatagttgcggttaccggattttcgtcgatcgcgggttttctcgaagattcgtgaagcttcgtgaagaccttgagcaaggcaagtcaccctttgatcaattgctcctataattggaaaatcattattattttgtttgcaacttgcattattagaatcactcacttaacttgcttggcctcggtttgcgtgccaaaccgacggacctacccagtagtcgcactagttcctgtaggctgtactaccctgattccttgtcgctccacccttgtggtacttcggtatccatgctctctgagcgcgcataccaaatatcccacatacaccattgattgtcgaaaacttgggaaatgggtttgtgaagccttcaaaacccgacatgtggtgtcggtgtgtttggaaataaaatgaattgtgaaaactcgcgatgcgggggttgtgcctatgtggcactgtcccgtattcgcatataaggaccgattcctgtgggaaactcatcgagcataatcaaagtgcaaccacaaggtggaataggacaccctggctaagtaactagtcggttcagggaaacctcgcatgccaatagttaggaacgccggggcggggtcggacaaaccgggttcctggtaaggcaaggacaagaagcttgctgacttaccgatcaaggtggttggagtttgatttgtgaatgcctaaaatggcctatacttacgtgaggatttgatccttctatgtggcatgaggtaaccctgagtcggcttgggaaaggctttgtcgcgaacctctgacaccggccagtgtctggagtaagttcgtgtcttgtgggtaaagtgtacccctctgcagaggttaactgactgttcgaacagccgtgcccacggtcatgggcggatgtgaggtggttcccgttgcgtagatttgtttgcctgttgtcgagggaagacccccgatcgcggggagtcgcgtgacccccctttcgtgagttcggccgggggcagagactcgtctctccgaagtcgcgtgttcgtccctccgatccccggttagctagcacacaaatggattacccaggttcaggccgctctggagcgtaataccctactcctgcgtttgggattatcagtgaattttaaaaggtttccctccctcccctttggtgggcaaggtcctccttttatagcttaaggggataccacatgcgccatctctaccctccctctccatcggagggaggggagggggcccttctcgctactgcgaccgggtttcaacccgtgccttttgctggaagctaagcatcggtcggtccttgagtggggcccagcgccgtctccctcctgacacggggggcagccctgtcatttcctcataaacaagggaggacttgcggcagccctgcatcgaacgccgtccggatgtgatggggcgtacctaccgccactccactgagacagaggcgacgtgggggcacgaccgcccgtccaatcggccgtgaccggcaatagactggtcacagaccggtcgcatccgactgacaggggtcggtcgggcgcgccgcacgtctgcccccgccgcattgaatgcagcgagggacggttggggcgctgcacatttatggccgctgtcacgcccagaagtttccccctttttccttgctttaaaaatttgttaaataaatcgtccgaagaaattatcttaattaacctagagctaattccataattaataaatgcaattaataatcggaaatagcgtggtggaatttttcttgagttccccatgctccaatacattaacaagatttttagttgaattttcagagccttggaaataatttttaccaattaaaaatcaccaaagtgcaattataatcccaggaaaatccttttttctcttttttcttttcttttccctccttttcctttgttgggccgtcggcccatccctctcccgcggcccctcctccttgtgggccggcccaagccgcccctccctcctctcttgggacgccgacaggtgggccccacctgtcggtcgtctcctacctccagccgttggagccggagctccaaccgctgccgccgaaaccgccgcgccgctgcctcctccgctcctcccgcgcccacgccgcgccgctcccgcgtcctccccacgtcgccgccctctcccccgcatctcccggcccgcgcgcgcgctcgcaagtggcgggattcgaatttgaatcccccattctctgtctctccacccccacgtcgccggccaaatcggccaccttcccggccacgtctgcctcctcccgcacctttaaatcactcccccgagctccctctctcgtttcccccatttgccgtcccctcccgtgcctcctaccgagcccgcgccgctcgccgctagcgccgccgcttgccgccgcctccggccgcacgctgccgtcgctagagccgtcgcctcgccgcgcaatcaccgccgctagcttcgccgccgcgagagctacctcggccgccgctcgctttccgtccgccgccgccggtccctgccgtcggtggtcgtgcctcaccgcctcctcgcctcggtcggccttgaggccgagctgagcccggccgatgcctccctccccctcccttttctccccttcacgcgtgcgccgccgcctttggccgtgccgccgctccggccgtccgccaccgcctttcgcgccgtccgctgccgtctccccgcgccgccggcggtcgtgtgccgtcgccgctcgccatggccggccggccggttttgaagccgagccgagccgtgcctagccgccgccgtgccgtccgatcagcctcccggccgatctggaccgtcggtcccgtggaccggcggtggaccacccgcgtggtcccggtccacggtggaccgaccccctttgagccgctgacccgtgggccccgcctgtcggcgccgccccccttggatgacgtcagccctgggtattattgcgcaataattgattaaggacttttttctttattagtaaaaacacagtttatcttctaaaattcatatctaattcatccgagctccgtttaagtccattcaagtctcagtaaatcaagaaaaatgcaaataatccattaaaatggttttgtttcctgtttcagtagtcttatagcatgttttgcttgtgtgctttgtttgtcgcgtagatttcggccgtttcgtcgatccgcggtttctcgaaggcattgctgaggtctcgtcagtgcgagagcaaggcaagtcatgcattataattgataatattgtacccaatttacaaatatcccgcatttctattaaatgttgcattcttttacaatgtcatgtgggatgggtcctattacccagccatatattatttaccttatgccattgataacttgggtatcaaaatgattagatgttggtttaggaaatgcttagccatgcctagttcaactggtacacaaatggggattacactattacatagactctaactatgagcatagctttggattggtgacaccgcaagggtgttggttaattaaaatacactgaattgtgggctgtgggtgcatggttttgctggtcgcacccatggcaattaaggaccggttcacgggaaaccctgggagacttgccgtgcttaccacaagcgggagtgggtaactgcttgatctgaggtatagcttaacccttttctaggcaccggtggcgagggtgggcgtgatggagttgggtcggccggggtgtccggttgtccagctgccggatttaccgtggcgcaagaggggaccgcccactgccttttgaggggtgggggtgaaaccttaacgtggtgtggatggttaggggagggtaatgcggagggtcttgtcacgatttccccctttacagtatcatggtgatacttcggggcatggtgacatgtgtggaatcgtgttttgtgggtatagttgtacacctctggccagagtaaaattattcgaatagccgtgcccgcggttatgggcgatcaaccagattcaccgtgattagtctcacccctagtttagcttaatgaactggtgtagttcaagtggttggttgggcctgttgcaacgcggtgtagcgttggacagtgattggttaatattgattaatttactacaattgttttactgctttcaactactgcttttaaatgctagctttatgcaaaagaacccctagcctactttggttatatcctgcatcatacctcctcttccggtatgacttgctgagtacagtgggtagtactcagtcttgctctcttttcccccacaccagagctgaagatcttcctagttggagctgttttgtcaaagttggtttcgtcgctgccgtcaaggattgcctgtggagtggagtcgcccgctgctgaagtcaagcttcccagtttagctcgcttttatcttttccgctgcatttgtaatcttttctatttttgtaagacgtggatctgtatgtcaacaattgtcgtttgtgtaccctagctggtcctggacagggatttaatgcacattcagcttagaaattctggttcgagaatttctgggcgtgacagccgcccagcctggactcccctttcacacttccccccgagggggggcctcggggtaaaacgacgggagagcccgagggggtgacgtcacccccgaggggatgtcgtcgacccccgaggctctccccttcgccttagtgactcacgaggtatgtgggtgggaccagctcgcagagccgcgtggctggaaagggaagtagctctcctttactccacatacccccggacccatatctccgacacctgtgctttgtgaaaagttgttgtggtgtgggaatcgtaaccagaatcagcctttgtggcagatggatgacctgagtggtcagaaacgaatctgtgtgattcaggatgtctacgggcatcatagactaggcttcccgagtggaagcggattgttgtgctgctgggcagctggactctgggagtcggagaaattgaaaaaggttctgggagccgcctaatcaagtgaaatggctctgggagccgagaagtaatgatctgacccgggaggtcggtacattaccaattgagttgttgaaaagcatctcttaagtcgatttgagacgcaagtctcttttcgacccaaacttaaaaagaaataaatcacttagtgatttcaaaatgttttcaaacaaaagatttgcaaaactgccttgcctctcttctaagcttgcattaaacacctaaattcccgtggcttgctgagtacgaaagtactcacccttactctatataaatatatatagtttcccccgccttgaagtgaagatgaagtgaagtgaagattagggtttcgtcctggttcccagccgtcgcctgtggtgttgggtgttagtccattggttccgctgctgctgctgttgttggtgtttcctcgtccgtgtcgtcggttgcattctcgggctgttctgagctgcaacctaagttaaggtaaataagtcctctatttattttaaggatttgcaatgattcatatttgtcaccgtgggtaccagcactacgtcctgggactggtaccgagatcgcagtttcgtaggaagcggttcgcgccgttattcctacgacacgctcctatcaggtgccgttgtacggcggtgccggattggagtgtgacataactattatgggtgcccttatgtcgccgataacttatttattacgtgagattgcagccatgcattcctaattaaattttaaaaaacacctctatgtcgacttacgatttttagccgtcgaaaaccacacctaaccatacgtgtgtcagcttacatgcctttcaagtaggaggtatgaatatgatgcatatgtccatcattgctaaaatgctgacttatgcctccagtctcatctctttcccttctccgcttgggcccaattaacggagtagggctcgggaatagctcatgctcatgtgttatctgccttttcgcatcaaaactaacgtacgatgtagcgttatttttcttctcaagccttttccaagcacaacaaacaatgtgtttccaaaataaagcttatacatcgtttgtaatttttgttcatcaataaagttattttactgtgggggcttcccctacagtgctttccttaaaaaaaaaagcttatacatgaaaattgcatccatgataattttatatgtagaaactttatacatactttgtacgtgcgcataaacattccattgaaaaacttcctgtaaaaaataaatttgaaacatattggacaaacttttttttttaaaaaggaacaaaacacccttgtgggcccgtgagacccatgtgtcttgcctgctcaatagtctaccacttggaattcaaagtccaccatatccactattctaacagtgtgctaatttcgtaaaagaaaataaaagtgtaacaaaatacgcagtagaaaaaaacatgggacaaaattaaggacataaagtttgacatcccacaagttcattcatacgaacttcgctgaatagtccctcctagagatggcaacggggacccataacccgtgacccgacaggtttttactctattagaagctaattgtgttctaactcttgtacccatgggtatactaatgggcaaaactcttacctgttgggtacgtgggtatgggtccgttctttacccacccatacccaccaacccgtgggtgaaaaaaaaccgttgattgagcctaaaactataagcaatataagtttcaacgactactaaatcatagtatgaaactcttttcacatcttaagcattgttccattctagttatatgaaattattacttgatctcttgattatgtaatgtggctgtataatttttttacttacctttgaactttgaacgctaatgttaatagattgttgctagagaaaatattgatggtttacaactctaatatggctaattatagtacaaaactataaatgctacaagtcaactatatgggtatgggtacccgttggatacccgttacccgcacaggtgtgggtatggagaagattttctacccgtgatgggtgtgggtatttaagtgggaatatttagacgtcgcgggtgtgggtatggggcaagggaatccgatggatatgcacccgttgccatcctactccctccatcccataatatagcaatctagtaccggacgagacccttcatagtacaacgaatctagacatgcttcctgtccagattcgttgtactattaagtgttccatccggtcctaagtttctatactatgagacggaaggagtagcatttcccctttagagccatagcgggaaaaacgacactccattgccctgcctcttttcttcgatggctacacgctctaaccctccctcatctattccccacccccaaagccatcgatatattccgcgaggctgtccgctgtcctcactcaggtgaatcctctgccacctctgttggtggtttcattgtggtcatccacgtcttcagcgaggttaccgctctcaggtgagtcctctgccgcttccaccaatcatgagtcatctcatcatcaggtatcgtctcccatcttgcgtgttgctatccacgacattctcgttggtgtgttgagccaccttaatcctcaattttttttgcatctccatatatattaattttttcgcgaacgcgtaaaagcattacacatcaatatattagatctatatatatacaataaacttgtcatttttttattttctagtagggagtgtgtcatcaaccgtcaacaagaacgagaactcatcgcgtttagacttttggaccgagggagtagttcactacagtctactagactactacggatcagaagaactctgggaaaaaaaagacactgaatgaaatagacttgccggcagtttgacaccatgagttcgcaggccgtgtttagttgcaaagtttgaaaaaaaatcacatcgaacttttctacacacacaaactttcaacttttccgtcatattattttaattttctttaaacttttaattttaacgtggaactaaacacacctgcagtttcagacttcttcaggtccggatagaaatatcacggaaaatgctggctcattatcattggaccgttgggtccatgcaacgtcaagcagatactcctgtaaaaaaaataacttttgggtcactcgtgtaatactagcacaaatcaaagtttgcaatgtgaaatgaattagacgaggatttggattttggcacgcttaattaagcttagctgctttttatttttagttagcacgcttttcaagcagttaaacgatatatttcttataaagacataaaaagatgcttttaaataaacaaatttattttcatttttttataatttataattaattaatcgtacgctaataatgtttgtggttgtgcttgcagctaatcatccaacacttattgaccgaaaagaacacgccagaaattgtattgtcatgcagagagcagagaggacctcaagattatctgcattcttctttttttttcactttttttttagatgtccacgacgactaaatggttggaatgattggtatcttggtcgttttcatgtttccattggccttattcaaagccattgtggggttgagtatttgtttcttgcttttcttgtcactttctttaggtttcttatatattacttttcgagaaatacgtaggaatcaatcgttcttggtcgcctttaatggatttctttttgcacgatgaaatgacgtgtaaatctccatcataaatattctcagacagggaaggattcaggcctagggcagccctaggtctaggttcttgacttcatgtaaatttcatttgaatttctaaattttgtatgaatgagtggaacatcagaacaagtaatgcaaatgagactgtgttcggaactctgttttccaaactctcccctctcgtttttcgcgcacacgctttttaaattggtaaacggtacattttttaaaaaaagtttatatacaaaaattgcttcaaaaaaatcatattgatctatttttttaaaaaaatagctcatacttaattaatcacgtactaatgaatcgctctgttttctgtgcatggaagatgggttcccaacacacacctccgaacacagtcttacttgttcttagaaagaaagaaagaaagagacttcgcacattcaagcctcctttgaaacacggcaatttttactgatccttgtaggaattgaggttatcctgaaacgttaacaattttctatatatttgtcgataaattttctcctaaaaatttgacagatgtaattacagtacaatcgtagtgtaattacactataacttgcatgtaattacactgtaactataatgtaacttgtatgtaactttcaaaaatctctctataacatgttatttcggtaaaatgaaggtcgtgggaacaaatcctctcacatatgtgtgtactgtgtttttttcttccttaccagaacatatcttataatagatctaacgattcaaaattacgtgaaacttacatacaagttacacagtagtcacatgtaagttacagtgtgattacactgcaattgtactataattacatctatcaaatttttaggagaaaatttatcgacaaatgtataggtgatcccaaagttaattgcatttgaaaattgaaagggcttcaaagttgaaacaactgtaccgcaatgcaagcagcaactccggcaaaccaaaagcatcacatgactgcgccgaaatgcaggaaaggccagcccactgacccatctcgcctcggatgatgcatcacatgaaggcccgtataaaaagcccacattccggcccattgtcgtgtatggtcccaggttccaaaatggatggaccggaaattgggctttccaaacgaggcctgaccatgatgcagcccaagtgttgccggcctggcatttttgaagccatttccaatttttggtgctcttagactagtggcaactaaaaaacatcccgaattcgcatcccccccccctgaaattcatagagaatctcacaaagaaacgtgaaattcgtattacagagcaggttgatttattcccacaataatccaagctccaaatgagacaatgtttctttggcataccaagttaggttgaaaaaaaactttgggatggatcccggtagtttgagaaacgtcagggttttctggctagctccataaagtggtggactagctagcttaggtttaaagcctcactcattctaattatttgatattaggtcttatatatagatttatagaatgaataatatgatgattatttaaaaaaatatataagatgatcaattgggaatgaagagattaagaccatttgatttgtatgaaaaatatagaaatttaggaggattttatttctatgaaaaaaaaatctacgaaaacatttgaaacaaaggatcaaatcatatcctatatttaaaattcctatctaatgggtaattctataggtactttggaggctctagattatctgtgagagcgctctaaccagtttcactctaaaatcgatttggttgggctttgactctatagaggtggaactagagttggagctttgtcaaacgaaaagtattagattagatggatagtatgaaaagtattagattagatggatagtattgtattatatccgatttgttatgttatggtaggataagattaattttcatctctatctctaaagttacttaaaatctaatccatatatatactgacattcaatacttacaacgtgtccgatgttcccagtaatcctttccctctactatcgatcttttttccacgtcggtcgcggctttttcagtgctttgactggttgactccccgcctcctcttccctccgccgtctgatcgccctcagagtcgaccgttgctgtgggccccacccctcaccgccggaccccgccgccgccgtcgccgtcgactccccgccggcgtgcaacacatctactccaccatggctcccgcccactcccaccggcgtggtgcgacggaggcgaacgagcagatgaggaggaagaaggagaaggcgcttcgagagaaggaggccggcgacgacgacttcgacgagggccgctacaagcgcgccgtcgagcactacgcccgcgccgccgccctcgaccccggcgacatctccttcccgatcaagtgcgccaaatcctacttccacatggaccaggtcagccatcctcgtctcgcccaatccaatccaatccatccccaatttgctactacttagcatttaccttgttcgctgcagtacgaggagtgcgtgaggcgatgcgacgaggcggtggagaggggaagggagctccgcgccaagaaatcgctggtggcgctggcgctgttgttgaaggggacagcgctgctcaatctcgccgactgcgcttcggattgcaaggcggcgatcagggcactgaagcagtcgctggatgagcattatcataaggggacagaggctatcctggacgaggcggagagcgccatggaggagatggaggagctggagaaggaagctgccaagcaccaccgagaaaaaggtttggactctctctctctcttttctcctcttgaggaagaagcataatcgttgatcaggagacaggagtacagtttaatgtgaggttttggattatggggaaatgaggagtgcaaatgggtaaaaaaaaattgtttgattccttgtttggaatgtttttagaggctgcttggaccttgggggaaagaagagggtttgggaatcttcagacttcagctcatgaaaaataaatagatcacaaaagaatatatacagtcttaacccaattcaatcccatgacataccaaactgaaaaatcattttcagtttaagttctcagcaccaccaccaacaacaatctgatccatctgaactgtgcacagcgattgattgctttgtactgatcgtttgttgctgttggtgttagttcagttgacatccgcaattggatcagataccttctactcatgtagccatgcatgtaggatcgcttgtcctttgttaagtgtcaagtgttctaaagttctaggaagttaattctgtgatttaacttgatatttgcaaggacaaacataattattacgagttaattacagaaaacaacatacctctagtgctttgttaagaacaccatgttttaagtgatatttgtaatagtaagcattaaaatcaccttttagcaaccaacttgccaacagaccagataatgtggatagggatgtcatgttggctgggttacagccttagaggcttagagcaagtttaatagtagaagtgattgttacctcttaactttttccacatcatctactcatcaattgtgaggcaacatatacaatacactagctctaacatactggttcccaatgctaattttattttattcatttgctctcgatttactctttatcttttctttctctggaagtttgtgtacatgttacctcttgcataagggtggctcacaggctcctcctttctctactcccttctttcctccacctcatcatatggcatctgtggcatcctggggatagaggttaaggccgtgtacttcctctagaacttgtactttgcaacaagtgttctggttgttacagtggaagtagagtaactcaaagtaagctgaatatctggatggggcttgtattgtaggactatttgtctacatcctttctttaagcatgatataaccagctcctaactagtactagtaaaatgataattgccatctcattgagatgtacaaatgccgctgctgagtatgtacacatattgcaggcaaagaacttctcagtaagaaaaagtacaaggaagcagcaatccagtttactaaagccataaaaaggaatccattgaatcccagagtaagtattgataccgctactggttgtgagtcgaaagatattttgttctttggtgaaagatatgtctcgagctactcctttttaagttttggcattcattttttatgcccttttatgattgatcacccagaattttagcgacagagctaaatgccgcatcgagctaaatgcattggctgaagggcttgaagatgcagataaatgcattgaggtagatcctactttttggaagggatatttttgtaaaggtgaagttcagttcttgatgcacaattatgaagatgctatgacaacttacctagacggtttgaaatatggcccccaaaaaacaacaatttatgatggaataaagaggtacattcccagtcctctgttatctttagtgatcttattttgattatctgaagtaacattttgtccggtttagatgtttagaacaaattaaaatggctaaggaccgtgatgtcagggataaggacttgtgggaggtattgacccatttactttctttcttttaacaagtcttccatgataacctgttgctttttcagacagaaaggaatatgtcttgcatgtgtggtcaattctagtatagtaaaactgagtcaaaagggtcacatatctgtgtaataccgatactgctcctcataacttgagagattccttagataccaaaactagttccacaagtgggagtaggattgacaattcatttgtataattgtatctgctcttgagattttctacgatcattgagagatattggtaccgactgttagtcaagatatatgtacttttgtaattgacaggaaagatcatcatccaatcatttcttgttgtcaaaagttagattgcatagaatataggatgcaagacaacattcaacatccatttactcttgctgctgctgctaagcttgctatttgcaatcttggaacagaccaatgccactgtatttagtaccaatttgcttactcccagccaccaaagcagaatcttcattgaaaccaacattcccttgtcatatgataatactttttgacattcttttccctattcgaaagtatgggatgttgcaagctattaaatacacccataaatcaaaggtatctatctgaattatttgaatgagggtgtttggtttgtgcaggcattcaaaaaatcgagttctagccaagtcgaaaaacttacgatgcagcgcgatgtcgtcactgtggagcttaagtcagccaaggagcgtaacgctaatctagaactgcaactctcagaacagataggccgtattgaacggcttctgtcgatccaaaacagtgaacctccacatttcatctgtcctatatctcaggtgagcggaaaacgatatttcaattttcttggttcatgctggtaatactttttttccccctgaaaaacactggctactgtaagagtataatctttgtaccattgtccaatgactgaccataacattacttacatacgtggtcaaaattccaggaagtcatgaatgatcctcactttgcagcggatggacacacctatgaagctgagcatatcaggaaatggctcaacgatggacatgacacatctccaatgaccaacgagcgacttcaacataaaaaactcactcccaatcacgcactgcgctctgctattcgggagtggcaccaacaccgaaacatgaggcatacttctccgcggcgccaacagctttttttgtgaatttgtgtgaagcaagttgtaactatgaaaatttagccgcagttttgatccttgctacagagagagtgcttgccgcgacatggctagatcgcaatccacattttgtaaagaaccatcattaagatttagtactaagttatgtgacatcgtatttcagatattattcttgttatatgtacttctgtatgtctcacttgtgttggatggctaaatagatgaatgatatttattggagggtatacaaatgaataaattaactgttataaagttaaacaatagacttaaaattatatattatgtatgaaattcatacatatattgttagatgcaaatagtatgctctctagttcatgtagtttcaaatattacatgaatcaggccctgtttagatgggactaaaacttttaagtccctatcacatcggatgtttgaaaattaattataaatattaaacgtagactattaataaaacccatccataatcttagactaatttgcgagacgaatctaatgagcctaattaatccatgattagcctatgtgatgctacagtaaacattctctaattatagattaattaggcttaaaaattttgtctcgtgaattagcttttatttatgtaattagttttgtaagtagtctatatttaatactctaaattagtgtttaaagacagggactaaagttaagcccctggatctagacaccacctcaatcttgcttgtagtcaacataactgattgaccatggtttctgggctgaagtacaggactgacggacacggcgacggggcttacaatttcaacccagatgaatagaatggatgcagaaaccagaatatggcaagaaagaatgtcttctggggaaaaaaaagacatgatgaaaatagcatggatgctccagtatttttttttagcactatggtacagatacaagacactacagacttgaattgcaatttattcagtactttttagtgaaaactacaaatctagggacaaatgcataatggaataatttcagaaccattctgatttctgaacatcaaacaaaacagaacaagtgtaggataagatgaatttatcgcatggagccagacctgatcatccactcaaattgcaatcagttcagacaaatatggacagaaatttggggataaaacagattacttcggttgcaatttcagaataaccagcggttacattgcaactaagaatcaaagactacgacatgacaaggcaaggatctaataattaacaagaactggtagaacatgacaagtccctacgaaccaagcaagaaccaaaggagggcggatcgcctaagcgcgctcgccgcggatccggcgcgcgagctggatgtccttgggcatgatggtgacgcgcttggcgtggatggcacacaggttggtgtcctcgaacagcccgacgaggtacgcctcggcggcctcctgcagcgcggcgacggcggagctctggaagcggaggtcggtcttgaagtcctgggcgatctcgcggacgaggcgctggaaggggagcttgcggatgagcagctccgtgctcttctggtacttgcggatctcacggagcgcgacggtgccgggcctgaagcggtggggcttcttcacgccgccggtggccggggccgacttgcgcgccgccttggtcgccagctgcttcctcggcgccttcccgccggtggacttgcgcgccgtctgcttcgtgcgggccatcgaggaggaggagaggagagcttggcgcggcggagaaggcgaggcggcggcggcgagtgatttctttggatttgagacttggcggtggtggattgagagggggggaattcgcggtgtttaaataggcgtgaaatttgggagggattcgctcattcgcattcgcgcgcagtggaaatgttcgaaatttgggcgaaattttgggtttggaattttggggaggcgcggccccgcgcgggatgcgaatgcgatccgcgcgcagctgctccaaccaatcacagtgcagagctcatgctcccacggatcgcgatccgcgttctgcccccgagatcaaatctgcaccgtcgattcgaacgcaatcgtacggcgctggttccgcgcggcaaaaaaaatccaatcctattaaaaaaattgcattttaaatttcgtttaaaatttctgcatttgaaacagcgccaaagttgaaactctgtagggctgtatgcaaaacctaagcatctgaagactggcctgcttcgcaagaaggcccaggccctcaacccataggcccatctctcctcagatcatgatgcatcatctcatcttcctcgcatgggcctatcctatgtatgggccggaaaatttaactaattatcaggcccatccatgtgaagccccgggagcttgggcttttccagacgcctggatgggaaagtattgctggcccggccatttttctcaattcataccgtacgctgccactcatcgcttaaggccgtatggaaataaaaccgccgttaaatttcctgaaaattggtcatactgtacttggttaatgataacaccgagtattattttcacaatatttttcagttattacaaacatatttgggtgtgccgaaatgcacaaataactttccttttgaaatctcgccatgaatttggaatggattttttttataaaaagaaatactaggttcctttttgaaatctcgccatgaatttgtaacattttttcatgtagtggaaatagcaactagtacatggttatggagaaagcacacatattaacttgcaggaattcttttgactacatgctgaacgcgttttgaaactccttaatattaatagacatttttttgtaagcccagctgcatgctgtagtggagggttggtcggttggagacttaagtcggtcaagaaagaaaatgaggtcattatgcccctaatggcctgattaattagaggtgaagctacgtcggtcgagcttatctgctaatcatccctgaagagccaaagagtttgtacgctgccctttggcctccatccatccatccatggctcccgtcgtctcccgcggcggcggcggcggcgggcgcgcgatgggggcgaaggagcggaaggaggcggcgcagcgcgagaaggaggccggcgacgaggcgtacggcgaggagctgtacaagagggccgccgcccactatgccgccgccgccgacctcgaccccggcgacacctcctgcctcatcaaacgcgccgcagccaacttcagcatgaacaaggtcagttcacttccaatcccacacgcaattccgcggagaaaaccgctccgattcacctcgccgctcgccgccggcgcgtttcagtgcaaggagtgcgtggcggactgcgacgaggcgttggggaggaggaggaggagggacgcgcgctgcggctgcgacgagaagctggccgccgacgcgctgttcctcaaggcgctggcgctgctcaacctcgccgtctgcgccgcggatcacgagccggcgatcacggcgctggaggggtcgctggagctgcgccccggcagcaaggagacgcgggctaagctggacatggcgaagaggaacagggacgcgtttgcggagcaggagcggctcgatcaggaagctgccaagacccaccgagacagaggtttgtgacatttttatttcttcctcttcccctcttgacgaacaaccactaaattcatccctaatcacacacaccatatatatttaaatatgtaattgtgcacatcgatcaacacacagtatgtaattgtgcacatcgatcaacacatcgtatgtaattgtgaacatcgatcaatttactctgtaccgatcactgacgttgttcagtttcaaaaaatcatctgacgttgttgatgttgattcagtcgagtccacaataggatcaggtacccatctatgtggaagaatcacgcgcacacactgctatggagtacttgccatcgcacatgcacggatttgtagtcaccggtagtgagttactactccataagcagagcagctgtcctgctcccatctgtctgttgtgctcttctgtgagtgtttggtgtagtgtgtagcgctttgcgccaatgcttctttctcctcaacgatcctgttgttgattcatgtaaaattgtaaaatgtaatgctttctccacatcttactataatcggtcggcattcttccgccatcccagcgggggaaaaaaactgtagtgcattgctaaaacacacacataggtgttctccaaaaaaaaaaaaagaatacataggtatatcttcaccaccgcaactatatcaaagtgagctggatatatgggagatatatgggacctgtgctgtttacagactgtgtagtagtctacgtccattctttaagcatgatataaccagctcctagtactagtaaaaatgctaaattgacattccattgagatgtacagatgctcatactgaatctgaatgtatacacaccttgcaggcctagaacttctccgtaagaaaaagtataaggaagcagaaatgcagttttctgaagctataaaaaggaacccaaggtatcccaaggtatgtaattgataccactacactagttgtataacaagtctaatgaaattttgttctttaattggtgaaagatatgtctccagctgctcctttttaattttggcattcatcttttcatgaccgatatgatcacccagaacttcagtgacagagctcgatgccttgtcgagctaaattcattgcctaaggcgcttgaagatgcaaatcgatgcattgagctggatgatactttagggatgggatatctccgtaaaggtctggttcagattgcgatggccaaatatgaggatgctattgcaactctcgtagacggtttgaagcatgacccacaaaatctcagtattcataacagcctaagagagtaactttccaatcctctgttacccatattgtttgcttttgttattattatttgaggtaacatcttctctggtttagatgtgcagcacgcattaaaatggctaaagacagtgatgccatagcaaaggacttgacgaaggtattgatccgtcaagtctttcttttaacaggtcttccatggtaatttgttttgtttttcacaatgaaaaggatatgtcttgcatgtgtggtagtaataaccggtcaatatagccatatgttcgtatgctcacaaggttctcttattttgggagttatatacctcttcattacttgagagatactctccacaaaaggatgtaccgaaactaatcttacaagtgagagattatctatgttcctgagtttttctacaatatatgaaaatatagttattttgtgttagttaggttctatctaacactatgaggtatatatgcctatctatagctctcaatgacaaaaagattcttactttactacaccttttgtctaatcaaatcagtttaaaatctttacattagggatcttcaaataattgggaggcacataccttctaacatattctactttatcagcaaactaatggatatcttacatactttcagcaccaaagagaaatagaatgtctgcataaacaactgaacgaaggtgagaacaaagcatccaaggagcgctcaaggcggatgaaatctgaaaagctggtaaatttattactgttttactaagtgttatatattaatcatttatgtctgcaaagtagcttgatcggaaatatatcatcatacaatcgtttgttgttgtgaaaagtttgattctatagggtgcataacaacattcacatttatttaattttgcagctttgcaatttatcagttgcttgaatttttcctaactgtttgtcacctacactaagataaggtgcaaactagacttgcgcaaataataaactaaacttgcataacataggagttagattttgtaagtttaagttagaatattgtttgtctcacaaaaagaaaaaaaacataaatatgagtaattggatattgtcctactgttggaaaaaatagtcaattgacaaatagacacaataaccccttgatcttggtgttccaagaaatgggtgatcttggagcagaccactgccacttatatactgcaaattgcctaaggaaatatcagactttttccctaaagaaatataggatgtcacaagctattgactacacccataatctaaatgacactccctatgaatgacaggtgttttgtttgtgcaggtcaagacattgtcaagccaagttgaacaacttaggtcagccaatgagcggaatgcaaatctagaacgcgaactctcagaatgcagagagcgttttgaacggcttcaattgatccaaaaccgcatacttcaacatttcacctgtcctatatctcatgtaagcccccaaaaaaaaaccctcaaaaaactatactaagtgccataaaatacatactagtttgtttataacttttgcagacagatcctctgcaatattgctcctgcagtgacaataactagttactgcaggtgtaatattgcagagaatccccacccattttgtgactgatgactcacaataatttatgtggttaaaaaatttcaggaagtcatgaatgatcctcttatggcagctgatggacacacctacgaagctaagtttatcagggattggttccgcagaggccataacacatcaccaattaccaatgttgaacttgaacacaagaaactcgttccaaatcgggcgctgcgttctgctattgaggagtgtcgcaaataacacaatatgatgctacttttaacctctgctacaagcatcaccaaaactgttttttgtgttaagtaacgaactgaacaactatgctttaataacgaaccatgatatagcttttcaatatgcagattcggatttgtaaactgagtttgtgtgaattaaactatgaccattttgtaataatttattacagactcttggtagaccagttgaaatgtttgctcaattataaaagaaaatactctatgcaaatttagaatgccttctccacgcataactcaattgatgccaatatgtaacactaacgcatcattcagtaagaaagcgaggccactttaatcctgcagactctgattctctgaactcggaaaggcattccacacattcatttcaaatctttcatgaaaaacaggcaaaacaaatggatagatttgaacatggaagaccgatttctcattcataatcagctcaacacttcacagccgtgctgccatgcattgcaggtttgcaacaagttacattactactactccctagcaattttctggtaagctcagaccaagcgactaaatcaatcaggcgcgctcaccgcggatccggcgcgcgagctggatgtccttgggcatgatggtgacgcgcttggcgtggatggcgcacaggttggtgtcctcgaacagcccgacgaggtacgcctcggcggcctcctgcagcgcggcgacggcggagctctggaagcggaggtcggtcttgaagtcctgggcgatctcgcggacgaggcgctggaaggggagcttgcggatgagcagctccgtgctcttctggtacttgcggatctcacggagcgcgacggtgcctggcctgaagcggtgcggcttcttcacgccgccggtggccggagctgacttgcacgttgccttggtcgccagctgcttcctcgagtccctgacttgcacgccgtctgcttcgtgcgggtctgtgtctaacttattatacgtcaacaaaaccaatcgtatgcttctagatctaatttaattcgattttt

SEQ ID NO: 7222 - DNA, 20580 bp, Oryza sativa
gcccaccctctcccctatactactagatgtactcctccctcttcccccttcctcatctccttctcctctttcagtagaccacacaaaattttttgaaaaacaaaagttagaaaaatttatgtatagaaatactatatataaaaaatttgaattcaaattcaaatttgaatcgggtatgtaaacttttgacttataaactttggatctataaactttagatgtatagaaatactatatatagaaaatatttgaattcaaatttaaatttgaatcagatataattaaaattcaaatttgaatcgggtatataaactttaggtctataaactttacatgtatagaaatactatatatgaaaaatatctcaattcaaattcaaatttgaatcggatatttgaattcaaattcaaatttgaaacgggtatataaacttttgacttataaactttaggtctataaactttagatctataaactttaggtgtataaactttatatgtatagaaatgctatatataaaaaatatttgaattcaaattaaattttgaatcggatatataaacttttgacttataaacttttggtctctaaactttatatgtgtaaactttaggtgcataaactttaggtgtataaatttactaaaataggaaagtaatgcgatgccaaaaaaggaaaccaggtggagggagggagtggggagcgaatctgatcgctaccccatccccacggcgatcaatcgcccattaggggtaccccctccctcctggcacgcaaaacaaaactcgttttgttgcatgattaattaaatattaattatttttttttataagatagattaatattattttttaaaatattttttatatagaaaattttttatatatcattataaaaaacgtgcgcgtgaaaaacgagaaaggcaagttggaaaaatggtgataaagaacaaagctttaatgatgaataaactcgacgtaaaatatacgggccagtaatttacaactgtattgggctgattacagacctaacaggatcttatggtgtatttggataatgggaaatgagaggtgggattgggattgaaatataaataaagagttaggattaaatggaagagggagaatgaatggttaagatttaaagatggcttttggtgggagggaaatcatttccataacccattagccaaacaaggccttaatgtgaagggtaaatttgctacaggacactcaaagattgtggtctttgctgtgagacacccgaagatcgtgtatttgctcgtgaacactgtaaaaaagtggtaattagctgctggacattcttcccattattttattatttccggtcaagatggagagagaaagagttgtgtaagtaccaaaatgcccctggacactgttcttcctctctctatctttttttccccttcttcttccttgcagcagagcagaggtgcgagtgtgcgacggcggctggcccgagcttggacggctcagccacggcgaggcggcggcggggcggtgtaggccccacatcctttctttttctcttctttctctcctctctcgagcaggcgtggtggcagacttgcgtgaggcggccggcggcggagcagggggcgcggcgctggagagagggagagagacggccgacgcgatggcgagctcggcggcggagagtagcggcgcgcggcacggcagcgggggagagggggcgcgcgcaccgcccgtcctccatagcgatggcgtgtagcacgttcttgtcctccagcgacgccggcgtgccgacgtcggaccacaaccaggccacgttcttcttgtcccggaagtccagcaggatgatgaaggaggtgtctgtccgtaggaacatggtcgctgccatgagcgtgctcgtgccgtcgagccactggagcttgtcggcgtcgccgagtgcacagcccggcggctcgtagaagaagtcggcctgctcgccggtggtgcagtcccagacgccgatgccacctatagctgactgaggtcttatgatcattgtgacaggatgcaccctgcatccttaaaccgtgacagcctctgcaaagccaacctcatacacactttgctgctcattgctgatcgatcacatgatgcatgatatggccattcatgtagagaagaatccggacaagaataactactagtggatcatggtgcagttgcagagattggggaggaagaagaacactcaatgaatgtcccttgttgcccgagacgcggccgattcgcgcctgccatctccagttgtacacgcgcgatgcggaagaggtggcgcgggtcgccgggaaggcagttatacacgcgcaggtcgccgccgctcctccatcgctcatttgtacacgcgcacagcgctgccgtgcgcgacgcagcagccgccgttgggcgcggcgcggacagccgtcccgtcgcccgcggcgttccctgccatggacgccgccagatgcagctggtccccgtcgaacggcccccaccgtgcctcgcggaagcggtcgaggaggccgtaagagagcgaggtagagcgcctcgcgccccccggcaaaaccttcgcgttgctgtcgaagaagaacagagaaagagagattgacaagtgggccatggacaaacttgtctttaacttaagtttctctctccgttttcatcgaaaataataaaataatgggaggagtgtccagtagctaattaccatttttttaccgtgtctacaaacaaatacacgatctttgggtgtctcacagcaaagaccacaatctttaagtcctgtagcaaattttgtctaatgtgaaagacacagggaatatcaaacctggtctacaggtatccgtcggctgctcctggcccagctgcaggagcagcagccgccgccaccaaccaagctcgaaaatgctactaggcgcggccacgtagcatcgcgcggagagccggacggcagagcgacgcgtgttgatacggggtgggcagaaaaataccgatccaaaaagaccgagaccgagaccgagaaattcggtgatcaattcggtcctaggtagcgaaaaaccgaaatttgttcggtcaatttggttagtctcttcgggtaaccgaatagaccgaattatcaaaaaaaattgtcaaaatacaacctacaatccactatgtctaataggattaaactttaattttcacatccctacttcttctaggcatttaacctaataagagtctttacttataagtgcttacgaattttttttttatgatttttgtgttgaaaatttccattatttctttgcatatatgaaaatgttgttgaatttcggtcaggaccgagaccgaatttgtcggtcctgatattttttcgcggaaattcggtcttcacttttcaaagatcgaaaagaccgaaagaccgaaaccgagatcgaaattttcggttagactgaatgcccacccctacgtgttgagacttgtgagaggactggcgcggttttttttcgggtttccctcgttttttttctggtttttccgatatttctgcacgtatataaagtttgtatacgtattggtttttccatttttaatacgtatgaatatataaagtttatatatgcatgtacacaaaatttgtatatacatatatagaaactttgtatatgtatatagtaaaattttgttagtatacgtataaaataattatataaatatatatcatacatatacatatgtgtatatatacgtatgtactgtatattgtattgatgggttagatgggggcggaccgacaacgcggctggccggctgccggctgcagccccgcgcgcaaccgatcagccacccccaacaagctgggctccagtttggcgagtcaacgagcgaaatcaagtagtagacgagcaacagtggacgccagcaaataaaccttcacaatgtaccgtccaaatctcaaagccccgaacgttcgacgagcttcgggaaagctctatcgggcccttcatgtacaatgtaccgtccgaatctcaaagctccgaacgttcgacgagcttcgggaaagaacgaatcgttcgcaccggttataaatagtgtgctgcgaacgttcactctcacaaccagtcaaccacaaccatccgttcgattgatcgatccttccaaaccctagcttagtcgttgactcctgcgccgtccggtgagccagccatgtctcccgtacgcttcaacccgtggcgtgcggcggaggcggaggtgcaaggtgtgaagaggaaaggtgactcctgctacaacaaggggagctacgggaaggccatcaagcactacacccgcggcgccgaactcgaccccagcgacatctccttcttgatcaagcgagccaaagccctatcgggcctgggacaggtcagactcctttttctttccggcctgattgaacaagacaagggaaagggtaggggagttgtttagacggtgggattagtcgacggacttactagtaacatcttttagttcccatcccttgtttggtttaagatggagattaccccgggatttgggggagatttggcacaaaatgggcatctctggaacgtgaatcgagtggcacattctgaaacgagtgtgaattgagtagcatataatgaaatttcttccaaattgatgttcctcgcggatttaattttttttttcgagggaaccctcgcggacttgattaacgccctgttcgtttcagtaccaggagtgcgtgagggactgcaacgacgcgctgaggaggggcgaggagctcggctccggcagctccggcaacaagctgatctcggaggcgctgttgtggaaggcgtcggcgctggagcatctcgccgactgcgccgcggattacgagcaggtgatcctgctgctgcggcggtcgctggaaacgtgccacagcgaggaggcgcagattaggctgaagggggcgttgttcatgagggagcagtacgaggaactcaaaagtatggactttcatttcctctgctttatcagtatacgaagccagttgattactgtgcacattgatcgattttccttgtattttcaagatatattcctccctgacatatggtcattgaatgatctactacctccgacccataaaaaaaagaccagtactgaatgtaatatatcatagtactacgaaaatctctgtctagatttagatttattatgctagaatatgtcatatctaattatatatttgttttttttgagacggagggagtagataccactttacccaagttttactttaaaccatctttagcacatacagtagtattatttcacatcctttgagaactccgcaacaaatgttgtggttgttatagtggaagtgcagaacgcaaagtaaattgtatagctcatggggcttgcaatgccagtgtagttgtaccaatatgccctttctttaagcatgagtatatatgggtgtgtttagttcacgttaaaattggaagtttggttgaaatttgaacgatgtgacgagaaagttggaagtttgtgtgtgtagaaaagttttaatgtgatggaaaagttggaagtttaaataaatagtttagaactaaacaaggccatagtagcaagttcctgagccctacctagtactactaaagttctaaattggaattgcattaaattgtaatttatagtcattcttcctgtaacatctctaataattagaagttgtagcttctttaaagcagagttcggaatgaatttcgttattaaaaaaaagtcccattaagatgtacaaatgttacaggccaaaaacttgaatgtggtgcttatccaacttacacgcagcatctttaccccgcaaggtacctttccagtcatctgttatccttataaattttgctattattattggaactaacattttgtccggtttagacttgaagagcgcattaacatggataaaaccaggctcaacaccttgttgaaggtattctacccatttactttctttcttttaacagggatgtattgcttgtgtggttatctctaatgttgtaaaaatcagccaaagtggccacaaattcgggtaataccaatatagctcctcacaacttggaagatacaatctgtaccttcttatggaggaggtaccgaaactaattctacaagaggaaataggattgaagatttttgactctcattggtatttaagggttagttaacagataatggaaaaaacatatatacctcccgagtcccgatatctctcccaaccaaaaaaaaaacaaaccttatattgccgactatacaccttcccaaggttggaagcagtgggccaaaacggccttaggctattacgcattcttttctctttcattttaactcatttcgcatagcacatatatttttcctttttgagcacttctaatatggtggaatattatttatttttatcagcaagctaatggatgcctatttttagcatgcaacaaaagaactacaaaaaaatgaggacaaattatccgaggagcgctcaagacggaaggaatacgaagacatggtaaaaaccattaccgatttgctaaatgtcactgcattgaacatttatttttgcaaaagtttagcttgaccagaagcgtaacatcatgtcatcaatcatcctcaattgtttcttattgtgaaaaagtttgattctatagtgtataacagcattcactgctgctattccaagatatggacgagcttggagcagatcattcccatatcagaatacttttcgattacatttttttttccaaaaattgaaaactgtaggatgcagcgcgccattgagtacacctatcaataatcccgatgtatgtctgaatgatatgaatgtgtttggtttgtgcaggtcatggcaattcaagcctcgattgaacaacttacaatgaatcacgatgcagaacttaagtcagtccgggaggataaagcgaatctagaatgtcaactcttacaatgcacagagaaacttgaacggctacaatccatcttaaaccgcgaaccgccattcacctgtcctatatttctggtgagcagaaaatgatcattattttttccttttccagttcatcttattttttatatacaattttctgaaactattgactattgtacaaattgtttttttttccttcaggggattttcacccattcttgtcatccaaacaatcataaaaaatgatgagttaatatgaggagatggcaccttcacaaatgtgctggtttaaattcaacctatatcacttgaagccaaaacactatttatagtcatatttattatttttttcaactggccttgaatttaagcttaaatgtttgtgaatcaatgttacataatattctttcttgccaaaatttttaataacttttagatgtcatgcaaaacaaaatctttcctgactacacttattaccttgcttggtcaaaatttcagcatgtcatggaggatccttacattacagcggatggacacacctacgacggtgaggcgatcagggcatggctcgacgctgggcatgacacatctccagttaccaacttgcctcttgaacacatggaactcattcccaatcgcgcactccgttctgctattgtgtggtggcacgaacagcagaacgcggcacgcgaacaccgcgacatggcgtgaactacaactcggcgtttcatattgtaaaattcttaattgttgtctgtacttttgaacaattttttgctgtctgtagttacttgttagccatgtttataacacacaggttgaaattgtaggctgttagtatgccttgtacacacaggtcgatataattcatgccagaatgcaacataaacacagcattcagtaaaacagctcttaatcatatgactgtgaaacagtaccaaatatttcacaaaagcaggtgaaacaaatagcaagatttgaacatcagaaagatttcccatttataatcagagcaacaattgacagcaacagcaacaagccattacatcactactactaagcaattctggtactagagctatcacagatgaagcgactaataaattaatcaggcgcgctcaccgcggatgcggcgggcgagctggatgtccttgggcatgatggtgacgcgcttggcgtggatggcgcacaggttagtgtcctcgaagagcccgacgaggtacgcctccgcggcctcctgcagcgcggcgacggcggagctctggaagcggaggtcggtcttgaagtcctgggcgatctcgcggacgaggcgctggaaggggagcttgcggatgagcagctccgtgctcttctggtacttgcggatctcacggagcgcgacggtgcccggcctgaagcggtgcggcttcttcacgccgccggtggccggcgccgacttgcgcgccgccttggtcgccagctgcttcctcggcgccttcccgccggtggacttgcgcgccgtctgcttcgtgcgggccatcgaggaggagaggagaggagagcttgacgcggcggagctttggatttgagaaatttcgcggcgaagtcggcggcggcggagtgggttgagacagcgagggaggcgacgcgtttatatagggggaggctggggtttggaatttgagagcgcgaaaattttttgggtttggattttggccgcggggaatcagcgccgttggattgcgtgcgaatggacggtgcagattggatccagggggcatcacacggatcgcgatccgtggggggtcgagttctgcgctgtgattggttggagcagctgcgcgcggatcgcgttcgcatcccgcgcggggccgcgccttccccaaattccaaacccccaaaatttcgcccaaatttcgaacattttcactgcgcgcgtactatgcgaatgcgaatccctcccaaatttcacgcctatttaaacaccgccgaatcccaccgcctcaatccaccaccgccaagtttcaaatccaaagaactcactcgccgccgcctccgccgcgccaagctctcctctcctccttctcgatggcccgcacgaagcagacggcgcgcaagtccaccggcgggaaggcgccgaggaaacagctggcgaccaaggcggcgcgcaagtcggcgccggccaccggcggcgtgaagaagccgcaccgcttcaggccgggcaccgtcgcgctccgtgagatccgcaagtaccagaagagcacggagctgctcatccgcaagctccccttccagcgcctcgtccgcgagatcgcccaggacttcaagaccgacctccgcttccagagctccgccgtcgccgccctgcaggaggccgcggaggcgtacctcgtcgggctgttcgaggacaccaacctgtgcgccatccacgccaagcgcgtcaccatcatgcccaaggacatccagctcgcgcgccggatccgcggcgagcgcgcttaggccatcagcccacctttggttcttgcttgattcatagggacttgtcatgttctaccagttggtgttattattagatcgtcgctttgtcatgtcgtagtcttagattcttagtttccatggttgcaatgtaactgctggttattctgaaattgcaatcgaagtaatctgttttatccccaaatttctgtgtccatcttgatcctgtgaacagattgcctttgactggatgatgtgatgttcagaatgtttctgaagttattctgatgatctgaactgaatatttcggttatcctagtacttgtcctgttctgtttgatattcagaaatcaaaatggttctgaagttttccgattgctggtatggatttgcagcatttgtccccaagattggaagtagtagtgtttttctcaaaaggaaaagcattgaaaagaattgcagttcaagtctctgttatattcatacataaaggcaagtactctatacttctgtagtctgtttcataatgctcaaaatctgcaattcaagtctcggtaccgtagtactgtgtattagtaggatatacaataaacatgattttattcttagttgaaggtttgaatatcaaacctctttatgtactactgactactgagactttcatactatttacaacatctcttttccagaagatgtgctttcctgtcatattctggtttcagcaactaagtatgactagattggtgctgtgattatgctatgggctgtaggtggcaaagtttggaaagatcaaaaggtggatatgaatatgagccgctcatcaaggaagatgctatgatcttgtttgcagcttctgtcgcatggattccatcccagctcacgtagttctgtggatcagcacaagcttttgcggttaccgtttggccattcagcaatttgctgcttccacagtacacatctgggttgaaattgtaagccccatcaccatatccgcagcaagccttagtcccatacttcagccctgaaaccatggtcaatcagatcagtatcacaacaattgctgacaataagcaagattgattcatgtaatacttgaaactgcataatgtaccactactagagagcatataccatgagctttaggatggcgaaacagctcgagcgtcacagcgtgtttgtcaagatacacaatagatgcatcctgcagcttcttcctaacctcggccaagctattgttcagcagttcattgtagtaggtcactgcactgttgtaggttttcatgcaaccatatccatccatgtcattgctggtatgcgggagtttcgtgaggaatgccgggtagcatccgataggcgccatgttaaacaccataatgttgcgagcgccaatgttgtacaattcctgcgaagaatcgaataggtgagtatggaatatgcagttaattattaatctccaatctcttatctttctcaagttcagctaaattctaatttgcactatttacctgcacagtagaggagatcttgctaacaactgaagggagactttgcttgaccgtctcaatgctctgtgatcccaggttggaggtgagatcattttgaccaatgtcaattgtgtacagagcattgtgcagaacatcaggtgcaggaagttggtctgaaaattaatcttaactagattagcaatactatctctgtcagtagcagataagattgttactacttgaaacaaaaccatcactgttcagatcaattatcctaaatattctcttcagaaattcagcagaatctctgcactgacgcagggcatgactgaactgtctgaaatctgaacaggataccatcactgttggcgttgggcgagcataccgttgttgccattggaggtgagcaccttggtcctcagctccttcatctggttgagctggacagcgaggaagaaggggctgatgccggtgacgaacagcgaggtgttgggctgcagcgccgtggacgccagcgtcgcgaagttggcgccgtggcggtagccggagccgacggactgcaggtaagggctcagcagcggaagccccatcgcttgcactgagacgaacacaccaccatttccttattcagatgagcaatccatggcgcggcgagcagaggaaggagaaggaatgaagaagacgtgcttgcctaggaagtcgacgacgaggcggccgtcggaggcgcggccggcggggcggcggaaataggtcataccgaacggcgcctgctgcgccgggaaggcggcccagaagccgccggtgtcggagttggagtcgccgaagttgaagacggccgggaacctgcactgcgccgtcgcactcgccgccgcgacgaggcagcacagcgccgcagccgccgtcgcgagccacgtgatcctcctcatggcggagagagagagaagagcagatagctcgtaagcttcgatcggcgataggcgggagacggcgcgacatgccgtcgttttatagcgggagagaggaaggagatgggagatcgtggtgttgggctggaaatgtaattttcttttttcttttcttttcttttttccctttttctgagagaaattgagacggcattgcaacgattttgttttcttttaatgagagaaattgagacagcattgcaacgatttcgttatgggggagagaaggagatggggatggattgtggtgtttgttcttgttcatgctcgttgttgctgtccagtgatgcaaagctcatcctcagcagaaaaaagatagcgtggtgaacagtgatcctcgattctagatcaaacgataagttcttcaatgacatttaggccttagtgtgtggatggaacagtcaccggccgacacatattctggacttgtctgcagcaccacagtacatatgcttgtttcatacggagtatgcccaaaccagtgctttaggcatgcaaaaaggtgcactacctccgtccaaaaataagtgtagtcatgagttttcgcactcaattttgatcattcgtcttatttgaattttttttataattagcatttttgttgttctgagatgataaaatatgaacagtattttacttatgacttatgttttaaattatttttaaaaaaaatttaaataagatgaacggttaaagttgggcgtggaaaactatggctgcatttattttgggactgaggtagtaattgttagcgtgtttacttaccatctggaagttgttcgtcacgttattgaacgagtgattttgccaccatgtcaagtgacaaccaaccgtcatccacggacatgaactatccagtagtgagctccagccagcaaattgccacaggaatctggctgctgctgtgcagcacacagcgttcggagcttactgaacaacggcgggaagaaattgctgaatcgaccaaaaaggagtagcaaacgtatagcaaccaaagtttcagcaatcagaatcatcacctactggctctatatatccgacacaaaaagcaaggttaagtttatgaaaccgcttgggaagcacaacaatagtcagttcatgaaactcgtagcggaaatacgcgtacaatagctagcactcgaaaccatcattaaaaacgcgacatgtatggcgcttgccagcgtaagatggacctatacatgggggaatatgtggagagttttgttctggactatgatgtgccgatcaggtgctggataactttgtcagggtcgttgtcgtggatggccagcagttcgggaacatttgaggatgtgaagcccatctcgtggagagcgttgtaggatttcacaaactccttcacctgcaagtacataggattcatccttgtcagtttctctctcttttttttccactgtctacaaatgctcgtggcgattagaatggcagaagacacttctatctccctgagaagtagaaaatcgaattccacaaaaactaccaactggacagaatggcaatcactgttttgctagaagaagaaaccctagtgcttctgcaaatactgattgtatatagctatcttgttgacctttgaaaacctttttgagttatcaaagcaatggtttttgttcttgatgatatgttgaaagaaggtaatgataaatcacaagataaataagggaaaaagcatgccttcgctggattatctccatagttcaacacagcaaatgagacagcttcacgtccaagccccatggatatatacttgtccacaactggatcccctggagtagcctgcagaagggcaaaaataaaaataagttttctagggagatggcattacatctctacaacttcctagggtacctaacttgttataaacagctgatattgctatcatgtgaaaggatgccaagaagcgaaaaatctcttgagtatcaggggtattagtccccatttgcccaaggaactttatatattagcccttgcaatggattatcgatttttcaacaacagcctgctccctgatgttaagtacctagcactatttgtgtaatacacaatactatatggaagacaagaattatgtagatattattaccacagaagtagtgggagttgtgagttttgggcctcttggcggctgtggtggtggtggtggctgactctctatcacaaacttgctccagttggggttctccttctcagcctcagcaagaattttcctttcatactcaaaatcaaaattgaaggtactgcgaggaatttctgtaagctgtggcggcaactgaggctgcaataataaaagcaaagcacacattagaggatggccaatgatcaaatatacgagggaagtgtagataataaacgttgatgcatttaacaaagaaggatgcataaatatgcaaaatagatggaagtttgcaagatgatgccatttgtctctagaaagaacagctaggcaagcgcagtacatggaacaagttttgagggagcccattatagtatgaatcatgtctgcaagctaccaactagaacaccatattcacagtaaaagaatggaatggccaataaatgaataaataaataaaggaaaagaacaaacagaatccatccacaaagtctactatacggaataaactgcactatctatatcttctacgatgggcttctaacaacataatagtccatcaagaaacaactagaccattaagatttgtgagcgttcagaacataatagccccatgcagattgaataactagaggtgaatcctgagctaatgctactagaagtccattatttgtgaatatttgtagtggagctatttcctcatctctaattttacgcacagaagcacaaaccaatatacagagagacagtttataaacaaccatatctcctgttacactgcaacataatatcttcgttccttttcaaaagccaaaggaggataatttcagcagttcaaaactatcatgacgctatgatttatgtctgctttcaatacacaaaagttagaaggcatcaatttgaatctgaaagaacagtgtttggctgtttgctaaataaacaccaagttactccaattgaattaccaatcttaactaaacataaagggaatttataccaaacatcctgcaggcattaaaatagaaaatttggtaccaaagcagatgaacaattctcatgtaggtgaatacagcaaagtgatgactgaataacaaacttagtgacttacaggaggggttatccgatatgctggctttatcacaacttgtatgcccactgcagcaacaacaattaatgatgaataacatgctcttgataattggcaaaaaaggaaacgctacagggcagtttctaaatctggcatgatatcaacagtaaaaacagggatgttccaatatttttgtcttcaaataacttttgggaaaaaaattatatcgatgggcccagggaattctacaattttaccaacttcggctatgttgaaaacaccattaaaacaaacacttcaatgttttcactcccacagtcaatgtttcattagcaaaggtgcagaaagaaccctatgctgttgcatttatttgtctttggctagtgaaaaaacgcacacatgcaaaagccagattttctcgcacactttaaaatatagaaagtacagcattttcaactaaacaaagctgttacttttgagaactcaattttgtacataacgagaccatgtttaggcctatactgaggtcaactagaacatataaacagtagtagagctcgttcccttatccaaagacaaggtttaatctaattctgttgttgttgctgatacaagtgcccggtacgtcccctttttcattgctagctaggaagcatagcatggtgaactaactaatcacaccgatgtgcaaatgattaaatcgaggcaatttactgcatgaacaagcttggtaggtctgacaagccacctagaaaccaaatggtagtagaagttcaatgcacaactcaaaaccaaactagctcagtttcagggataaatcgctcgggatcacgatacccctccaaccggattacaacatgagatctgccaatctagcacgcaatccaatcaggtagaataagctgttcacaattcgatcgagtaaacatgacacgcagttctctcttctgcgctacccagcgattcactatgcagagattcagtatgcacagagcggggagggagggatttactcgatgtggaggacgaggcggggacggggtgcggagccgcggagacggtgggggggccatggtggtggtacggcgcggcccgcggcggctccggcgggggcgcgttggcgacgccgtgggagggctggccgacgcgcgggtagagggacgacgaccccccgccgccgccgacgccgccgccgtaggatccggagcccggcctgccccggtagtcgtagtccatcctcgccgcgcgcgcgcgcgcccgcgccggtggggctgagctcctcgggtgagagctgacgcgcctcgccgccggtggatcgcttcgccgggaaggatggaggaggacgcggttgcgggtgggggagaattggagcggagaggtggacggagtcgccatggtcggggaaggaagaaggcaacgtgatgggccggatcacgaggcgggctgggctggggttgtgctcgcgtggacgccgcttcggcccgcatcgaccgggctttgcggtgggtgggtctcggcctgcctgtgcgtcgagggtgggccatgtagggagggtgggccgcgtgatccgaagttgacgaccacggtaggaataagttcagtttaactccctcagatatatctccaatctaattcatatatctaaaccgctactggatatcttgaatcaacaaactattagaattggtgtaatttgactccttcaaggtttaggagggtcgctaatgtggcactttgatttggtctaaccttttgagtcatcctatgggacccaaccatcagtaacccttatatttcttctcttcctttccttttcccttcgtcggatcggcgccgccccctcttcccccttctgctctgcgctggaccgccattagagatttttatgggttttagggtgctgttgtagcacgaaggggcaaattttaattcttttgccacttgtcgtcgtggagggggttgtctgtaaatatgttgcctacgtggaatgccacgtcagcggttagctccagtcaagtgaggtttggactggctacgaatcattaaaccaagatgacagatctatatgtgtaatttttaagtttacggacctaagtgacagctactttcaagtttaaagacagtcatgtattttacttaaaaaaaatagcacttattcaattgctccaatgtcatgatatgtgagcaaatgggtgcttgcatttacggttaattatttttttattgataggtgatatacatgtcggcagcaaagacgttcgtagtgatttcatcatcttcaaaatatatcggtcaagtttttataaggtacttacagtatacgcgcgttatgaacgtccgtatttgtattcgtatagtgtgtttctaaaataatagtaagagtggaaacataatcgaacagaccaagtggcgaattaatcatgtctatcctatcaatggatgcatgcatgcactcttccgttaaattagcgtgcaactggcgatggcgatggcgaccgagtctggccagtctagttaatttctctctctactatactcaacttatacagatgcttacaaataatgcaattatgtatcaggtggagtggcaacggcgctcgatcgatggccttcgattcccatttctatggctggcgtttttgtccgttgcgttggctgcagcgcaggggatcggcatgggtcgtccggccaccgtaccggccgggctaccggctcgtttcgccccgcgcgcggctcgatcggcatctctggatcgttgcatgtcaccgtgcgcgcgctggcgttttgcgttgtccggtcaggcgcgctaggcctagctatatatcgatcgcgcatgcaggcttcagattgcccgggtttcactccctttctctcccagatacgcagatagttagatcacagttgttacatactcccctacatgagggtggcggatctgtcatgggggcgatagagcctcgagtactcactaccgatgttacaaccatgagagttttcattaagtttccactaaaaatttttatcatacatatattagattattagaataatgagttatagttttttataacttgttcagccctttctatgagttcttcttggatgcaagcctttgcagttttcatcccataaaaaaaaatctaagtagggagtgtagttcgagatgtgataatcttattactaggatgcatcacatctagtttgtttttattaccatccatattagtagtattgtgattgtcatatcctgtactagatttattttttataggatgaaataagtagatggagtagatcgtttggaacgttcctgtttaattgattcagttatagctaataagacatagaaatataaataaatgaccatacaaatagtttgtaggtaaacttgcatgcatgtttcattaatttgtagttatggttaaaaaaaactcatgtcggaaaatacaccacttatacggtaaaagatatctcgcaatcaactctatatttgaatttcaaattttaatttttggctctgttacgttactaacatgtttacgatttctagttttttgtaaaaaaaaaaactgtgcgaaatttattcgttcatcttttttccatgaagtgtgtcggctctatatctcgatacaagttgaaagcaaaatgccaacagttttcttctgttttatttctttaaagagatgccaaaaagtagatatttggcgtataccttctgttcccaagcgtatctaaactaaaacatgatgcgtttaatttgtccgtgctccttcaaacatgtcgctgtacgttggcgattttggcacgttgcgtttgagaggggaaaaagaaacaaatttgggcgtccattaggcggctaatcattctgctgcttttgtgattatgtcaatagacatacatatatagggagtgattgattggtttgctcgtcctgttatgtcttgatctcgtcatagcgaagaactctgctgattccttttagacctttggccggccattattagattaatttctcacatcaattaatcgtgtgtgttaattttatgctgaatggctaaatagataaataatttatactaataactattgagagcacaagcatgtgaattaactattataaagttgtaaatgtatttaaatcaatattataggaaattcaaaattcatatataaaaacccgttcaaaaatcgtttagaagcttcttgcatgttcatccgttttcacgtttcacagttttcacatcattaccttctctttcttcaagtcttatgaagctgctatatagagttatatataaggcaagtttgcatagctctgatctaaatccaatatatttagaactagatattcatagctccagaaatacatttttatggatatgtcattaaattgataatgtttgaaaaaaaccattttattcctatttcagattaaattccttaaaaaatataaaaaacaaaatattgtaacttaacttacaaactctacatcagcgtgatctaaagctgtgacaaacaaaatatctaacttgttttcggaatcaatttgttcttcaaacctctattcagggtcaatatagcagaagaaaagggtagattcttttatgattaggagtggttgaggagcgcgccgtttttacggatttgcttataaactgatgatttaacagctgtaaaatgtactcaactgttgcatggtcaaccgcgcgagcgagactgcgcacgtgacgtccgcatgggcccacacgtcggtgagtcatttgccgagaggcggtgtcgcgtggcgggagtgcgatcagctgtgccgcttacacgtggccgaagagattaaagatgagcactttgtttttttctaaaaaaaaggttaaagaatatttactgatccaaacaaccaattaaaataagggaatttaactatttgacacttttaagatggataattaagaatctgtcacccgcaatatataacatgcggaccaatatgtgagtccttaattatcacttgtaaaattgacaaaaagttaaatatctctacaatgcaatatatgacatgcggaccaatatgtgagtccttaattatccttgataaaaagttaaatatctcaaaaatagaacccaaacaatgggtgaaagaagatctaaaggatagatggtatcaagtcaaaatgagagggagacaacagtctatatacgtacatatgtaacaaatcatgagtgattaggaggttgaagattttgcaaggatccagatactataaaaattcctccttgcaattcttgagccttaagaatctcttcgtatagcttcgttctctctccctcccttttctctcgcactgcaactactaccgtatcgattgatcagtctcctctccttcatctccattaatttgcttgcaactactaccgtatcgatcgatcagtctccacctctccttcatctccattaatttgcttgttgagagcttgagatcaagcccaatggtggaagtt

SEQ ID NO: 7223 - DNA, 4567 bp, Oryza sativa
ctatgttgacttgattgcatgtcaaacaacttactgttagtgataagaaagattatatatgtatatttagtgatttaaaataaatattaaaaataaaattacgttaaaaatactctaaacttatatccaaaactagtaagttttaaaaattaaattatgataatagttgaattatatttgattcattggacaaactataaggctgacataaacgtatccttgatttgtactttattcttttaaaaaaacatgataaacttgaacttaatatgacatagataaatagagatgattttaccggatcccataaatatattgaagccgtggcaagtggcaaatcagcgatacttttacaagctatgtagcgacgtggtttgaaatacaatacaaatgcatccgtttaaataaaaacatgtgctcttacctctataaatacatacctctacgatccctccgagtacaggactgacatgctttattaaaaaatgacacttacacgcactcatgtaagcatgcacacactcatcatatcttaaaattgacgaaatcatctatacatgctcgtataaacacacactcacacccttacgaacgtacgcttgcactttacctctatgagcattagactagtatatcatgagactcatgaaaaacacctatagatgctcttataaacacacactttatttctatgagcatagaccggtatatattgagactcacgaagttaccacgtgctcctcggtgttgacgggtcgccgtctatcattagaagaataatataaatgtgcacacatatattaagtcaatgacttaaatttgggtgggcaagttctaccaccaggaattaaaaataaccaacaaaaatcatatttatattgtttgttgtgttccagaaaaaaataaaaaaaaatgaagaaagcacttatctagtactccctcgttttaatattataagccgtttgaatttttttattaatcaaaattctataaactcggtcaaacaaactcagaaaaaattatatctacactataattcaccaactatctcttattacatactccctccttttctaaatgtttgacaccattgacttttttaaacatgtttgaccgttcgtcttattaaaaacttttgtgatatgtgtaaaactatatgtatacataaaagtatatttaacaataaatcaaatgatagaaaaagaaataataattacttaaatttttaaataagacgaacggtcaaacatttttaaaaaagtcaacggcgttaaatattttgggacggaggaggtagtactttatacttgattcgtagaaaatcgtccaatccgacgctcaagatcgtcgcggaccctctcctcttcccccgcacgcgctccgcacccacacctcgatgggccgcgcgtctcgccccgatcgcctcccctctctctctctctctctctctctcgcacaatcatcgccgccaccaccctctgcgccccgcacgctcccctctcccctcctctctctcgcacacccgccgccgccgctctcccctcctctctctcgcacacccgccgccggcgccgccggcggcgtcgatccgacgtcgattcccatcttcagatcgacgccaccggcgccccctcacgccggttctactcacgccgcaagaacgctatcgcctcgcctcatcgatctccgacaacaccgccgcgcgccgccgccgatctccgccgcaagaacaacgtcgctccgcctcaccgatctcctccgacgatattccgcgtcaattaatcttcagatcaataaggtacccatgccatgagtaatttgcatgttcgactgtagcgtttaatttgtcaaatttccattccctggaggtggcatgaacaatcttccattcagttcgtcaaacactgcactaggtcccatgcagtagtaaatatatcaagtttgctactctactcgatgggacttgaaaatgttgtgaaatctctttcagttgctggtagaagcctggcattatgcaattttattgatatggtgcatagattgaaggagctatttcttttgtccctgcagatgcaagcactgacacaatattcttgtattttgaacacataatttttttattgctgggtcgggagaaaaatttgacagaccataaaaatccccaaaatgaactttagtttttaagtcaattatttctagaaaactaacttcagacaactttgcaactgataggtcattgagacattgtgttctggtcaagatcaagagactttctaaactaccatgctttttttttttacaaaacaatgtaagattttcagttcttgtaattttgacggccattttgttcaacttttcagaatttcagattttaggacttttaagttttgtttatttcacagcgttttgatgctttgctacttcatggacctttgcatgaccttattcaacatgtaataagtactaccgcaatgcattttattttgacgatgactgagctagacttcttttgagttactcacatttggatctacagttctgctgatctaaataatatttgctaatgcaacagcagttccaggagaatctgacttagcagatgtaaatatgtttctaacattatatgagattttttatgcgtatctatacaagccataactgagttcctatacaccatttgtcagtgaactacccaagagttgtaagaactaggatgcacttcaagttttaaagttaatttgagcagaatttgtctcctggatatatatatatatatatatttgagtaataatctaatcctttttgaaaggtgtatttctgtgcttcttcaaatcccctgctgctatgtgttaggtgctctgataatttccattcaactcgcgtattcttttatgccactttgtcctgtgcatctaatactgtacatttcagcaggattagaaaagtataataatggtattggacaaactacagattggatatcataaattggaaattccggggaatatgctaaatgtttcctgtaaatgcatatactgattttttatatgctgctttatttcccataggggtatatactgaaatttatataacaaataacagatttatattatcaaatcaccaaatgtgtacattgtactgcatgtaacagaatctctctccctctcaagaaaagggaaattatcagcacatgcataggttgtgattaatgccacatgcactatttgctagctggaaaccgtatatttgcaaaatatccaattttgggcaatatattggtggtatggcctcctgacatcaactcttacccatattgtttgtcataagatctgctatcctgaatctatgactctaaaagctcccaatctttaatatttgagaatcccgtgcataggcagtggaggccgaggaggccgccatccacaaccgacaacgacaacgcgatgctgctgccgcctcaagatccaccgctgcctatccgtactcacgccaccgttcctcctccgccgaaaggttcagggcacccttcgccacccctaccccatccctaatatgtctcctctctcccgataagtatccctgatgtcgatcttatgtaaaagcatgatttatgctcaatatatattcaatgtaatttgtgctggaaattgggaatcatggatgacattttctgtatatctacatccaaagccaactgtgaacagttgtattttcctctgataagcactttcaaactcttgaatatgtaccatactgctgatttcagtatggtggggaattgatgtggctggaataagaaaaaacattctcacaccctgtgtttcttccaaaaggactatatgttcactattctaagggtgatttgtctacatgtgtatcggacaatcgctgattagtccctgccatatctaactatgtatattcataaattagtactatgtattgctatattcaagtctatatgcctatgcttctatgatcacatagtactgtgtgcaatataattgctctatagtcaaattgaagggaaaagcctttatatttctgtgctgaactggaaatagataaatggcacatttgtttttaataaaaattgggttgtctgaagtttagagcactgaaatgcacattgttattgtcccttgaaagggtaaatatatttggatcattcgtgcatatatgtattcgggaccaatatatattcttaagatcattgatttagactctatacatgggaaatggtagcgaccattgaataaaaatgtgttttggttccagtaactggatgggatagatttgttgtctacgtttggacgatatcttactgatttccagtaagatctaagcgtcggtcaatttttcatttcattccagcctccgacgataggtactgtgccgttaaagatacatgtttctattcaagttaaatcacacttatgcaattattcatggctatcatttgagattgtactaatggtttgtattatattaagggatccatatgcttacaaaattgttctggattattttttttctatatggttcatccatacaacttaaatggata

SEQ ID NO: 7224 - DNA, 28006 bp, Oryza sativa
  unsure (1)..(28006): unsure at all n locations
atatgacatggttaatacaataatgtacccatctactatggataataatggcaattagttattatgcagtgatgctttggatatccaatagttcaatagtggttcatgagctttgactaattaaatgcacacatctacattttttctcaacatccatctcttcagtatataccttagcaacttgaagcacaaaatgaccaagatcagggtgctttctgacacagtgccgaacctcatgtgctccactgaggtaagaattgtttgttagcccagtaatcttgcaacatgagaaaacaaaaacaaattagcaaccagattgttgaaattgacagggaagtcatctagacagcattttgtataaataaaagttgtagcgtacaaattgattgggcacataacatggtggttctactgattatttgcaattaaatttctaaacacacaagttgttgattcttgctaggaagttggatgatggcatatatagggcatatgaattgcaatgagagaaaacaatgcacatttttggtcattctatccaaataggctattatcctaaggactcttgtcaaatagttggtgtatgttattcacaaacaaggggtaaaggaaaaacaaaagaaaaaaggaatgtgaagttgccactggtaaagcagccagagtgaaaaatgttgagatttaacaagcgaggacatggtctactgtcaactggtaaataacatgaagtggtttatgtcttgtatgataaaaaacagaaagaatgtagattaaaaagaatggcatggatataagtttcatttagacaatacctacagcactaccatcactgttctaaattttactatcaagtcccaacaagcaaaagaacaaaaaggagtacagctgcacaatggttatgcaaaagaactttttgcatttaatcaaaatttctaagtttgtcacatttttctactatttcatggtgtctaacttaaattttcaagttgcataggcatgaaacattcatcagacatatcaggaagacatgcaattaacgataggcactaccaattcaccaccacagtaagtattactgcgtgatttgttagcaggcagaccaatatttcagggtcaaagcaattgcacaaagaaagtttatagtttccaacacattgagagatgcattagagacagtgaccaactaacagcatagacaagtcatcatacctgaaaggtagctccattatgaatgatttcatgcgcaacaggatcattaatgtactggtgtagtggcataaccatatcctccacatcatatgcattaaccctgtggctacttctcactttatcaatccccctagcatctctctgccaaattaacagtatgcttttatattattgcaaaaatggtttagtataggcatcaggcaatgaaaacatcatcatcataataatggtaattatatgtgtgttgattccaaatatttctgaactctattttcctgatcactcacatcaacttaagtgtaaactaatagcgggacaatgacactaaaaccgatgttcaggtgttacaaaagcttaagagatcccacctgaaagtcaaaaccttcctgctgacaaaaccttaaattattattattcaaacactggagcataagcattatcttagatacttggagttaaataaaattgattcttgggaaactggcatgtcctagatggcttccaaggttcaagtatatagtctccgctccatgtagcaaaggttcaattgactagattattgcaatgtgtttttgtttgattgcttctaatcaagactagatttaagatgcacctgtggatcatgatgttggataaatacattggcatataaaggttcaattaaatagaggcttgattatagtctgctccatgcagcagatgttcaatttactgttagaatggatcaactactttatctttgctgcaatgtgtgtttgtttgattgcttttggtgaagactagatttaaggtgcgccttctagaacctgatattggatgaatacattggcatagaaaggttcaatatctagaaatgcaggcttgatagtttgtcctagttgttttcctactagtggaaaaggatgatactaagcaaaaggtttggctgaaataagtaaacataccctggcaaacagatcttctctcatccacgggaccaagtatttccaaggccatatatccaatgtacttacagcacgagattttgttaacacacggctagtcattaactttgcagatgttaagtttggatgcacaagaaatctggctgcaacttcgaccgagaactcatatgtgctgaatactcggtcaactgggttccttagtattgtgacaacagaagtcctctcacttggcagcttggacatgaagctatagtcatcatgactaacaaccagcttacaatcaggatggctgacacaaagatatataaaacatcattattaattgtaactgcagaatcatgtgaaataaacaggagtatgaagccgctcaacttgtacagcaaatactagtggataattacatatcagatgctttaattgaacaatcaatcttgagtccatcacaattttctcgcatgactgacacgtgttcacgatagccatataagttgttgattacgttgttcaagatgtattgaatgcctggtaatccgtataaaggtaaaccatatctactgttttcagtcagataagcactaagaatgttattccaatacatgggaatactctaaatcagtgttaaaccacagaaaacatgttaatccatgggaatgttattgtctgaatctgaataggatagtacatagtgtaaagtaataatattagtaatacacaaaagacaatctagtttattttaattctcatttggttggccaacataaagcttgacaaatatacaatagaacaaaaacagagaacaaacttttctacctggggtcgaaccgcagcttatcgtaggatcgcggacactcctcagcattggtatacagctttttcaggaagctgccaaaaacaactagcatgagtgaaatgcacacatcctttgatgacgatgaaacaagctactatgcatgtccccatcgtaccagtggaagtaggtacggccaccggttctaggaatgtgaaggaagaagagcagatccctgaggctcagcttgtccccatccttgccctcgctccccgcaaccgaggccgcccagcccttgacgaccccctcgcagcgcgcgtggtcgccatcggagctcgcaacctggagcaagttcactgcaaacaaacgaaacaccaaaaacgacacgcgcaaatcagcgcagacacatacatagctacccaacgcagcgatgattccacggaatgatcctaccaaaaaccgaagcgcgttccgcccaccacaaattcgcacgcggcgggggagggcgagaggagaggggattgattgattgatcgattacctgatacgacgaggagcgcgagcgcgagggcgagtccgccgaacgccatcgggggttcgggcccagatccagccggggtgccgcggccccggttcgaggcggaggaggaggagggcggcgcggcgtggggaaggggggggcagagcggggcggtaaaaaggcaaaaacccggaagggagaagagggggagggcggcggcggcggtggcggtggcggtggggaattgagcgcggcgcggcgtggcgtggcacacggcgcggcgcggcggtgtctcggcgggcgcgggcgcggggtggtgggcgtggcgtggcgtggcggcgcgttccctagtttattgtgctttggcgctcgctttctcgcgcagtgtctgctgctgctgctactggcggtgtctctctctcgttcgccttctccacctctccgcgtgccgaggcagaggaggcggaggacgaggccgaggccgaggcggggcgacgtaaatagtctagtggtggaagtggggggaaaatcgcggcggaagcacgagttttccttctcgccacttgcgccgttgcgctgcgcccacccgccgtcctcctccgcctcggcgcctcccttttttacccgcacggtgtccaacgaacggagccagatcgccggcctgatggtggagaaagatttacagcgcacgcgaaacgagaaaattcattacctccctccatctacttttaatagtcatatttcatcttgacacacagaccaaggataagtaattctacttatcatttatttaagcatgctactagtcattcatcgtaaacaagcgattcattaatatttacatttctcaaagcccatatagccaatcatgtgtggaagaatggagagtcacgcattaaattcgagaaaatcattaagatgatatgttgttggattgaaatatacctatcaaaaataaaattttcagatttggaaatatgactatcaaaaatagatggagggagtattattgttataaacttgaaaaaaaaatctatttgattctttaacaacttttatatagaacttattttttaaatacacaccatttaacagtttttaaaatatgctaacggaaaatgaagacgttgaagtttggagaccctgttctaatcttaactccaaacattaacctcctcattttcacatttgatatgttttgtgaaacaaaaaaattatatatagaaatttatttagaaaacaacatgttgtcgttttcgacaactgcgtcacgtcgaaaaacgtggttctctcaacagtggttggaaaaaaagataattgtattgcttagtaaaaattttttagatccccttgttacatggccctaggggcctatttatagctctattatagactcctccatcattagggtttaggttttacatagaatttacatgtatgggcccctaatgggctaagtggctaggcccaattgttggcgaaacctctggaagacacgatggcccgctaggccttctcccgatgaggtttggtacttggcgaaacccatgccttcgtgcaaaggctttcgtcccgcagtcttcgcgccgtatggccctccaacaaggtccgcatttagtgaagcccgcgtacttcatgccacggctttcgccatgtggctttcgcccatgtgggtgccttctcggccttcgccgcgtgcccccggcttgagtccttcgcctaggtccttggtttcagtaggcccagccgaaggtccacgtggtatacctctaacacaacaataaacatatatttcacatttgtaataattaatacttaattaatcatatactaatatattttcttatttaatatatgtgttgaaaatctctcttcaaccctaatgaagctttttaagtcactaatatagacgacttattttactgtagtccatacgtcaatggtataactatagattgcacaaagctatagtggtcttgtccccaaccaacacatttaaaatagtaaaatttcattgttcggctaatcctcaagggattataataggattaaggtggattaatttcacacctcaatagtcatggaattaattctctccaaatccctctcaatcctcctatctctaaatctctctcaatctttttgtagtgataagtgtggaataatacttttgactttttaggggcattaatcgaataagatccgatgggttttgcagcctccagcgcacggtaaaattagaagcgtgttttatactgatctaaatttagcaggttgttaataggtatttaagggcctatttagcacagctccagctctagctccacccctcttggagctggagctcagccaaacagtttcagctctaccaaaactgagaatgaagctgggtaaagctctctcacaaaatgaactgacttgtgtagctggatctagggagcttcacaactccactctagacccaactcctgaagctaaatttaggagttggggctgtaccgaacatgtcctaactgtgtgattacaacatctttgccgtttctgcttagaaataatcggggctacctctaattaagcctaaagaaggttacacagcaagggagcaacttgtggtggcagtcacgcaggcttgccgaatcttgctgctactgaagaacaatctttttgtggaagcaggctgccggattcaggcttatcttgtccactaccataacactacaacttagtgccgtttggtagagggaagatgattactcactaattgatcaggttatcagggtccctgctcctgccaaaccttttcttcattcatcttcttgtgtattccatccatctttttttaaaaaaaaaaacttgtggaggccatcgtttcgtttattaacggaataagcgaaacgttatatttacaaacaaaaataatttgtaaataaaacttttatatacgttttcttagcaatctaaaagtaaaatcgaaaaaataaagtacgatgaaaaaaacctcaaaatcaactccaaatttaaggtttaaaattcaaattttagcttataagtataatcataagtcaaaagatgaggctgtgtcacaacttatagttatgaatgtgactatattcaaaatcaaactaaaatattgattttttttctaaaagaggggggatacattcttgtaggtactgatgactctctgtcagagtgcaatgttcagtaggacagtgtcacctgaaaggacttaatcttatccaatgaatgattgagcagttgttttcaatcaacctgggaagcctgcaactgaacacttgcatggatgatgcattactgacagtgaaagtgaccagctttgctcactgaatgcagttaaccaatagggaatatactgttctcatacaatcaggtcactgtgatctatcaagtctggataagtactcctaaagatcactgaactacaaggtatttgtccaaaactacaaggaaactgtgtgcactgtactgctaattaattccatgacatctcaccatttcaccaatatagtgacgtatatccaatacttcttcacaaaactcaaattcaaattataaggtttccaaaaggaagaactgattatggactagaacttaactagaatcctctttgagtgactctaaaatcctcaatagttaacaagtgtcatgtaacgactcatcaacactaaacaaataaaacaagaacaaactaactgattactactccatgcatactgctgcctatcatgtcatcaagatacaaaaaaaaaaggaagttcaaattaacaaaacgaaaatcatagccacgtcaggtgacacgtggcacggttcatcacgcgtctctgtattggccgtacatggaagcgtggccaaacaatggcgggaacggcaggtgcgggtcgacctcgccgtggtacagcgggtagtcgaacccgccggcggcggcggcagggtcgaccacggcggaggaggaggcggcggcggagacgacctcgtggagctccgacgagtcccctcggctcatgacgaagtggccgccgcctccccgtggctcgtaggagtgctccatggagaagtagctctcgccggcggccgaaccggccggcgagacgaacggcggcgaggagaaattattacaccctcctcctagcgcgtcgtccggcggcggcggtggccccaccccggcgtggaacggcggcatggaggggaagcagaagtgctggtcgtcgtggaagttcgtcgtcgtcgtcggaggcggcggcggcggaggagccagcccgttggtctccaccttcaggccgtgcctgaagttgacgagcagctccacgctcgggtcggcctgcggcggcggcggaggcggttggtcgccggcggcggcggcgcggcgctgcttctggtggcaggtgtgggcgccctggtaggtgacgtcgaagacggcgaggtcggcgtcggagcgctgcacctgcttggtcgccgggcagccttgcgcgttgcgatacgtgcaccggtagtaacccctgcgaatccatccgacacgtgtcagtgacaggaggcatcagatcatgcatctggcccgttcatttttttactttctttttgtcggcccacaagctttaaaaaactgagaatgttaattttgacccaattttaagaaatgaatttgccacgataaatcgattgggctcggactaggcctcccaatcaaaagcttttatcgtttgttaaccacaaccaaaatataaaaattgaaacttaactttattttttaaaaaaatatcatgttttatcagtaattcatcattaacttttaaatcattaaatatacttatataaaagttgtacccataaattatttttgactgcttcgattttttttaagcttatcaaccgtagagtcagccatgaggctgtaaaatgattcgatttttgtgtttggaactatgggggcttcaaataatggtgaattttgtagggtttttttttgtggggaatgaattttgtaggtttaactccctcccgtcaagaaacaagctgttttgggtatttacagtcttcaaaattgatctttcaccactagttttattcaaaataataataatcctgacaaaattattataatatttttttaacctacaatatgttttcatgcatccaatctaaatatttagaaatatacttatgtttaaaattaccaaggtttaaattaaaacatgtataaaatgatatgttgagctaaccttgggaatttggcaccgaggatgtccttctgaccatacttcctccaactgaatccatcatctggtgtagcctccaaacttgcatctggcactctgaatttttctgtccatcttggcaggcccttcctgtatgatgatttagagccaagaaaattataccaaatggtcagtcaatgatatttgactcctttttttcctttggttgactcaggcaaattctaataattcagtacagctgtatgcttatgattatgactgtttccacttatgattatgactgtttccatgcttttgaccaaagaactatgacatggatttctacattgcccgtccttggggttaggtccttttcaaatatatttttgacggttgcatatgattggtttgaaaacggaatttgttctttttatatttaagcaaataaccacaaattaaatagccttttttttaggaaattaaatatcctctgtttagagtcacaatgatatttcgaatgggttttccccctgacattgattaaccggagacatcgatattttggaactaccaaaaacatgtggaactggaagctaaaaaattcacattgcaccatgatacaacacagagacgacatacatactcatctacatccataacgcattaggtagatcatttgccctttttgctaaaaagaaaaaaaacagtgacttgattttaaacctagtttttttagcaaattaaattttagagttggttttgagtttttttaccacggtttatttttttagccttgacttgtaaaattttacctagatactacctccgttttttaatagatgacgccgttgactttttctcacatgtttgaccattcgtcttattcaaaaattttatacaaatgtataagatataaatcacacttaaagtactatgagtgataaaacaactcataacaaaataaattataattacgtaaattttttgaataagacgaatggtcaaacatgtgagaaaaagtcaacggcgttatctattaaaaaacggagggaatattatttttttattacttcgttaatttgtctacgacttatagttatagactgtagctggactgataagagccattcttaacattaaggcaagagatttataacaaaaaaaaagtttaaggctctaaacaagtccaaccatgtacacaaataggggcttagaaagggtgacacgaattttatccttattcagtttcagataagacaagccgatgataatatactctatccattatctcaatttgcttaagtggcgacttacgcgtggcgggcatgtccttagtttcgcgccatttttttaaaaaaaattaaagtgatgtgacgacggccaaaatgccaaacgtgtgtgtgagacagtgatagagattttaaagcaaattgaaagagaaattttaaaacgaactgaaagagagagatttttttttgtttagacgaatttgaacacacacacgcaccttctcttgatcgtgtcatggtggcgttcttgctgcgcgacggcggcgtccctcgccgtccggcccgagctctcgtccgccgaccgtggcgagtcggagcggtcgccggtggtgccgcgcgaccccgacgcgccgccgccgccgccgccgccggcgaaggccgccgcctcgatggccctcgcgatgcccatcgccctcgcgagcgtgccctgcagctgccgcgccacgcccctgtagtactcctccccgcggccgccgccgtggtactcgtcgtcggccgccgcggcgggctcgccgagctgccgggcctgctcctcgccgtcggcgaggatgctcagcagcaggtggatgtctcctccgtccatggggcacaattcttggacacgacacgacacgcgaaagctaagctgattgttcttgtagctttggatcaatcagcttgcagattcagacttcagatgttgcaagcaatgcaagatcgatgttgcaatggcagatttgaagagccaagcttgcaggcaggagcaatggaaggatcatgcatggcaagttcagagaaacacaagagaagttgcagaggcgaccaacaagacggcagcagcaaactcccaaagtctgaaactctgaaaaattagtgatctaggacgacaaacaaagctctgacagatatcaggtctttttattcacttcctaccatgtagcaaacactgcaagattgcgtgaactgggagagaagcgaaatggaatggtgatcggttctttctctgcttgcttgcttgctttggtaagcttgctggaaagaatggagaaattcagaagcagaattggaggagatagcttagcaaggacattattgatctaagctagggttggattcatggagagagatcagagatgtggttatgggcacagatgaatttaaggccggtggccatggctgtctgaggtctgaactctgaacttagttgggtttggggagatatgatatgctggtaagaggaagagaagtttgaccaaacagaaaccatgcaaagtttaattcttattttttccctttgtatttctctccttttattttcctgggtgcttgctccccgttgaccagtctttggtcatactcatcatcgtactagtgctattactgggagatcaggaggaatttgctaagtacacccggtatcggtaccggccgaaaaacttgacatcgtatactatggtagttcgtagtttgcgaaagaagaaagcattacttggagtagtatggatctactttatgtttttaatgtcaattaatctcatctggttccatttatcttgggaatattacagtgcataattgcataagctttactactttgtagactatttgattccattttgtaagtcaacttgttgtttttccccctgattcagttggttgtgtagaaattaaacacaagagtttccaagaaaggagctccaatctccattgcaaaggagaaaataaaggaggaagaaaagggaacacgcataggcttttctttttcttttgtttaattaatgtcatattcaccataagcattaagctaccatgccaaaagctcagaacttttgacttgtgaaaataaaagataacaagtgtgatgatctaattagctccagccttttccaaagctcacggatattacatcgaaattgcaggtattaatgcgatgccttccagaacaatcacatatttggagcctgatgtggtatgcttattctcactgggataatgacatgctctgttgcattttaagcttgataccaactagtagcatcttttgtgttggcattcactcaccatagaactgctttttggcaaagtttggtggacttaggaaagttcaaaagctcatatagacagtgttgaccgctgaccagtcaaccctccactccaaattgctactggtcaaacggatcaaagaagaggagaatagcacaatactattggcaaaagagaggtcaacttagaaggttggaagaactgaccaggaatcttcaaacctgtttccgtgtgtagagcaggagatggatgacagtgacgcagaggcttcagagcttgtgcttacgactgcgtgctgacccaagaaaagggagtttgtgggtcacagccgcacaaggaatagttccccccccccctttttttttcttatcattatttgctaagcaatcagaaatagtagtagtacatgcacagaatgagattctagcctaagggaatagtagtaataattaagttgtgcaaaacataggatgacttaacagaatgatctaacaaaagacagtccctgtcacaccgtttctgacagtaatcatttcagcacaagaaagacaaggctatgatctgtttccagtcttttatgagtggttaggtacatgacatgtgaattggatttatatatataccaacatggtgagattacatgaatgggtgaagcctttcttcaattgtctgtagcattgctcgtttactttgccatcttgtagagtgcgtcaatggttccctgaacaaacaatgcacgaataaatatattagagattatattaacttgcattagctagaagacttcaagaaatgatggtgatgacaaagaatggaattgcagaacagagaaactgtttttggtatggcatccaacctgatagtgcttaagcaactgtggtcgtttcttcttgtatgttggggttataagatcacgctccatatcaaatggtaatgggtcaagatgtacagctcttatgaactcatagcctttcagctggcaaggtaaaaaatatataaacatttaaaaatactaaccccgttgaaatgcgtagaaaattgtagggtttacatgccacaaaactttaccttcttttcctttgcaatcttcgtgagttctgaaagaatatattctttagctcttgaattttcacataattcagataaacttccagagataccattttgttcagcccaatgctcaagaacttgttggttgggatttatgacagcaacaaggaaagattcaaaactatttccgtaaatccatatctgaaatagattagaagatacaatgaaaaacaagacatctacaaacaaaacgttgcccaaaaaaaagattcaattattcatgcattgggtagtcaggtgcatcacatttccaaacaaacatgcactatatagcctctaaaatggttagaaccaaatgagcatgagacactaccaaacagtaaacaattttgaggcgaagccattatttccatttttgtgtagttttagtgctattgagcatgtaagccaggtgccatgacatggttcagttagatgctcataagaatttactgtttgatatgcattttaatcaaaacgctaaagggctaaaaaaaattaaactggtgcttttaaaaccatattgtgatatcagcagattatgctataaagaccttttttcccactcagggacactttaacttcatctaatttttcagatcaggtgctgtatacattcatcaattgtttcaacaaacataaaaaacatatgggaaatataatagggaaaaaaaggctcatatcagatagaaacataaaatttgagacgatcccctgaaaaagtgagtagttagtatagtagttaccgaatctatctcttggagaaccccgtacacattctcgagattttctactgcaacatattctccctgtgaaagcttgaatatatttttcttcctgtcaatgattttcaaggacccatttggttgccactcgccaacatcccctgtattatacatggtatttggcatatagtcatcatctgaaaaaaataatgccattatagtcaactagcatgtcccagagattatagaaacagctaacctgtgtggaaccatccatcaatcatgacttcctgtgtaagatcctcccttttgtagtatcctgagaatagaacacttccttttacacatacctctccacgaggaatgctcgacaaagcgtcatagcccatctctggaactgactcaagacgtgcatccaaatgctcaactggtggaccaacagtcccaaccatggaaaaatcatttggtattgcaacaaatgacgccgcaccagtttccgtgagccctgaagttggtttttcataattttatttaaaagtgttactatatcaaccaacatatgaagcgcttgattaaatacttcctaaaggaattgaatggtgaagcaagcatataccatagccttgaacaacacttgcacatgtcacaaccctcaaaaattcttccactgctacagataaaggggcaccaccagacacgataaaacgtagttttccacccagtctttctttcacctaaaggataaacactaagttagggcaatgatatacatatgaagatgcattgacagtctaaattttatctgatgaagtgataaaaaaatgctcctgaactagctaattgtaccttgctgaaaactaatttgtcaaaaaatggagctgctttctcgtgtttaattcctttcctcatgctgtccagtttcctgttcatttgataattatgactaattcagaatttgtatcacaccatgacataatcaactgaacaaataagttgaaaaaaatgatgaaagttcagaaaaggtcaaaggacataagaatatcagaagaaacttatattgtccaatccatcaactcaagagttctgtaaaagaaattctttttggaaagccttgtaaaaggagttctcagtatagtcatatccagacttacagcttgtaagcaatattgaataaagctttcttcagtatgccaccagacgagatctttcctgtaagacctacataaacaaaatgcatcgaatattagttaaggacaaaatattgcaagtacagctagacattatgtgcaactttccactgaatttctacattaaaggactttcatttacgcagagttcagtagctagtagatcaatccttgcaaaacatttccaccatatttgacaattaacagtttctggtttgttcccttatgcatccttgtcaaaaattttcaatctaaagagctagttttgaaataatttcaagtaaggcctccagtaaactgttatggaccttattgttatagtatatttttatatttcacatgttcacttcaatacttcatatgaaaattttattaatgcatttagaaataatgagaccatgaaaataatagtagtctaggcatgttaacatcatgaacagaaatatggcagggtatcagataaattgattagacaaataaattctgagacatgtatagtcattgagttccactttccatacaaggaaatcaactagtgggcattaacatgatattagctataaatgtgtacgtttggaatttacctgagtatattctatcaagtactcgtggaactgcacagaatactgttggttttagagctgcaatgtcatcgaccaacagcttgacgtcctacatacatatatgacactatttgagtatgcatccattgaaagcttaaatagaaacaaggagtatccataaatcataccccacgccaaaatccaatttttgatccgtgtgaaatgaataattcttcaaagattctatcaaagatatgagccagtggaagatacgatatataaacatcatcatgatcaaactgcaaaagagcaatggagggcaaataaaatgagttgcatgattcattcaagatagtacatagcaatggttattacagaatacaaatatattctacactcacaggttcgccaatagacctggtcacgcaatcagcaccagtgatgttaacaagaaggctttcatttgatatcataacacctttagggtctccagttgtcccgcttgtgtacattattgtgcagatgtcagatttcttcttttcaggaagatcaaaatgatgatcacctccctataagcataaaagtcagacaagttcatttgtaaatttgtaatggttcggtagcatgtcatataactggtaaataacacattattagtcagacaagtttaattcttcaatataatcttgaattataccaatataaaggactaagtaagttgaaacaatttataaattaccatgatcaggaattcctcccatgagaatatggacatcccatgatttttagcctcctctttttggtcatttgtcacacctccaaagctgatgattgctaaataaagataagaaaataaaagttaattcatatactccagtgattgggaatcgactaattgatataattatgggtataaaatgaacttactcttcaaatactttgatgtggcatgacaagttttcaagagctgccatcattaaaaccattaacaagaattaggatactttcaagtttaaagcaaccatagtaagcactgccacatacagatttctccctaatcaaattacccaaaacacccatctgcatctcacgctatttggtcaattggactcaactatttcctcattcgagacacaatcgagagctcgagagctctcagtagttcagcactacataaatttctaacgaatactgcatcagcttagcatgtggtctcttaatgattacaaacactctctgcatatgcgtctactcagtaatctcaaataacagatacatgagaataatattctgtatcacagtttttttttcaataatggaataaaatcctgtatttgcttcaacgaattacatgattcgctcaacagggagcacgtacaatccaggaactaaacgatgcaaagactaatactccaacactaaaggagtaacgagaataatattctgtatcacagatacaaactaatattctgtatcacagatacacactaagcgaatcggaattcgcccaaaaaaggtagagcagagcagattaaccagaggaactagccatcccaaattcccaatcatttgctataaattcgatgagtacggatcatctcgactcgcgcaaaaaaaaaaagagcaaaaccaaaacctgcagaattcatcgcgctgcgcggatttgccgatcgggaggacgcgcgctgccgaacgcggggcaacgcggcggccaggaccaccaccatagcccatccccatccccccccacccctctcgcggggcaaaccgctacgagcgccgccacctgcggagagcgcgccggcctatcgccggagcacggcgaggcatagctccggcgtgcgcggatgcgcggggcaactgcggcgtggccgtgctaggccggagtcgccggaaatgccaccggcgcttcgccgtccgtcggcccggcgaaacggcctatgctcgagatcttattgggccgggccgagacaagactaaataaagcgggccaaatgtagatcgactatatgggccaaattgggattatatgggccgtagatgaagaaaggccagcccaaattacattttctcccccttccaaatcagcctatctcttctctatctctactattataaaaattgaagatgtttttgccgatattttggtacgtcatccgtgtataagtcgttttttaagtttgtttgcttttggaaatacatttccacatttgagttagtttttaagatcgttcacttttggtaatacataaggaattacataagaaatctatttaaaaaaacttgagacgatcagactcctaactgcagctcatgattttctaataatatactctctccggttccatattaattgacgttttggacaaaattgaggtcaaacttttataactttgaccatcaataactttaaaaatattcagtctaaagaaactagaacaacatatacatattttgtcttttaaagtactataataaaagtaaacatgcatttattttattatatatattataatagaaaagtaagatcaaagatgtatcttgtagaccgtgtcattgtccaaaacgtcaattaaaatagaaccggaggagtatatatccaagcgaactcacacagtgaatttcatcttaactaaactatatagcaataataatattaaaatagactttacccgttgcaactcacatgcattttttctagttaaaaaaaactggaaaagctgtcgaattacctctgcgatttttctctcttccacaaaagcaatctggatttcagcatggcacacgataaactccactgcaccagcacctagaacagaaacacaaaaaaaatatattaaaaaatagaagaaaaggaagagctaatcttaattcttgagctctttttactacccttgaggtagatgtactttgaagtgttaatttatggttatcggtatcttgaactcttcaagaatggttaaaagaattctcatcaattatagaattgcacatgcgtttatgtgcttaccaagactatcatagagaggcacgcatgaaaccccaagtgcattgcaagcctgaaaatggtcagatcagagtaacagattaaggttaatggttaaaactgttcatgcaacttaatggttaaaactggtcatgtgcatgagtgatgagtaatttatggttgaagtaaacctccatgctgatgatccattcagggcagtttgcgccgtagatgccacagctttcaccctgaaatttggtaatttattcagtttgataacatttgaattgtaaaatctaaaatgattgaactagtcaactgttcccatccaataacatagtactactcatcagcaaatgagaggattcttcagtcaattacttttcaaacaaactgaatgttttctgaattgtggaatatgatatccaaagagattgaactgaaagatgccaggttatactagtacatgacaatggagctatccaaattctagaacatgatcaattcaactctcctggaggtaatgaattgttcagacttcagactttttaaccttggaagattcaaacagtggacttttgctcacaacctgccaaagttatggttgtgagtgcctctgtcatcatcctgatgacaacaagagtggaactcttcatctctggtggtaaatcttgtttcagcaatgtcaagttactgtgttttaagattaaattaattaagttatgcttataacgaatcaaaataaataagcctttcctgatgcttaatggttaatttactaccaagtcaactcacatatctgaaataatccaatcttgtttgattgatgcacaacctgcgcagtttattttaaaaactatcaagattttgtaagatccaaaattcatggtaagcatgcatatgcatccacaatctcatgaattgctcacattatattaaatttggcagctggctcaggtttgcagctaaccaactgctggtgatcaagacgtgcacaaatggccattgatgatgatctaaatatatatatccaatgaacctgagccataaactattgccaattattcatttactactatgtatctttggaatcaagatctgcttaacaaatatttccattcagttaaatgttactgaatgcattacgttttttttttataaaaaaaacaaagttactgccggcaaaagttttaaggaggtaatcttcatctgggaagttgattaccttgctgattcctgacttgctaatggaggcagcaagtttcatcacaacgtcataaacctccttgtaagtcatccaaacatattcacctgcctgcaaatgaactatacagattagagaactaattaaaccgaaaaaaaaaataagttttactccacatgtgtatccgaaataataaagtggtgcttggaatgatcaaagtagcaatacattttgtagaagtagaaggcagaagagagaattatagctacaagctagagcagaaaccaatgtgaaataatgaaagattattcttgttcaaacgaagggaaaagaaatattgaattaatcaccttgccgtcgtcgacgactctccggcgaccgagcatcgggctgtccgggtacttctccaccgaattgctgcaaaattatccgaagacgattcaagaaaccgatcgaatcaggctatgaatgacaaaaacaaatggagctgcatgtctccggccatccgccggcgatcgccggagctgagaaatgaagaccgcgcgatcacctaccggaagacgtcccagcagctctcgacccccggcggcggccgcagaagcccggcgtccttggccagcacgttccggtacgtcggcccggcattctccgccgccttctccgactccaccaagtgcttcatcatctccggcgacggcggcgacgacacgacgacgagagaggaagaaagagagaggagctttcaagattgatgccttgcaagctgggagagattggtaaagatatatagggaaaatgtctttggttgactgagaccatgcaagcacatgaccaaaagatttttcttttcaacttctcattccacccatggatttcttttttttcaggagggtggattttgaagtccaaattaactttgcaaattcttttcaaaaccaagcaaaattagctttgtaactttggaataacaacagtcaggtttatgcatatgttgggtagagaatcatattccaattctctatatgtctgaacatggttttatactagtaattattaccagtatgctgtaagaatggaagagagatcgattactccctcccttttctttatgtttgatgacatttaaacatgttttaccattcgtcttaatcaaaatacgtatgcaaatgtgtaaaaatataagtcatatagataatatttttataagatgaatagtcaaacttatatctaaaattcaacggtatcaaatatttttaaaaaataagtacttgtcaaaattttcttgggcagtgccaaattaaggtacaccttacaaaagtaaacattgagtattggacatatatccaacaaacaaagttaatccgtagagttctctatcggagcaagtaccaatcttaatcagagcaatcacctgctcaattaattattatcaacaggtgagcacaaagtactactactgctgcttatcactatagttccccagtaatctgggaaaaataacgttcattaaataataattttgactaactgttcctaacgacaaattttatccatggaacaggtcagacagaagcagaaaattgacctgtacaacattggctgctgtatatcttgatgaatttgggccgaaggaagttcagaattacgcaaccataatgctggaagaccatttctgtacgtaaactgtacggactacggaaccatatatttaggacctgttcactttgataaaaaaaaaccttactaaatttttggcattaccaaaattttggcatagttgcctgatatgatttcttatatagttaccaaaatttggcagcaaactaaatgtagccacttttttttttaactttaccaaaatttagtaaggttgaaaatggcatcaaagtgaacagacccttatttcataatgaagtttgatttctgcggtttcttgcaactttgcaagaaaaaaatagtttgaagaaaaatgattagaaaaggacgcaacttgatgaggtctaagtaatcatttgggccaggtttaatcggcacgtgaggcccagatagcatctgggcttaatgggccgaacttgttaggcccagtgaaggtttgtgcaagtgtaatgtcaatttccaggtgacgcgtgtattgggttaggacaaaccaagctcaaaactgcatcattaatgcttgagaattcacgaaagcaaagctgcactagccaaagccgaaagagactgatgaactgaagattgagaatgtattgcttataatattcttaagatgaaacacaaacaatggtgaaacttaagaacaatgtaaagcttgaaggttgcaatggttttcaaattgtaactcctccatgtgttgatgctttgttcattcttcaacgaaccctgcaaaagaatttgaaaacaaaatcagctcatatgaagaaaaaagaattctaaaatgtttttattttttgaagcgtaatggggagttcttgtaatttacctgaagcagttgaagtttgggctggtcgggatgaagccgactcggacgttgcaggcggcggggaggccggcggcgcggccggagtcgaccctgccgtcgccagcggcgagcatctccgacaggatgcacgcgcacacggcccggcgctccgcggcggtggcggcgaggtccctgatgtcgccgagggcacggcagcagcggcgcgacaccgcgggctcccctccggcgacgtacgccgtgcactcgccgaacgccgtctccgcgaggccgcacaggtccgacgtccccgccgccgcgagcccggcgccgccggcgacgacgaggagcgccacggcgaccgccgccgccgtcgacgtcatggaaatggacattgttgggtgagagcagtgcacgctggtcgagacgaatttggatcaaatgcgacttatttatagggagaaatgggaaattgaagatggaatcatctgcgttgatacgcaacgcgtgcatggatgttatcatgttagcatcaatcatctgacaggtcagggttatttacccgaaagttttttgatattttgtccagggatttcaattgtttgcattgcatggtgcatgcatgctactgcatttttggaaaaaaaaatgcaagtaaagatcttgtggtcaatggaaagcaatgattttgaggcaatcctgtagggatttgcagcagacagggatatgctactgcactgctcctctggtgacagatgacactagatagtagacaggcttcttcatgggctgtagctgtgaaatcagaatcatgacatcgacgcgaagttattcgaatagtttcctttttgaattattcaaatttgagcgatcaaaattcgttggagcccccttggtaaacgtaccggcgaacgaatgatttgcatctcagttactctccgacgttatcttccgcttcggttcgatgtcagcgaccaccgacggccatgtgaacgaaactcaattggcataaatatttgatgccttgagaaatacaaggattacgtacaactcgcaagccgttgcagaaacaatggttacacacttcctcaccaacaatagatggaagtttcaaatagtgttttctctgtttttaggtggtgttctaagtagttttcatgtgttttgtcaaagttgtgattttgtaagttgaagaccagcaattggatttaatttcttgaagcaaagtccggaatggattctattatctaaaagtatcagcacaaagacaaagggggaaccggggtgctcagatcagttctcaagaggaaaacgtgatgaactgatgatcatggtgaacaatatcaagtgcatattctgatggttcaaggttactgatctactgcagtttcagattggaaccatcctgggagcatggctgcatcaggctaaaatgcagagggtactgcagctgcactttcagggaatgttgaaaaccgaaatgcaagctgaacaatcaagaacagcaagcgaaactttttcggcgtccccttgatggattagaatctgacttcagaacagcaaatgatttttccacataccttgttgaatcgacaagcttgcaacttgcaatttttctgtgtcgacctagcaacagcaacaaggtatgtggtgctactggaattctggaaaacatagaagatgaaacagtagctgaccaagatacagattacagacaacttcagcatggaggaactcttgggataaattataatttataagtgctcacaggtttgcactgaatttacagaacaagcaattcctcatcacagagctcaagcaattcatcaattcatcaaacgacataagaaaatttgagattaccatggtaagattcatgagcattagtgctctgaaactctgaaacattcagaaattcagaatcatggcctgcataacaacttcaatttattcataattcaagaagaaaggggagcacagattgcgatagataaaactacaccatatcttctacatgtcttgacagatcacgccatgccggtgtgaagggagcttccatcgtcgcggcgtgagctggtcagaagtcggagcagcggccgccgcgctcccagtcgccgtaccgcgtcggctcgggcccgcgcgggccgccgatctcgccggtgtccttgttcacgtactcaccgccgccgccgccgccgtcttccccttccttcctcgcgtcaccagcgtcgcctcccttcttcttctcctcctcctcctctcccgccgccgctcccttcccggccccgcccgcagcagcctcccccttcttcgccgccgccgccgcctgatccggggatgcggaggtggacaagaacgcgaggcgggagaggaagggggcagggtgggcccggcggtgggaaagcgcgggcgcgaaggcgcggcggaggtggctcgtcgccgccatggcctggctcctcgccgaggtcgccggtgctttcgctgctcgcttctcttctccggccctcgcgccgccgcgtgtgcgagctcaagccgccgcctccgcctcagcgtggaggactggaggtcacctacccgtaactgggccgggccgatcggatggcccaccgccacagcccaaatcggcccaataatccaccactccatagcccaactcgggcctattaatccaccactatccggcccatgacgtgacgggccggcccaatatttgtgtataattatgcgggccgaggcaaaaccgtggcggcgagagggatattcttgtcagtacaacgcaggggtgggggcggacctacatttgtagatggggctgctcaagaacctggttcagagatactatatttttttaagctatattttatctatttttatcatatatatatatatatgtattttgttagtataaatttagacacccgtatcaaattaaactcgatttaaagaagagtaaaacaagtgagggaaaccacattctactttgttttagctccgtcccccgtacaatgtatacatagttagctattccctccatcccaaaatgcccacttttgctaggtctacatttaaacttagagcctaatcttgtggtttatgcttatgtttataagccaaaatttgaattttcaactttaaatttggagttgattttggggtttttccatcgtcatttatttttcagccttttgcttttagattgttaagaacacgtatataaaagttttatttataaattattttctgcttacaaatattccgtttctcttgttctatcgataagcgaaacgatggagtccttagaattgaccttttttggaatgtacggtgtagggtctagcatggatcgtagtagatacaatatttctttctcggtgttgtttttctcgtgcttcggcaacagcactcgatcacatcgatcgatcgatctcaaaaggataacaaaagcaatgagatcgatcgatgatctgattctgccataatggcctagcagctagggctaatggcgccggttcttcgttttgtctctagctagactaaatcatcataatcagtagtgttttggtgttcatattgtgttagatatgtatggcgatgacctcatgacgatcgacctgcgtacaatcgaacgattgatggaccttcaattcagccgtttgtctgattctgatgcccctagctacctagctagttactaattaaagtgatgattacatattgatctaaaaattactactccctctattctatatctattctatattataagtttgtttcgacttttttctagttaaatattaataagtttgactaatttgatcgaaaaaattagcaacatccatcacatcaaattaattttattagatataacattgaatatatttttataatatttttgttttgtgtgaaaaatgctactacatttttctataaatttgatcaaaattttaaaaaatttaactagaaaaaaaaatcaaaacgtagtttcgtatttatgacataattaatagatcaacctcagccatgcttaattaactaaataaggttgaggccatctattaattagttgcagtggtcacacattgcgatcagttaccactacacatttgcattgattatcaggtacaaagtactacctccgtttcatattacaaatccgtttcatattataaagaaaaatttagcaacacctaaactgtcaaactagttttattaagtatatcattgaatatattttaataatatatttattttgtgttaaaattattattatatttttctataaacttggtcaaacttaaaaatatttaactaagaaaaaagtcaaacgacttataatatgaaaagaagaatgacttttttaagtcaaactttgtcaagtttgacaacatctaaaatataaaattatttttattaatctaatattgaatatagtttgataatatgtttgttttatgttgaaaatattactatatttttttataaatttagttaaacttaaagaagtttgagcagtaattgctcaaagatgccaattgtagctatactacctccattgtcaaaaagatgaggcgtagaacacgtgtagtcaaataaaaaaaatctgaaaatattaagtaattaatatataaatgcaaaagtatcaggatttatttaaaatgtgaaaattatgagtagacactttcttatgaaaaactctttcttgcatatagactatagatctatagtattttaaatatttttgtaaaatatattgttttgaaatataatgataaaacatgtgtgtattgacgactactatcgatgtatacaatgtcagaataaaaaataacagagacaattatatccctgcaacagcattggctgaatgcctgaatcttcgacgattgggagagaaaaggagctagtatagctgcatcgatcacccactaccaatcgtgacgatctcgatcgatgcttttgaacatataactcaccaatggatgctcgatcgatcataggagagtggattttaaagttacagatctagatatatatgcttctttcacatacgaccaatcgtacgcgttttctgacgatgaattcttctacgcatgcatatgatcaatatcgatccgtatcagcttttccaaaacatgggttctgattgatactccctagctgtagtccctttcaccatcatatcatatcatcagcacgtagtacctgtccttaaactgggcatattcagtggggggcgagatagacagtgagatggaagcctgaaagagacactatatatgcccagctgatagattcacatgtgatacacatttgatattaagcacatctctacttatatttcatagcaatttcttgctacatccaacatgtgcagatcgatgtgctagtataagtactgctacacatatatgtttacattctgctgtatagcttgatctaggagtagctagcagccgctgcatataaatacaaaaatgcatgcatatacagtgtgtgtccttgngtgcgagagcgcgcgtgcgtctcacatatacataaagcatggtttagtgagtgagctcgttagatccagtgttatatacatacagattaatgcacacttctctatatatatatatatatatatatatatatatatatatatatatatatatatatatatatatatatatatatatatatatatatatatatagagcaaagctagcttcatgagagaccttagccttgctcagctattaattgcataattaattacaccatcatatatatgttgtgtgtcgagaatcatttcaattgtctgaacctgcaatgta

SEQ ID NO: 7225 - DNA, 30212 bp, Oryza sativa
gatcaaactatagttttgttctgttcgtcctcaacgtggagtagtggcgcttgtgcttccacgtcgccaccaaccatggcgatggccacctacctcgcaccatgacgtcatccaacctcctcctcctccgcttaaacgcgtagcctccattgctctcctcctcctccccaccatggagtcgtcgccgccgccgccgccgcagatgcgtgtgcgcgtcatggagaccgtgcacctgcgtccgcctccggcggatgacgcggcgtcgttcgcgctgtccgggctggacacggaccgcaacgtgctcgacgtgacgttccgcacgctgcgcttcttcccgccgccgtcgctcgagctcgacccgctcgccgtcctcccgcgcgcgttcgccgccgccctgggcatgttcgtcccgctcgccgggaggattggggacggagggcgcgtcgtctggtcggccgccgacgccgtgccccttgttctcgccgcggcggacgacgtgtcggtggccgacgtcgacaccgacagcccgggctccgatttgctggagcggctcgtgccgggggacggcgacggcgacggcgtggcggggtcaccggcgctcgcgctccaggttacgcggttcgcctgcggcggcgtcgcgctggggatgcgggtggcgcacgcgctctgcgacggcgccggcgccaccaagttcctctccgccgcggcgcggttcgcgcgcggggcgcaggagccggcggcggtggcgccggtgtgggagcgggaggaccgtctcggcccgaggcgtccgccgcgcgtggtgaagccgttcgaacgcgtcctctcgctcgacgacgccgccgccgcggtgcacggaccgtacggcgcggccggcgacgcacaaggacagatcgcgagggagtgcttccacgtgagcgacgcgcgcgtggaggagctcagggcgcagctcgccggcgaggccggcatcaagctcacaacgttcgagttcctcgccgcgttcatctggcgcgccaggttacactgatcccgtcgaacacctgggacaacaaggtgattttatctcctctcgtttaactccgccatggaatcggtgatcgagcaggacgaaagccagaaggacgagccccgacgaggtcgtgaagatggtgtactccatgaacatcagcaagctcctcacgccgcctctcccggacggctactggggcaacgtgtgcgtcccagtgtacgtcgccctcaccgccggcgagctcgtcgcccagccgctcgcggacacagccgccatggtcaagaagagcaagcaggaggtggacgacgagtacgtccgatcctacatcgacttccacgagctccaccgcggcggcggcgtcacggcggggcgcggcgtgagcgcgttcaccgactggcgccgcctcggccactcggaggtggacttcgggtggggctcgccggcggccgtgctgccgctctcgtggaggctgctcgggagcacggagccgtgcttcttcgtgccgtacggcgcagccgacgagaggcggcggcgcgggttcaaggtgttcgtcgcggtgccggcgatggcgacgcactgcttcagagaggagatgcaggagctatcgttgcaacgccattgcctgcgttcgaaagagaagctgtaaatttcacacgaaaacagtccgttcaaattcaaaatggatagtactcattcaaataaagatcttcatacacatttccgaaccgcaatgggagtgaatcctgtttggatgggccaaaaaataaaatggtcgatcaagaaatttgaaatttccaactccgaatccgataagaaatcaaacacccctgtgtactgttggcgcatatataccggcacggctcttctcgatcacctcaacccagttgagagatcacctcgagatcatcgagcgagcctgatcgattcgagatcaagatcatgacgcgcggtggcagaggaggttagttattgccttcaatttcagtttcgctacatgttcctcaccttcccttgatctcttgacagtatcatgatcttggggactaatttggtttttttctcttttttttctgttcgatagaggatgacaatgaggtggattcatgggtgaagaaagaatctgaatgggaggaagcaggagatggagaggaagacgattattcagacgaaaccgaatatgatgatgatgatgatgaatcttcagatgaagacaacgattacttctcaatggaaaatcgggatgtccgcttcgcttcggaggagaagtgggagagccaaatcatggaacagatgaaattctctgtctccactgctgatccatttgatatcaggacgatttggaaggggtctctgcacgtcgacgggccgtgccaatctctcgatccaaacctcttatctatgaacaatttcagtaagttcatcgtttcacataccaatctttttcaagaaaagaaaaaaatatttaactttatatgttcttgaactttaccatatttactggttatttctgctgcagtgcctcagttaccactgagaatgaagaagaagaataatgaggagccttgccgtcgagccatccaggtgtttggtctgactgtatcttctcctgacaatgttgttcaggagatctatggtatgtttgcattcagagatatacgaaacagccaagaacgcaatttcatctttgaatacccaagagacagaccatttacacttaagccggtgagcactttatcaactcttctttttttatgcaatcgttttaattagtttattccttaagcattcaagtttttatctcacaggtgtaactctatatcatacatatatatgcagggttctgataaggtgcaacccctgattcagcctcctcgcggcatttacgcaatagggccagtggtaatggagtatcacctaatgatcaaaggtcaagaagaacaagaagatagagtattggtagatggttactccatctactgtccatctttctacaaagaacgttcaaggttccactggcacattgacactggccactgtggtgccattgatctgaagatggctgctgtaccaaacgccgtgctggccacagtggagatcgaggtgattcgtctcggaggaactcactacgattcgcttgccattgttgtcgcattatcgataatcaagggtatgtatttggttttcgatggcaaggttagcgtaggcaagctactgcctttcacggtgtgcatcaacagagagatgcatctgaagctgttcgtgtacggctactccagtagtcagattggacatggcgattgctctccagatggtgttgttagtgattacgacaatgatgggttcttctccgcaagcgaggatgtttattacgacgttttgaatttcataccacagtttggaacctataagaaaatgtcacacaatcttgaagatatggacgtgtctgtgacggtaacctggtctagcttgtattagtacagataaagtgaggattatattttatgttcttgtcataaacaattactgtaaatatgtggaagaacaatgtcagggaagaatggcggagtcgttaacactcatctttttatttgatatatggacctgcagccgcggctgcaaagacatgaagggatggcagcatacttatgtttataactgaatagattaatagatccaaagaaaagtttaatcaaaataataataataataataagccaacatggccaatatgaggctaactacccaggtaaagctcacctaattttaccattcgttgtgaagtcattaacaaaagaaggaacttttaactgttgttccaacaaaacccttcccttcaattcaaacatataggcaggcacatcacaagtcatattacaacagcacaacaatgaatcctagtcctaatcaaagccactctcatcagatgtgtgcaacctctcaaccaaatacattctacattggtcacttgtttgttccatgtcactgtaaaaaacaaaaagaagagagaaacaaagagtggggagaaaaaacaaaagtgaacttcacaagatgtatcatacaatgagcggtaaccatttcgcggcgaattttacacactgagcgaaggaacctctagttgttgttgcttcttctgttggccccctttcatgtccttgggctttgcctttggaggaccagctgcctttgccttctgcacccttgctaccggtttcttttgatcaggaggagatggtgttacggttttcttatgatcaggaggagacagtgctaccggtttcttctgatcaggaggagatgctgctaccggtttcttctgatcagggggagatggtgatgacttcttcttaggggcttttcgatcattgatgttgttgcttagactgattgagccttgcagcttcagagctgatgggtttgtgctggcattttccttctttgcctgtcctttcttcaggttttcggggtggaccagtgatcggggctcccatggccgtgccgctatccatcggtccatccagctccaaccccagccacccttgccaacttcatagttgaagtttccaagacttgtggcagaccttgctctccactgaaaatgtgcagaatgaatatgccgattactatgttgagtttatacatagagaaatgagcatagtgctagtctgaattaactagtaagtagcatggaaagaaactattcctaaggggaaaagacatgatgaaaattagcttaggagtctctgtcatatataagatcaaaatcatagatataatgtgctgcaatacgtaggattcttttaaaggaatgaacaatgaatgaagttgtaacacctgaatcaattgttagtacctgatgattgaatgcatatgccatagctcgttcacgctttactgcggcttcttccctttgttggatcctcccaagtatttcctccatagtatccgagcctccattccactcgacctgttaaaacatgccgatgccaaaaggaaatgcaatgtcaaagaacattagtattcttttactagtaaatttaatattattaatacaaaatatagttgatttgtttaatcagttaaaggattaagggtaggttatgaccaaaaaaatcccaacaataattaggtaggcagaaaaatttacaaggaatggtggtcctttaggagaaattcacctgcaaattttggagttttgcttcaagtttcatttgattttcttgcttcttcttcctattgcgcccttcagtgaccatgaaggcacgccggtttcttatctctgcctgcaacttgttccaagactgtatgtagttcaatgtggcagctgtctgcttgttaactggattggtctgcccaataatgtgcaatcttttaacccccttgagacatctgagagttttctttgcctgcatttgagtgacgaaacggcaagaaatgatgtgccaatttcttagcaaccgaaaactcatgtggtagccaaaatgaaggaaacaattcaaatcaatgttaccttgtagcatctaaaggcattttgaattcgagtagctgcccattcctctagtgctgcattgtcttcagggtcactactagaggaaggaccattattagacttttgatttgttgagtttggcccattgggtacctgaccggcaaccttcaatgccaaagcaaaatagaggaaaatagttggtcaatttgacgtttagttcatctaagtaaatgtacagatgtcctaagccataatgtaatcatttaaatacaaagggcagaagctatgccatttcaataagaggcagtttaaaggtacaagaagtacaatcagattatgtttatgcactgtagccggtaagacaatcccacggaaagaaaaactacactagtactacaagaaagaagctgagagataattaggccagattctgtctgtaaatcgatgtacaaaaaaaaaagctaccaaggagatcaattcaacagtcaaattactttgactgaccagtccatgttcaaaagtgactggttgactgctgaacatataacatggacagagcataacaaagatctctgaatttatgtgactaaattaacaaaatgcttactcaatgagaactttgttttcttttttctgggtgggggtggggatgggggtaacttaacacatcttctgcagtaacatagaagagaacaggcaacagtggcaatgccaaaacatttccaattttcaaaccataaaacataaaaaaaattatcgacacagaattcagcttctcaaagaaccttttatatgtgtaccatgcaaatttacaatgacaaattcagatgtcctgttgtcagtaggtggggacagttaattagcagtagctcaccaatacaccaaagatgcagaaggttgtactactactctaaaaggtatacctaactcacacatactactgttctgcaagtcagcatccaaggtaccccataattgattgctagtatgtacaaatcaagcttttcccatcagccaactttctcttatgatgaccgcaaccaacaaagacaatcaagtagcagcacagagaggctgtcctggcccttcttaatgatgggatggaattgcattgtatggcatccttttcaggttgcttagaaggcatgcaaggctatgtgtacatgaccattcaactttcaggagggacttggaagttgtgaaaaaaaaaatcagctttttttggagtacatagaaggcacatactccacatcacggatacaaatcatctgcggtactgcatgtgtcactgacatgtgggtcccacctgctccgggcccacatgtcagaggcaccaactgcatgtgcattacagccgaggatccccactcaccaacggtacatctctaaccctactaaattcttactaaattctcgcgtgtgcgtaatatttatggacatgaggatttgatttttggaaacagtgacagaaataagggggttaatggatggatggagtggatacctttgcgtgttttgacttgccacgtttagacttcttcttgctgatgatcgtcttgaaccagtccccagaccccatggcttcaatcagagtgagcctcacagattaatccttgtccaacccccttgcttagatcacagaaaaaaatcattaaaaaaacagggttaattttgtttttaagtataagatggtgcaacatgccgaaataaaaaattacacctgatgaaccaagtttattggctcattctgaatctctctgagtgttcattaaccaaatcaaaatttacatggagaaaagaagcaaatcctaatatttctgtcaattgacagaaacatgagaagcaagcatgagaaatgaacccttgtttttgtttctatcctgaagtcttctcgaatcaaatatgaatgattccccaaaacaattcgactaaaatcaaacaacaaaaggcaataaaccggaagccaagaatcagctcaaatcttacagaactgacagggctcaagcttcagacttccttcctataaccttagccaagaaaccaagaacacccagagagtcaaccccatggctcatccatccctctgctcatcatccatggcagatgaacaagtattatcttctccctccaaaacccagagcacaagaacaccagaggagccaagccaagaactctgaagaaacacacagataaacatgatgcagctgagcagtgactaagtacctgagcttcagaaggttgcagtgttggcaatctgaatctgatcagaagttgctctcagaaagagaacgggagacagcagctcaggaaaggaagacatccattggaagcaatggatctctctctctctctctcctcaacctttgagagaagaagaagagagagaaagagagagaggtgggagagaaggtggaaaggtgaagaggctggagttagatataagtccagatcaagtcctttgtctaattgctcccaagttgttttctttaatccttctttgcctccctcctcggccagccactgatgactttaattactggactttttaattacagtgcggttgctaatgatcttgcttagcagtgggagttactgtcccttaatctcgctggcgatcttgttgccattaaaaatggagacaaggagttacttctttgttgacttgtatggagatccacttgctcagagaatccacaatttgcagtgtgcaacattttttatagctcatcttcagcagtcagcacagtgaaatcgtggtagtactgaaatcacacacaaactgtcgagttaataacagaaacaaaattaatcttgccgtctcatttcgttgttttcgagtaacagtaccttttcacatagacttggggtggtcccgggaccacccaaaaaattcctaacccaatgtatatatatatacatatgcaaaagaacttttgaaaaaaaaaagaaaacaaagttcttttattaatatattatgatgtacatttgatcaatttatatttctaactttgttatatttagagtatttaaaatagttatataagttgaaccacctatataaaaatcctagacatgctactgctttttccgagcgattaagagtgtaccatacttaaataagtatcatgagttatactatactttctaacttaaaaattcgtatgctagaaattaggatgaaaaaatttacaaaaaaaaaactttgacaactcttaaagacagtaaaaaaaattattgtttctatactacataaaaaaatccgaaaatcttcttgtctgccccagtaagaaaacggttgcgcgttattgcactaacacgcgacggagcatgaaaacgtatgcgtgtctacggaagcgcaatattaaaattcacgaattacctctcgaacttctcgatattaaaaattaatttaatcttaataaataggcacatataaaatcaaattaaggttaatattccgtataaagaagataaataacacatttcatacaaaatatattcgtatttgttttagataatattacaatatttttttatctctataaaagaacaagtattcagcgagtttcacataaacacaaactgattgtatttctggtctctgccgttaggcacacgccctattgccctagtttactagtagttgatgattaattgtgagcccagacagcacggcgaagtcgagaggaagaagccaaggagggagggagggagagagagagagagagagagagagagagagagagagaggaattagataagacgatcgattgccatggttggtacgttgatggtggtgttctcttcttcgtctgctcgtcgtcttcatcgctcgtcctccctggccaacagcgacatgcgagctaaatcagagaaaggctttctttctcccacctgaatcgatggatgcttcgtcacttcgcgcccaagtacggctccattcccgtcttacgttgcagtactcatctccaaccacccatgtcgcaattaattaccacgcaccgtgattggttcgggtgtgtttagttcacgtcaaaattgaaattttagttgaaattggaacgatgtgacgaaaaagttggaagtttgtgtgtgtaggaaagttttgatgtgatggaaaagttggaagttcgaagaaaaagttggaaactaaactttagcctaattgatttcagatagggtacagaattcagacttttcgtatggttttttttgtacccttttggtttgcttttgaaaaatggtatcatcggttggtttgtggtacagtatagtggttttggttttcttcgctgaaaagtgaaatattgttgcaatgatctgcttatgagaaaggcattagtactcccttctgtcacaaatgcttgtgagttctgatcgtcgagagaattttgactttttaataagcaacataaaagcaaaagacatttccaaatatagggaaagtttatttgtccctcgagggaatatcctctcgttttttttcattctagacctctttttagatagcatttataattcagattttatatatatatataattttggtaccttatggtttgcttttgaaaatggcatcggttggtatatgatacagtacagtggttttggttttctttgctgaaagaaagtggaatactgtcggaaacgaccctgcttatgacaatgatattcatacactgttttgttgtgaatacttgtcaatttaatttgacggtcaagattggtaaaattataaccgtcatctttttagagatgtaaaagcaaaaggaagttccaaatgtaggatgttagtaaggtacttcaaatgacaaaaaaactaatgattcaacttttaaaactgaaaccatatgctaagaagtgctaattataactatactaccaactcttgtctgccaaaggaataggtcgtgttagatcgaagccatgcaagcataattccaattccaaatccagaaaagatagacgagatatatatctcgatgctagctacagcgacattaataattaatcaagcaagctagtggcgtcatgaatgatactcactccgtcccataatataaaggattttgagttttttcttgcactgtttgaccactcgtcttattttaaaaattttagaattattatttatttttttatgacttactttattatccaaagtactttaagcacaattttttgttttttatatttgcacaatttttttaataagatgagtggtaaaaaacgaaaaaaatctcaaaatcccttatattataggacggagagagtaatatctaattcctagttgattagtcctaaataggatgcatgagatgaatgatttgccgttgttatcttactgtcatggagacaggccgtcagtttcggcgtgtccttgtacaatcatggtggtgatttgagtgctgggtttcagagcagatgtgtgtagtgcaatgcaaggcaaaatgcgacactgcctgctaattgatgcgtgcacacgtgcgattcgtattattgtccttctaccctcaagaaaatttgtacgtatatgtgcacacgtgtttgagctttcagtatttttttaatataaaaggaagttcagaaaaatcaatcaaaattttgcaatacaaccaaaattccaaatttaggaaatgtacttcttttttttatatataaaagggcctcattccgttgataaagaagagaagaaatgtactttaagcatcggtgaatttgaattgaagcttggaattggaaatgccatgttgcccaaccacatgtctaattcagtatttcagttatcactatctaactacgatgattagaatgtataatatttaagtacaataacaataagatgtcgaataaatgctgagatttcgatgattggattggtataaccgactgcggtttgtcttactggcgcctaaattaattgattaaaattttaaatgcaacaatggatgcattagttcgtcagctggaaaattttttttggagattaattaggacgtagctgttgcctgccaccaatcatggcgacaacacagccgctacgaaaggaacggagattacatactcgaaagagattctttatcgtcagaaaaaactgatgaccacagcagcagtgacaggccagcacgaagcaggagtagtagtatatgaattataatttaagaaatacacattatatttgtatatggtttttattattatacatgcgcatttcggatcatatgcgtatcaatgacaaacatgatgaggcaatatgaaatgctggactgcctgccctggatagagtcatgcagatacttgtcggcagcattacgcgttgcttcctgcagttgcatcatttttattttcttttgagtacttttaaggtgttctattattctactgccagtattatcatccataaaaaaaattttatcaattgatttataagttctacaactagtagtaaaaaatatttcttatactaccaacagttaagttagtagtataaatagaaatgatacattggactagaaaaggtgattataaaatatctaccacctctgtttaaaacatagcaacttttagctataaatttcaataaagatatgtttatattcgtagcttaaggttattatattttagaccagaggtagtattttattttattttcttttttgcatcatacaattttgctagttttttttattctacatcacccttccttttttattatagtttttttgagatggacagatacggtaaagagtactttggatgattgttaaactgttttggagccacagatgctgtgtttgtttgggctaaaaagttcaagaactttgttgggctagatttagtattcctccgttttgtctggtccggcctgccattctacagtactttagctggctgggccaacatagcttgatctgatttgcctcagattaattctgcatcatccacacaattgcagtttggatacacacaataattacatttaattgtaggatccgatattggatttaagtttataaactgttcccacacttaactgccagcaagaaaccataataatttcaacaattaataccctatgtagataatagatactccctacattacataatacaaggcccaactattttttttcagatttttcatatataatataaggcatttatgcatacatgcaattaattagcacctcttctccactagtccaccttcgagatcccgaattctattagctgcatgtgttatatttactagttggcatttcgcgccttgtcgctgattctgtagttatattgttaaacaaaatcgaagtttaaatggttaagggcaactctatgtatgtacaaaatgtggctttatatataccttatgttacaatacaattcatgctttatgtccccacgaaaaaaatcatgctttattttttaaaccgtcattgtatattgttataatatattttcatgcgcaatatggatcgttgtagctagatagtttgcatctctctactatacctaagtttgctctaaaaatgggttaagtaacgctacataatacttacatgctatctaatcatacgtaatgaaacaaaactaacatcttaaacaataatttaagttgtatttggaaaaaagttagcattattttttaggacttggaagagagaaaacattgtgttgtgagcaaaataggaaggtgaatatacgactaataataaatgatgaattagatggataagtagcttccccgtgatgactataaaaaatcctcgagtgttgcaacaagtgaaactattttaatcttgttattgttatatggtttagttaatgtgaaattcaatgtgagaattagcttggatatgtattttctagaaaataatgagctccaagtaggagtccgatcatcttaaattagcatgcgagttttcttaaagggatttcttatacgattctttttatgtttccaaaaagaacaaacttaaaacctgacacaaatgcggatctgtatttttaaaagcgaacgaacttaaaaacgactcgtacacggatgacgtaccaaaagtaccgacaaaaacatcttcaattttttttaatgatatggcttcttgtatatcttactttataggagtaaatgctctttaataggtaccaattatataagaagataggattagggtgatcctaactaggaggcaataataattattattattattttggattaaaggtgtctgtgtattttggaacctgctagaattactggataatatatatataaaacccaggctgttgcatcagacaaattctacctctgcattacagcaaatcaaactctgctgcattaacctcctccttttccttttccttttccttttccttttttgcgtcttccttccaatctcgaccgtccgtttctcgatcgcacggtcgatccgtggccaaaatccctaggcgtaacgctcgtgcatctgcagctgtctccgttccaccgtgcacgtcgcgctctctcgctcccgacgcgacaacatgctcgcctccgccgccgagttcacggacaacccggcggcgacagccacggtggcggcgcgacacggcgtcgacggcggcggcagcagggtggtcgtgccgctgttcctggtcaccgtgtccctgttcttcgtcacgtaccagctcttcggcgtggccgcggcggccggcgccatggtgctcgacgtctgcgccgtcgccctcgccgcgctcaatgtcacggtcacccgcgcgcgccgcttccccttcctgcgcctgtcgctcggcggggaggaaggccatggtggtggtggtggcgccggcggtggtgacgtggcgccggcggcggccgggatggacgcggcggcgatcatggcgctcccggcggccttcgggtacaagcgggagcagacggcggcggcggcggggggatgggcgcagtgctcgatatgcctcggcctggcgcgcgtcggcgaggccgtgcggcggctgccgtcgtgcgggcacctgttccacgccggctgcgtcgacgagtggctgcgcgcgcacgcgacgtgcccgctgtgccgcgccgccgtgtgcgccgccgggccggagccggagctgcccgtgtgaccgtcagccgcggtgattgttctcattgttaggtcgatcatgctgtagagaaagtataacagtagagcttttttcttccattttattagtgttggtgaatggtgatgattttatctcaaatcgaggtagccttcctgttcttctatcgtcctcagtgacatctgtaaattccgtccaaattatgtcagtgcagttaaagtactcttaatagctactccccgttttatattataagtcattttaactttagttaaattacttaaactactactacaagtttgttcaagtttgtaaataaatacagtaatatttacaacatcaaattagtttcactaatctataattgaatatatattttaataatatatttgtcttggggtgaaaatattactgttttttttctacaaactcaaaacgattataatatgaagcagatggagtaataatgcccttgcttaggaaggagtgaagcatcatggcccctgcatccaaaaaagattagattttacaacatactccctcctttgttcagattcattatcttagaatagatcacatctctatcctaggtgattcatttggacatagggagtaacttgcaacctaaaatactccatctttcctacaatatcataacctaaaactggatgagacatatccaaatacaacaaatctaaatagggttttgtccagattcattgtataaatatacattcaatttaagattgttatagtttgggacgaaaggagtattacttttgccactaagaaaaaaaataatttatcctgcatgtaacaaagatcaaacaatgtatgtttaccaggctcatcaggttctgattaataattcaatttatctttccatttactccctctatatttttttgtttgacgttggttagctcaaaattgaactaaccaacgtcatatatttgtgcaaggaggtagtaagtcttaaatacgtaaaaattacaatatatgactaacatatttggagaaaccaaaatatgaaataagtctaatatttttggaaggagggagtagattctagtgtccacgaatatggcttggttcttgcgtccaagccggctttaagtttacagcccgcttctcctctctctcctctcttctctcctacacttcagcatttagtcagcttatagcctactattatacttgctctaaggctatgttaccttcaaacttccaacttttctgtcatatcaaatgtttggacacatgcatggaacattaaatgtggatgaaaaaaccaattgcatagtttacatgtaaattgcaagacgaatcttttgagcctaattgtgccatgatttgacaatgtagtgctacagtaaatatttgctaatgatggattaattaggcttaatagatttgcctcgcagtttactggcgaaatctgtaatttgttttgttattaatctacgtttaatacttcatataggttcgtatatgttaattttttttttgaaaagtaactaaacacggcctaatactaaccagtagagaccatggtatatttacctgtttccctagtcacagtcaaaacgattgacgcagtaacttacaagttgcccaagacttagaatatgagttcatacctcactatcaagactgcaggacttttagttattccggaatcaatatccacaattcgatctctgacacacacatagtcgcctatgaacactggaaatgaatatagagagaaacatttttgaaagaaataggagggattatgctgagaaaggaacttaattattttttaaaccttttttattttttaattttaaaaataaacccttcaaaatttatttccacaatctaaaccttttggtcacgctaaaactgtcacgcacgttgcaccgttgcggatggtgtgtcagtgatgttttaccatgccaggcgggctggcgtggccaaatgattcagattctagaaataagttttgaaatggttcatttgtaaaattaaaattttaaaaagttcaaaaaaaataaaaaaaatcatgagaaagagcatttctaacctaagcactactctccttctctatcaaaagtacctccccagggcttatctagcgagtctcgcttaatcaattcatagtttcgctcccagcgtagcgtgtgttcgctgcagcctgttaccggcgttagctatccattagcacgtgattaattaagtattaactatttttttaaaaaatggatcaatatgatttttaaagcaactttcgtttaatttttttttcaaaaaacgcgccgtttaacagtttgaaaagtgtacacatagaaaacgagggagatgggttgggaaacttgggggtaagaacacagccagtgtggtttgcccctcctacaaccaatttgtatggttgaccgatattgtatggttattctttgcttaattttttatatggaaatgctttacatcctagcctccgtgtacatagccaaaattttctcttaattggttagcaaaattgctaaaggacactcaaaaaatttgatcattgctaagaatgtgaatttgtccaacgacgcttaaaaaccggggcaattttctagtagacaccatatatattattttatgatttcctgctatttcggagagagaattttcacaaaactatagctttgcccttgggtgattgggtccaaattgctttcgtcgggggagaggtcaggcggtgggtgacaaggcgaggcagtcacatagcaaaggagacagtgggcaagggagagagcgccgacgacagagaggctggaaagctggtgggaaaccaagcgaagccggtgtcgagcagaggaagaagtccccctcgcctactcctccgacagcggcagcttggcgtgactgcaaatgatcgcggaagagggccacgatggtagaggggatgccactcccccatgtgtctgcggttcctagcaatgaagccgatgggttggtgcgggatccgacgacgttggaagaagctgagcgaagggcgccgtgacggtggaagtgaggatgggtcgccggtcgagattgatgcaaatcaagctggaatcgaggttgatcgacggcttgggaaggagctcgagggcgacaacagtgagagcgtctggcacgaaggaagcaaagatggcgaggacgaggaccgccacgacagctaggtggagaagcaggatgggagcccgatggcaccggctacgtcggccatgtcgaagcagatcaggtgggtggaggtgactaaaacctcttgagagaaagaatatgagggtaaaatgaatattttatatggtttctctctcctcaactaagtgaatgttgtattttaatactcatgtgttttgcagtaaattatcatactttctgagtactcgaacaaattcacgtttttacaatatcccctagaaaaaccacattctttgatttttcctgtagcaattatattatttttaaaagatattgcagcaaattaaagagcatatagatcctatccttgacataaaaaggagaacttcttttgaaaagatattgcataaatgaatccataaattagtcaataatgttgacagcatgagtcggcataacaaaatttgttggctcaattaatggatctcgattaatctgtcacatataaaatgtagggtccattgaatagcaaagtaaagatgattgccgtgtccttgttatatgtgtatattctcctatggtactatgctgtcgttgaaactttgattcagctcgcggtacataaacgggggaaaatacgtagtgcaaacacatatccagtgaaaatctagacatctgagattcattcacgtcaccatgaataaaaaattttactcgtaaatttactcatgagtaaaagttttagtgggagtaaaatttttactcatattgacgtggacaaatcatagacgtcctttttcgatccaactatagtttcaaattttcattacgtatgtagttttcaccacatattttctctaaaaacaggaatgcactccacccataaagtggactggcatatcgtacttgcgccttcactgtaattattgtggaaagttgttttcatgaaggtgatgtggcaaaaccacaagttgtatgagtatatagggtgtgtttagttcacaccaaaattagaagtttggttgaaattgaaacaatgtgatggaaaagttgaaagtttatgtatgtaggaaagttttgatatgatgaaaaagttaaaagtttgaaaaaaactttggatctaaactcggacatagctgaggtttttcctagcaagtgacagggttgaaatatccatcttctacatatgtgttctcatggttgtgtgtgtcagtttgggaaagtccttttccactggaagggatttccaagtaattatgcaattttttaaataaacaaaatatattaatatatgatatattactacataaatatataaatccagtttatgcaagttgatgggaaaaaacaaatatggccatcaatagtacacgtacttgttagattttaatttgtttttataacttctattcattaaatttggtcttatatgtatgtgagtgatataacttatatttatctgtgttattatctttttaagaaaaaatttaactattttaatgatatggaagaagcgaggggcatcttagcatctactcgagggaaaaaaacatgtcctgttcggtctagtttctgaagaaagaatccacaagtctttgtgctaaattcaaaaatgaaatcatggatttcggctgatctctctgactccctgtctcatctgaacttgctctatacggcagcgcgacgtgtgggtaaattagcaattgacaatgggcagcatgccactgttaattaaatcgtccaaatcaaagataagtgactgtgagtacgtgaccggctgtgattctctgttagtgttgacgaactgataggtcacggcaaataaagtgcaccgtctggaccttgaagacccagacagtgtcacggcaaaatgccccatcctaagggggtgtttgggtgtgagggaactttagggccagtttgttttgtgacctaaattagtcttataaatttttggcaatgccaaattttggtaagttttgacatgacaaattttgaaaaggcaaagttgtgcttggattgaagccaaaatagtctaagttaactattgaaatggcctattttcttaggcatgctaaaatttagcttcaaaccaaatagacactaaacactattaaaattatcaaatattggtaagccaaatttaggcctcaaatcaaaccagcccttagtcccaaacaccccctaaatattcgatatacactctccatccaaaaaaaataaacactcccaaaaagaatatatttggaacgaacttctagttttaatcatgagaaccctatgcaaagtaatactagtacctactccctccgtttcacaatgtaagtcattctagcatttatattgatgacatcaatatgaatgctagaatgacttacattgtgaaacagagaaagtaaaaaatagtaaacagaactccgtgatctcattattctagattctatcaaagtaaaattaaaatcacgcaaacataagtacattaggtcccatcgtttcgctttttggggaataagccaaacggcatatttataaatgaaaaataatttataagtaaaacttttatatacgtgtttttagtgatatcaaagcaaaggttgaaaaataaacttcgatgaaaaaaccctaaaattaaaaattcaaattttgaccgataagtataagcataagcaaagaaaggacataggatatattctatctatactactttaaaatataatagcagtgatgagatgaatttatcatcatcatccaactatcatgcagaacccacataaaccgtgagtccctgagataagattttccatattttcgattcccataggccacacagatcccatcatagaaaaatgataatatcttgcaagataataatagcattatctatggctaactgtacctaagaagttacagcaaaaatagcacaattacgcgagatatatatatatatatatatatatatatatatatatatatatgaatgaaagattacgatatatatattagacaacggaatagtttttagggacttaaaaatgcatatataatgagttattgtttttttaaaaaataactgtctattacaccgtacgaatattttgctagtccggacaactctaccctgaattttctgaatatatggatttagcattttcaggtgccggtaagtcttctcgctgaagattccattgccaacctgatggtacgaccgcacgcgcaaaatcttagccatttccttgcaaatgggcttggattggaaacctcccaatttccaagcaattcagagcattcaaccaacagctacgcttaaggaaagtaatttgaaatgttttttcatacttttttatgataaaaggaaatggtttgcattcccgccctggcctttggcttaagtaggcagaccgtcaatagatttttctacttatacatacttgtctggcgaaatttaaattttcaactttcaaatttagagttgattttagatttttttcatcaaagtttattttccagtctttgcttttaaatagataagaacacgtaacttttatttacaaaatacttttcatttgtaaatatgccgtttggtttattccactaaatgaaaagacaaagtgatgggatatatctctaggccgtgcaaaaagaaaccatctaaaatgctataaagaccacgtagattatactaagtaattttacatatcttcacataataagagaattttagctattgacttcaaaagtgtagcatcattacacatagcattatactacgtctatgataacactatactttaagtggatatcccttcgtaaccttgttataacatcgaataatcataatctttttcaattcgtttaacgattattcgaatgacatttgaaaaaaaatatatagatgaatgttatgtgttcgctataaatacagcacaagtgtaatgtattttcagacacaagttgtacactgggaagctagcagtgaaccgcgaaccgcggatacaatggctggctacgtcactattattttgttgctgttgctacccgcggcggtgtccggcgcggcgagcggcggcggcggctgcattggcgccatggtcgacgacacgagccgtgcggggaaggaggagaagctcgccatggaaatggccatggaggacttcacggtgagcggcgtggacgtcggctcgccggcggtggcggtggtgctgtgcacgatggcgtccaatggcgacccggtgcgagccgcctcggcggcgctgtcgctgatcaacgagaggggagctcgcgcgctggtggggctccactcgtggcaggaggcggcgttcgtcgcggagatcgggaggcaggcgatggtgcccgtgctgtcgttcgccgcggcggcggcgccgtcgacgtcccggcggtggccgttcctcgtgcgggtggcgcgcggccagcacgcgcagatgcgcgccgtcgccgcggtcgtcgggtcatggcaatggcggcgcgtggccgtgctctacgaggacgccgactacggcggcggcgccggcgtgttcccgcacctcgccgacgcgctccgcgctgtgggctccgaggtcgaccgccgcgtccccgtccccgcgtcgccgtccggcgacgccctgcggcggtcgctcggcgacctcatgggcgggcagtgccgggtgttcgtcgtgcacacctcggcgaaggtcgccgtggcgctgttcgcggaggcgagcaggatggggatgatggcgacggggtatgtctggatcgtcaccgacgccatcgccggcgccatcgactccctcgacgccgccgccgtgtccaccatgcagggagtcatcggcgtgaggaatcatatctccatggacaccaactccaagaacaccagagaccgcctcatcgcgaggttgaggaagaggttccggtcacagtatcccggcgacgacgacgacggcggcggcggcggcggcggcgacaacgacaagacgagagggccgcactacccggctctcctcgcctacgacaccatagtcgccgtcgcgtcggccatgcggaagaccaacgccaccgctccaacccgcgccaccgatccgaatccaagctcgccggactccggcgagacgatcaagatcgccgtgtcgtcgaacgggaccgagctgctcagggaggtcaagagcgtccgcttccgcggggtgagcggcgagttcggcttcgtcgacggcgagttctcgccgccggtgcggttccagctgatcaacgtggcggcgccgagataccacgagctgggattctggtcgccggagcacgggttctccaagagcgcgggaggctgcagccaccgcggcggcgacggcggcggcgagtgcgagccatcgatgaggttcttggggccggtgatctggccggggaagccatgggacgtgccgagggggtgggcgccgccggcgaacggtagccccttcaccgtcgccgtgcccgagaaggccgccttcccggacttcgtgaaggtgacgcgccaccatggccgtggcggcgacgacgacgacgaaccgagcttcgagggcttctccatcgacgtgttcaaggccgccgtcgaacacctgccgtacaacttccactacaagttcgtctccttcaacgggacgtacgactcgctcatgcagcatgactacatgaaggtgatctatccatctagctctcactcctttaaaaagaaaatttccggggccactttatttttgaaaattgagccatgtgtaaaattacagagagaatcccttatataccactccaaattaaccggttcccttatatgccacttcaaattggtttctcccttctatgccaccggttcaagtttgtcatcccttttatgccattgccgtcactccaccgccagttgaccgttaacttcatagtaaaaagacgcatttacccaagagttagtatacaactaataataagtattttagtacaattggatacaacatatgaaaattaattttttttcatcacatgcaattttagccatcatcatcacaaataatttttcaatataagcatgaaacatgcagttttccaacaatatttttaatacaaagagcattttcactggttctaacaaaattttgttcactctaaaatgatttaaaataaattagttatgtttttgtaagtttacacatttttttagttgagagggcatattggtcatttacgaaaaaaactaacatttgactaacagtcaactaacactatagtgttggaagtggcataaaagggtggaaaaacttgaaccagtggcatataagagagaagccaattttgaatggtatataagggaactggccaatttctagtggcatataagggattctctcaaaattcaatcatcgatcctaagacaacctcttcgtaggtatttccttagaagaccctcatgtgaaaataggaatatttttatagacggtggtatttggttatatcagacgtatacttaaaagtcctcacatttcacacttccccctcacttttccttggctcctcctctctctttactcttctccttgaatcgacttatcaagcttttcaaaggtcctaagatcagttgagctacgacggataagtagcagaaaaataaacaaaataatttatggataaaacttttatatatgtgcgtattttagtggttttaaaagccacatatgtaaaatactacattgaaaaaccttttcaaattttaaattcggctgtagctaatcagtaataaccagggttttaaatctcccgctaaactgccgctatctctcgctatagctgtttatctatttgctcttatgtacaatttttagccgctatagctccatttagtccgctatagctgctatttaaaacattggtaataacccaataaaaataaaccattaaaagaagtgttttttttatacagagctatgacatccttgtcggcgacacgagcatctcatcaggaaggtacaaattcgtggagttctcgcagccgtacaccgagtcaggactggtgatggtggtgccatttagcgcggacacgtgggaccgttcgtggatcttcctccggccattctcgccggcgatgtggctcctgatcgccgccgtcaggctgtacaacggcgttgccatctggctcatggagcgcaggcacaacggcgactaccgcggcggcgtctggaagcaggtgaccatcgtgctctggctctccctcgccgccctcctctcgccgggggagaaggagaggcggctgaggagcagcctctccaaggcgtccatggcggtgtggctgctcgtcgccgtcgtgctggcgaccaactacacggcgagcctgagctcgctgatgacggcgcagcggctggggagggaggcggcggtgacggcggagtcgctcaggtacgtagaaaaatctaattgttgtatttttgatgttttctgatttgttacatcgaccctctcaagggtatatgtataggagtacatagagtatatgtaggagtacatagcggatagagggagtacaatacaggtaagattatgagtagatttatctctattactccatcttatctctagaattttatctctaagactctattttatctttagaattttactttatctctatagtttatatttgacttttatctctgaccgacgtatttctacttctaacaaggtccgccgccggcgcggtggtcgggtgcaccgagggctccgtcgtcggcaggtacctcgaggaggtgctcatgttcccggggcaccgcgtccggaggctcgccggcgacgaggagcaccgccgcgcgctcgtctccggcgaggttaaggccgccttcctccgcgtgtcgcacgccaagctcctcctcgccaagtactgcaacgagctgatgaccaccggacccgtctaccacgtcgctggccttggcttcgtaagcatccatcgccacatcgcttaatattgcaaattaattaatgagtagagtgtatggccgatacttaaaacatattcggctgtgtcatttaggttacgtttatatatcttatgcacgaagaaatagatgatatataagcgcatgattatttaaatattaatttagaaaacttgataaatagataaatatatttttaaagtaattttcctatcgatttgttttaaaaaattgtttgccattattagttcgataagagtgcaaaaaaaatgagcgagttagaagctaggaagaggggttgccaaaagcgaaaaatcaaaatgtagatttagcatcttaatcttgtcttgtgttcacagctggttttgtttcaccacgtggagccatcgcaagttagggtttatttggtacagatttagctttagctccacctcttatagaactggagtctagccaaacagttttagtttcatctaaattagaagcgaagaaacgctctcacaaaataaactatatgcctgctcccacaatttcactccaaactcaattactagagctaaattaaaaagttgaacctctaccaaacaagcatctagggtcacccgtgaaaaacattagagcgctaattctgtatttcgagagtacacgaagccaagggacaccaatgaataattaattagttagttaagcttaattacagtggcttaactctggatcaagattcaagagttgattaacctacaaatttatagggtgtgtcgtctcaggtgttccccaaggggtcgccgctgctggccgacatttcgcaggcaatcctcgaggtgttcgagaacggcaccatccagaggctggagacggcgatgctgtcggcgtacaactgcacggcggcggcggcggcggccgccatggacggcggcgctggcgacctgtaccgcctcggcccggagaactactggggcctcttcctcatgaccctcttcgcgtccaccgcctcgctcgccgcctacggcgtcttcttccaccacgacaccagctgcggcagcggcggcggcggcggcggcgccgtcatcaccggcggccacaggaagcaaggtgatggccgtaaggattctgccactgttgacccaggaggaagcagccatggtgatgaagcaccttcatcagcatcagtcacagctgggcatggaggaaaggatacagagatggtagtaataagcatggcatgagagcttttacttcttgcttgcctcaacagaaataatgatgaacaaatttgtctgggattatgtcaatctaggcacaggtatataaacaatgcgtagcgttcaggaggatcacaccagaacaagaagatgaatgttttttttttcttttttgtatttacaccaattctgaaaagtcattaaggcacaatgtatgcagacagaaggtctgcttgacagaatctatctttctgaagaaagaaaaaaaaagatcatgagaaaagggcaaagactgactgcaaatgtgcatttttatcccactatattcacaacatccaggctagattttttttcttatctgttccccctctaatcctatgtttttatgtgacaaaaggaactacaagaacaaacaaacacgacccagctaaagaataaagcactgccaaatgctaccgccaagttagccctggagaactagccttggcccgagcatcagccaacgaaagagccatggccagcatcatctgttcttcgaaactatcaggaatactgccagcaccagtgtcggatccacctgaattggcagctccagcctctgttgtaagatcagagccggtaaagctgctactggcctcggccatctctgaccaccgctcattagaatactccataccctcccttgtttggtgcattttgttgctcgatggttcctcagacctagcgcctgaggaaccactcccgtttatgctcagatcctctgtaaaagatctgtctgacctgctgagaatgtcacatcttgacgtgtggcaagtagcggtgctagaagcttctccatacatctgctgttgctcggctaaagctgcgactgcacaagcaaatgcactactggaagaagctgcttcagctggaattgtcatggaaccttcaaagcttctcggaggatgtactgatgagactgtgttaccacaggttggatttcccgaggcttcctgatcctgtttaaagaaacaaagttcagactgaaacatgtaagcatggtgagtaatcctgcatttactatgaagtttaccaaaattaaattttatttatttcttgaaagaatgcacgctttctactgaaagatatatatcgacaaacacaacaaatgtgtgtgcataattgttacaaaaacgagtgcagggatgcataattgtttgtgcaggttcacgtatcaagcactgaaccaagttcaggtttaattcaagaagcaaacactaaatttgcacaaactcaaaaggatatgataatgaaatatatacaaatgagatgaaacagacatattataccaatgaagatggtaaatgagtaaaagatgtgccccactaaaaagaaataggttatttctttaaaaaataagttaaagatattatttatttctacatgtaagttcagcaacatcatttttatgtacctgcagagaaagccaaagtgcttcaacaagcataacttcgtcaggatccatgtcaaaattattattcctgcgctttaaggaattcatcagtaattattcccagcaaatcagcatttgtggcatatactagcaccataaaaggaacacattaattaaggaaggagaagtggatagcagaatgtcatcaaacaggtgtactgtggaaaagaaattttcagaacaaatactcatttcaatatcaaaatcacccacaaacaaattaacgttctgaactttgcagaggccataagctttcagattatacatgtttgcccgttatacttcttacataatagaatgatttctagataagtcaaaaacaaaaataactatcatttactacacatgctgtggtgctgcaacaaacattagatcaataaaattgaccccccccccccccaaaaaaaaaaaagaagaagaagcaaaagtcagagcaccaaaaccaagatttgaaaggcctgtacttatctagtcgacggattgacaaaacaataaaaaaacatctcaggaaaaagtcttatatttgttttgtcaactctgcacgttatttaatattgtctccaattccaataacggacagaattcgtccctgaactatcaacaccatacaaataatgtccctggctaagtacatcagtggttttgtcctgaatggcatcctattgggctgaatacatgggaaacaagtcacaaaaataagaaagtaattggatatgttagataacagattatccatttaggtttattattttcatccccttcctcgccatttgttttctattaaaaagaaagaggaaaaaaactaatatgtgggtttgcctgatgtggtaaaagacatggcaaaaaaggatggcgcggcactcaaaaccacttggaaaacatgcccaagaacatatttagacgttttgatagttgactgatgagttctggctaatattggagttgagggacgaaaacttaaactatttgaggattggagggaccagatatagacatttcagatcttaaacggtagtcagtcattgagatactgtcatgactttgatctaaattgcactgatgcaacaataagcagctacttttacagaatatcaagcacaactcagtaagcagtacgaaccgcatctgctttaagcgttcagaagtcttcagcagtaactccgcatgctgcacttgagatgagagcatatcactgccttgcccactgcttttgactgtcaacataatagacagggttagagattgcatgacaaaagaataactgagaaacaaagttagcacattccagtgcatatacctgtggtggatgcgccaccagtatcacaatgttctacttgtgcagttgttaccacatcggtcaaagcagcagcctgcttcttcttcatccgctcagcatcgtcctggagctcctgctgccgcatccggatctgcgcctcgatcaccctctgctcctcctatccacaccacaagttccagctccaaccattggcaaaaatacaaaacatagaagacaacactgaacgaaatcatgtcttgcggacactcacaatctgctcagtgcccttttcctccttcgtcttgacaccgcggtactcaaccgcgtaactcgccattttgcagtaagggcaccttacaagtcaaggaataaccaaacaagatgacacataatacatggcacgcacgcaggattcctaacatcagcaatgaataatagcactgaagaacatctaagctaaacaaaacaaaaaaatctacaagaatttgggctaaggatactgcgtcggccggcacgaggtgggcgtcctcatctggagaaaacactctgcaggcagcagaag

SEQ ID NO: 7226 - DNA, 76659 bp, Oryza sativa
agaataatatcatctctctctctctcttagctcggtcagtgtactgcatgccggccgctttctgcatcgtcttcctgtacgtgtggacgaggcgagctcggtggtcacgcatcgatggcgccctagctagagctagctagttactcctatttcgcaaagctttctcttttgagctagctagctatctagctagccggccaagctagcttgcagcagtcgacgtcgtagttggaatttacagatagatgcagcagcagctatagctaagcgtaatctagctacagtacagttagttgctatagtagtttcagtctagatcttgcagctatatagttcctcttgttcttgttgatgatgaagtgaggagagatgggatatgatcgagcatcatgcacgcacccggcagagacgggctctcttttgctgcctccaatctgtaggaattcgatgtcgtctttctaaattagccagtttgacagttgatatagcctcccatcatttgtttttttttcttatcagtcgcaatcaaaatttaaattttaaaactacattttagagattatcttgagatttttaattttattgtaatttattttcagcattgatttttaaatcgctaagaagacacatgtatacaagttttactcatatttgttgctaatttgttggtttttccgcaacttatcaacccgtaaaaaaatgaggttatatgtagtactccctctggttttcagtaagagaatttcttttatactcctaaaagtttagctaatcgctcattttttatatacctctgaattttaattttaacccgttttataccatttccgtaccgttagttaactgtttaatgcctgtaaaaaggtcattttacaattgtacatgcctagaaattttgtggatgctaacgttggaaatatagtaatttattgtgggactataatattataagtttttttctatgaggaagtattgtacttagaaaatttaatatattcatgaaaaagcttgtgcggcttttttataattgaaaaaaaacaattggtcttgtataggatttcttttagataatatatacaataggtggcaaatatgttacatcacaaaaatatgctacacatattgttttaaataaatattatttttcttgcacatctaatttctttttgtaaatagtacatcgcacaacaaactcagaaatataatagtctcgtacacaaacttctaatttttaaagggaaccggtcaactaacggaaaagatgtaaaagagatgaaatcataattaaaaggtatacaactatacaagagagtgagtaaaattcaagggcatagaaaagattgacttaaatttcaagggcatacaagaaattctcttctaataatgtatgactgatctgttgactttgaatatatgcttgatcatctgtcttatttaaaaatatatgtatttttattgtgatttgttttatctttaaaggcactttaaaagtaacatactatttcagatttgattcaaaacgaacacacatccaaaatttaagtgttgtacattaaaaaccggaggggcatatatccggaactatgcatctaagtttattttataacatttattacaccattagatttttttataatattacatgatatgtaatccgaacataaagttgaggtaaggcaattaatgattaaagtcgtatctcgaagacgaattaaaagtactatactacggtgttgcgatttgtttgaatgtctgccaattagctggtgattgattgaaaccgtgtagagaaccaacaggcaggggctgcttgctagctgcctccatgcattctctctgtctgcaattctgcgttgctgtcttaatctgatgcctgcttattatgtaaatgttcttgcttagctcgatttgtccgggcaagataagccgataccatctctagctgtgtcaataaatcaatggcataacaattataatattataattatatacagaaaggaattaattcctttcctttctatgtcggcggctggtgatgtgaaagaagaacaagatctgatcaacttcacacagagagagagaacaaaaattatttgatggggaatgcatgcatttgctgcaagctactccctccgtttttatattataattcgtttgactattttcatagtcaaatttctttaagtttgaacaagtttatagaaaaatatagtagtattttcaactcaaaacaaacatattatcaaaatgtattcaatgtaagatttgatgaaactaatttgatattttagatgtttataaacttaatcaaacttaacaaagttttgactagaaaataattaaacgacttataatatgaaacggaagaaatagaagctagtacctgatccattatagaatatagcaacctttgctatgaacatgcacacatgcatgcatggcagtgtgtggtcggaaaggttgaacaagacgggcttggcagacttgcctccaacggcatagcttacacaggacgctcgcccaaatttggttaaagcttccgatcattgtctgcaaagaatattgtggcaagtgctagctgtaattaattagattgcccatctgcaatcctcatttttaattaccatagttgggagttaaatcaggtcttttcgggcgtccgggggagaaaatttgggtgagatttctctatcgatctcaaggtaaagttaatgtcgcccagaaatattcattttgtagatgaaattaatttaaccaaaactcaaagaaatttgaattgatccaaaatattttgaccagttcaagaaaattctgagtcgcagccgagatagtgatcgtggtatcacattacaatctcaccgagaatatttttttttaacaaactagcatccgagtgtgccatttcattaaatataggaggaaaaactatatagagtgtaagggtgttattttttttaaaaaaaggaaaagctcggccttaggaggctatgcctgacaaacgttttgttctctccaaggcctaagtttttgcctcttattttatttttaccatcaagcttgttgcaaagagcttttgtgcttgaagactcgctggttctgctctttccaaatttcccaagcagctaagagggttaggcttctcaattcaacccttctttctgtacttacgggatggaggccagatccaaccaccaaccatagattgttgtaaggttgctctagttcattgggttgatctcttcatggcaggtccatgctgcaattattccccatatccacctcttgtatctgcatctcaccaattaagaatctgaaccacatggttcattaaagaacaaaaaaaattggccaaaaccacggtgagtttcattagttttctttgttgtttctctcttactaatacattatgtctttgttgtctatactttatgtgtcgcaatgaaattacggtggaatagaaaaattcttagaaaattttagggcaaatttcaaatttcaagaaatttatttacaaaaactacaaatgggggaagttcttaatcttggatctctctaacgtcgagtcgacatataagaatgaaacgccgacgatattcttattgagatgaggggagagagccacgttacaaaggaaccaaacaaagttgttgaggtaactgcctcaggctggtagtcacagaactagctaggatgagtttgattcagcttttcggtttcgctactacctcattatttttgtaaacacacttttcgatcaaactgttataaacaacacgcttttatgcaaaactttatatataagttttttttttaaaaagaaacatatctatttttaagtttgtaatagttaatacttaattttagtcgtgctctaatgattctttgtgttttgcgtgaaaaaaagcatggccattttgctgtatcgaactaggcctaataaggacctgcacaatttttttttgaatgccaggacctgcacaaattaatcttggatcgatctcttttctctctccccactgctgcacgcaaagagaatcgggcatggatggtagaaaaaattgacatggaacattggagatgccttagtgatatacatagatttatagtggaatatagtgacagcgctcagcaacgagtttcttacatagacatcctttcgaattttcattgtctgctttagagattagatactcgtatatccaattggtatatctatctatcttgtggacaagcatatatacttgccgatcgatagaattattattgagaatttttcaatcgttgaggaagctagctagatgagatgactttagcgttggtcgagggtgaaaaatgttcaacagtaactttctagctagtttctatatactgttgtgatagagaaactagctaagccttttcttttgtatatatgtgtgtttttcttgatagctctttattaattccaagggaaatagtattggtaccgtcataaaatgttacagcatttgactatcttccaataggtcaattgatatgtagctcaatatgtcttctatattacatttcaaggcattgaaagctttgcatgcggataagaatactagtacttaattaaatacccaaatgaaggccagaatagtcgaaaaaacagctgagcaataccatgttatgtccgtagcccgtaagctagcataactcagtacctatttggtagagctccaaatctctatctcttctaaagttgaaaccgaactaaatgatttcaaactttcagcttcacttaaaaagagtggggagcaggctagagtgttttcataaaatgaattaaagagataaagtggggttcaggctactcgtcctcatacacaagtataggccattggtattgctctctaagattataactcaacgctgttagttttacttgtgtcgtaaaaatgttgtgcatatttatatggattcatgtgtacttgttatgcgtcataggcttgcatccagactcaaaaagaaaattccgagattcgccactgaacaagatgatcgctaactagtatttttttctttttttttgcgaggattgctagtatatattttctcatgctttatgctctcaacttttctttttataaatcatgaaaaaggtatagagggcccctctcgtttccttaaaaaatatatgtatagaccacgcgcactgcataaagctaacaatgtgctataagatactacctccgttcataaatacaaggaagccaacatacaacaacattaatccattatatttgtggataggggtatgtagtactaacgtatataatggtagtgtgttacacaaaaaacttgtgcaataacaagcaacttaattatagccttaagaaaaaaaaagatgccacacaggcacaatattttcatgcattccatgaaaaaggaaaaacagaacaaaagaatgcacggagccgtgttgatcatcatgaacaaaaggcatttcccttttcccgtaactttaaattgacagcatgcacgtatatacatcaggtttgaccaattttacttatcccttcctttttggctgctggctggacatgtggtatattatccatcatcaattcattacttcgtgacttcatcaacacacctactccgtcactcctactgaataaagcgcaatcagacttgaaatgtaaaactaatataactttaaatttctcatataccatgtttgtagcaataaaaccataataatataaaaagaaatccaaatgtcaatataacgatactaattttatcaaataagatttaatttataataaataattaattattggtcaaatattttaagtgttgaatatgagcgtctagctactaagctcggcatgccaccaatgcaccaatatgcgtctgaggaataaattaacgttgatgtatcttatctttgtctccaaaaagaatccggccggactctcaaataacaggtcaaatcggcacaaaatgcatctacagctgaaaaacagcataaggcatgtatttcatcccttcacgcatgtcttgctccctctttttccagatgtgatatatgatctacaacgtaagtgttacgtagctgactgcaatcggtgtgtgttgttttgatggaaagggatttgagatcaagagatatatatggcctcactaatttcttatacatgtggtacgaattaatagttaaaaaatatttatagaaacacccttttaacgtttatattttttgtgaccagatatatcaaagttaaccaatttaataacctttttaggtattgtagagggctactaatcagcgcgtctacgctaggagctgagctggcgcgcaatcctcccttcgcacacgtcccgaataatgtgagctaataacgtttagcattaacgatagtataaaataattttttaaataaaaaataataaataaacatcaaggtgaaagtttttaaaaatcagtcgaaagtcgaactttaggagttcgaaatttcaaatcttgacttgaaatttaaattttttaaatttgtcgagaagttttttaaagtttgagttgaaagtttcaaaatttgtatcaaaagttttcaaatttgagttggaagtttcttaattttgagttgaacattttaaacttgatttgaaagttttcaaatcttgacttgaaagtttttaatctgagttaaaagtttactaatttgagttggaagtctttaaattggtgttgaaagtttatgatttgggatataaagtttagaatttttgggttgtgtttttactttttaattgaaagccttaaaattatatacgagaagtttttaaaaaatgcaactgtatgtagggcctgttcagattgatgacatttttaaccataccattatttggtaaattggtgattatgtggctacgtttagtttgttatcaaatattggcaatgtgtatagagttttggcaacattatgaaaccaattctaccaaaattttggcaacgttgtaaaattgccaaaattttggcattgccaaattttggtaaggtttattttggcaccaatctgaacaggctcgtagatacaaactaattactcaggaaaagaaaaaaaatataactaatcacgctaatcttcactaaatatagtgctaatcacgtacatattttggtttccggtttagatggcactgctcgcgctaccgatatgccaaaatttgaattcaaaacgatacaaaatattcattctcatctaaaaatcctctccctgaaaagttatcagaggaaactattcatgttgaacttcactccatcccttttccatgtccccggcccagttccggcccagtcgctcactcccttcctctccaacctttttttaagcccaacactgctagcccaggtcccctcctctctttcccttctaaatccagggcggcccaattctttccaattcagctcggcctgctattcttctccacttctagcccatatggttctctcctccccttgctttggaccagcctacgtctgcgtgcgtggacgcgctccgggcccacctgtcggaagcgtcgtcttcctccagccacggcatcgatcggttcctgacttccttccacctgacgaaccctagccttgaattgccttgaatcgatggcttttcatctccggcgaatcgacgccattaactccggccaccaagcttcccggcatcgatcgatccgccctctcgttgttctccgagcgtctttgtcacgatccaacatattctccatcgaatcaacacaaatcacagcagaacaaccacaattctagagccaaatcacagcagtaatcactcgattacttggatacatgtagcagaatggaatccgagacaacgctggcgtcacgccaagcagaatctgaatccaggagtagaaatcagagttgggggtgggagaactctagagaggaggaagaagacacagagaaggaggaggaggaggaggaggccgcaaccattggttcaaaataattcattgccccctttctcttgttggagtgtgtacttatactctggatgacttgctcctgggccaagccccctttcctatgacaacccacatccggcccactgtgaagtccatgtccagcacatgacattcctctccccttgaaaatcagcttgccctcaagctggtgcaaatgaggcacaaaattcatgcccccaggatcccatggcaactccattcttccaaaactgcagtcaggtagcttgatactcatgcaaagcgtaggtttgatagtctcaagatccccaagccatgtcatcttcatctctgtggagatagtgaactggaataggctctgatcttgactgcacttgcacaattcatgaacttgatttagtacttgatctccccatcttccagaagcaggccaagagtatagtttaattaactttgtcattaaagccatgatctgcagcaatggtttcatgtccgccctcacactatcaggaaaggcattttgcagtggttgtagttgtggttgttgcctgtccttcctaacatgcaagagagtgtccaggttactgcctccagggtcccagggtgcgtgcaggtgattagcaaaggccattctaaccaccaaaggagagtacttcaggccaacaacagtgacaacatttgcacttgcttggaatgtctgcatatccacctgtccgaaattggaatcaagcaaattgattcttgccagcaaccttgtcattgtagagacgtcaaacataggagagatgtcataatctgtgtctcgtttggcagcaacatgatcccaagacttcattattgcctcattagaaaacataactttctgaattgcaaatgtttgcttgaacacaagttggacacaccaagctgacttccaaaagtcagcgttgaattgaagagatgatgcccttttgctcaccacgcacagactcagattctgctcaaggcgattctcttcattatgcgccatcaaggccatatgttctgtcagcaagagcttgcagtgactttgtgttaactcccaagcattatcacaactgaaccaagactcattccatctgtcaggtgaaagtctgggttgtaggagattcaccacaacgcctctgttatcttgttttatttgaggatcatgccacggttctagctgccgttcaacaatagaacctttgctcttggcttgtagagggggtggccatggttggagaggctgaaataccaccacacttccgttgcctgaatacaaccatggatcaggccatggcgagggccgagaacctgaaaagacctgatcgctgtaccatggaactgccactctccaaagtggtactggtggtgagctagctctacatactgagcccaatacaaagcaatggtaaggcacttccaatgtagatggaaccaacgagagattgttaacaccaaggtcatggctcagacacccaatcaagatcctggaaggaattgcattgagggctaaccatggatctctgaagcataaattcacagaagtaaacttggtatccacttcaatgagctcagttctctcatcgttagccatgtctttgccatcatcatcaaccaactgattctttcccttcattgaacactcgatggttgttcccatgccaagcttggctaagtcaacatggttagttgggccagcctcagcactgacctccaatgcaatggtagttggactagtgttggcgctcaactctgccacatctctagtggaatccttgttctcggataaatccaccttggtgtcgtgaaatgcctccaaaatccgatcgatcctggtgcacaggtcttgaatggccttgcctgcgttctccaccaccttgtccatgctagcctcagcctccatggcctcggtgagtgaaaccgacgttgttgtgactgctgatttggccgcagatagactcatggtggccggaaacacgtgttccagagtagtaggagtgctctcggtatctgattttgtggtggcacatcctggtacttgcatcaaacacttggtgggcgcagtgtcggctctgtcttcgagcgaggtcggcacatgttgcacatccaacacgcagcccccgtcgtagatattgcggccgtggagttcatcctgagcccactctgcgtcgcaggtcgtccgaaaccaaacaattgcctccacacgccatgcatcgaccgcaagcatctgcaccgccactgctccataggggttgaagacttgatgcatcacattggtagacacagggtagatgaggtggttcacttggacatggagtgcagcacctgcagcacttcctaaccggcttggcatttcatcgaacacctggcgggcgcctctgacagtgtcacctccatggctcaaatcctggccccaacagtcgtcactgcccccatgtgtcgtccactgcatctcccggatcggaatcccatgaatcgactgctctgataccatattgtcacgatccaacatattctccatcgaatcaacacaaatcacagcagaacaaccacaattctagagccaaatcacagcagtaatcactcgattacttggatacatgtagcagaatggaatccgagacaacgctggcgtcacgccaagcagaatctgaatccaggagtagaaatcagagttgggggtgggagaactctagagaggaggaagaagacacagagaaggaggaggaggaggaggaggaggaggaggaggaggaggccgcagccattggttcaaaataattcatcgccccctttctcttgttggagtgtgtacttatactctggatgacttgctcctgggccaagccccctttcctatgacaacccacatccggcccactgtgaagtccatgtccagcacatgacagtcttctcatggttgtgtatctgattttgatcactagcatactagttgtaccatgcatagtactgaagtgaattataccttattggttttttctactccctcattttcaaattacttttcattctgatagctttgtcccaagtttaacatttctatggccatcgatttctgaaaattctcacaatttaaaaatgtgtaagttattttctcatgttgattataaaaaaatatatatattatgatgttcaatatataaatttttaaaaattaatggtaaaagagaaaaaaatgtttggctagcttatgagaaaactagaataattaattgtatcaatatatatagtaaaagtttcagttgcaataataattcatttgttatattagcatagaggagagataatatgataacttgatacatcgatcgatctagctaatgcatgaacgctagcatctttatatttttataattttataatagtagatatacatttatttatttatatatacacacttaagagcctgcatgcatatacagctaggcaggtctcagcttagctatagctgctgcatgcatggaggccgggtggcatgcgtagctagctaggggtagaccctcctgccgccggagccggcctcgcgctggcagttgaagtagacggtggcgaccggcgagccgaggttgtagagctcggcgaagttcctggtgctgaagttctggcgccaccccggtgcgtacaccgtctgacgccccagctgctggaacagcacgaacaccagccggtggatccccatggttggccttgggctctcgtagcacatcacctcttgccctgcatcaatttaattatctacgttattcaccatatatatatcaacagtggctgttctacaagttttgaggggatcaccaccctccattttggcatagaagaagtacagccctatccttcaaatctgacgaaaatttttgacaaaatagatactccctccgtattttaatgtatgacgacattgactttttaacaaacgtttgactttttgtcttattcaaaaaaattatgtaattatcatttattttattgtgacttgatttatcatcaaatgttctttaagcatgacataagtatttttgtatttgcataaaaaatttaaataagacgaatggtcaaatgttggttaaaaagtcaacggcgtcatacattaaaatacggagggagtataattttgtcattatgcaatttttgaagtatatatatggggtaggaccaaggtaataaaaattcatggaactgccacatatgttgctgttacatcgaaattgatatgagtactatatatatatactagtttactgaccaaatgttgctccagtggtaccaggaatatcggtgaccagcctacagacagacaaagagaatcaacgcgaatgattgagaatccggtccaaattctttatattctaggacgaatgtatacaattagctagctaacatatctgatcggtgcctaccagtgtagatactccctaaggttagggttgcttgggctcggagcatccgggtctaccatcacctgtaggtaattagattagtacgtaagccacacaaaattaacatgcatccatgtaaaaaatataatttatagtctagttttatgataattaatgaaagtaattaaataacttctggtgggtctctgcatccaagatatgatccgtacgagtgtgtagaacgtcctcatgtcattgccaccgaccacgaccctgggctgttgggtcaccatggacggcttgagctcgcagccattggagacgatccttgcaccatagctgacactgaggttagtgatccggacgaatggatccagcacatcacccacaatcctgccaaccacaagaggatcgtccctgccgctgccggccatgtcaaattaataacctctaactaaaaacgttaggatatctaatatcaaataaataaaaggattagactttgaatctaggtcagctaacccactaacttatgaagctagccggaaaaactctaggcatttctcagtaacctttaactgaacatgtaaacaaacagatcgatagagattgctagctagcttaggtatctcctgccgttcaatccagaggatagatgtcaggaaggttaagctagccaaacagtgacagggatgcactagttgtgcaagcttctctgcatctgtacagtttatatagctagccggcccctttaggcagtaccaacccaagacactacacggtagttttcataaacttcacatcatcaataaactagtattagacactactttttcaatacaaacaccactttttcatgcttaaattaaatttatctcacatgatgtcttcaatgttgtgtagaaaccatgtctcatgcaagaccttgttttcttctctttcctcatttactcacttgccacatcatttttcatattaggtagcagcttatttaatgctatggacaccatcctagttattgagctgagaatagccttactatgatgtgcccagtagaatcttttctttatgcatttacacactttgttgtgcccggtagaatcttctctttctcacacactctctctcgcatggccctttctatcttcttcatgtcgatagaagtgctgaaactgaccccatttacagaggcgatttcgagacagatacatatgtactaaccccgtccaaaataaatgaagctagcagtaaaataatgaagctaactatgggcatgtttggcagagttaagaacagctgtttggtaaccaggctctgagagtttggaaaagctggttacctagcttctggcttttagttcttttataaattctataactatagctttttagaatctggaccaacagctgaactattttgagagcttttgattctgggagaagttgatgcagctagaagctcccccaaacaggccctatagctactaatattgttgtgcacaattaaattacatactctagggtacaatgtagattctattgttacgatagaatcagatggtactgtagctgatctggcatggcaaaacttatagctggcctaacgttttacaagcttcatctctcattaatttttcaccatacctattctacaattcgcggtgtgttcggtatatttccgattccaaaactcatacaatgtttggttaagcttttaaaaattctgagatcgataacttttgaaacttctcaaaatgcttagattaaaaaaaataagaaaaaaagatagtacatatccatagatttgtcttgaaaggtgtggtggccaggccagagaagcaaagcatgcatgcatatgtggaggagaactagcttccagatcgacttgcagatatgcaaaatgcatgatgcaatacaaacagaaaggctagacattattcccggccggcggcagaaaagctaaacacaacaaaataaatgaatatttatatatattattatatatgtaaagtataagttgagattatattttgtttgatgataaaataagtaacaacaaaatactccctacgtttttattatattataagatttgacttttttccttagtcaaacttttctttaaacttgatcaagtttaaagataaatatagtaatattttaaatagaaaacaaacatattatcaaagtatatacagtgttaaatttaataaaactagtttggtatcataaatgttgctaattttttctataaacttggttaaacataattaaaaaagtttaactaagaaaaaaaacgacttataatatgaaacagagagagtaaatgatatttatatatatatttaataagacaaatggtcaaacgttatgcgaaaaattaatggtgtcgtacattttgaaatgcaaactttcaaaaaggaatatatactagatgaattgataaaggaattttcttgatggatgcatggctaagcattattggacagggatggccaccaggacagagcaagactgggtgcgagaatatcagattgcattcgcgatagccgaccggccagccaaatgttattcctgtctttttagatgatgaaaaggctagtactcattattcattatgatgtatattcactatgatgtagagcggcttgggttgatttctgttattgaaaaactaattgtttgaatgtggattaattgcatatatagccagaggagaattcataccagttacgcccaccgaatcactagcttcattgactccacaattgaatacattttagtgtagtttgtttcgagtgaaaaatgtacttcctcaaagaatgtacttcctctccaaattataagaatgtacttcctctaaaaaatattttatttgatctcaaagaatgtacttcctctctgtcccaaattataagaactatattttacacgatctcaaatgatatactttgactattaatttacttcatgttacgttaccaacgaatatgatattagcatcacataaaaatactttaaaatataaatctagtgatacaacatgcataatatttagggagtaaaactagaggggagggagtacatccaatcgcatatggctagctagcttcctattagcagtctagcagaatactccttcctgaatctctaggttacataagtatgactaacatggcatccaggctcttttagcatggaactgggtaacagaaaaggtaatgcagacgtgacaccccacgtgggctacaccaatatctaccaatagagaaatggtatcgcacggaaaagcatagtgctttctttctcgatggtttcgatttacactaaaatatgtcctatgaagagtactttatttttggattctttatattccagaaagactttacgtttaaagcaatcaatctattaaagtttgaaaataatgtgaataacattctagtctttttaggcccctttgaatcacatgattcaaaaaatgtacaaataaaaaaaagaaatatgatagaaaatcatatgcaaaacagagaattgagaacacatagatactataggaatgattatttgattggtgcataggaaaacataggaatgtgttgagtattaagtttatagtaaatcaaaatttgaatggttttgctagggtaaaccatatcttccaagggtgctttgcctcgatactatgcataggaaaagaaaaatgagctctaaggttgatgttgattttcctatcgaattctgttgaaatcatggtcgaacttttttcaatgctttttctccgttcaattcctacaattcaaagggacgaatagtaccaatccccatagaattcttgtacatatgttttttctccattattcctattaatcaaaggaggccagttttctattggtacatgtacgaatggttaaaaataaattctttttgggacagagatattagtatcaatattcggtagaaatagttcaaattattgatttataaattctattaattatgattttcttacacctcagtagaaagatattttattgttggtagtaggggtgaaaacggtacggaaacggacggaaacaacctttatcgttttcgtttccatatttttttcggaatcggaaaccccaaaaacgaaaacggaaacgaatattatcgaaaccgaaaacagagcgaaaacgaaccggcgcggatacggtaacgaaaatttatcggaatacaaaaacccctcaaactgagcttcaaacttttgtcaagttcaattctcaagtcttaacagtctacaattcatcataaaacacaattatatgaagtctaattgttaagtctcaacagcaaaatatattcttctataacttcgtataatttgcataacaaatattctaaaaaaaattacagcaaaataccatggtataaggtataaagtatacactattagcccgcagcccgcagcctctctcttcctccacgggccggcttccccttcccctcctccctcttcgggccgccggcccagcccttttgctcctccctcgccgagaagtctataatgcctccttcctctcaattcaaatattttttagggtagtaaatgatttcaaatgaaaaaaatgtcaataacaaagttgtataacttatcaagatcaacaacttttgttttggtcattttgctgtatgactttgtttcaataatttgaatttgaatttcaaattatgacaacttcaaacaacattttcaaatactaaatgatttcaaatgaaaaagtcatcaacaacaaagttgtataactcatcaatatctataacttttgttttgatcattttgctatatgactttgtttctataatttgaatttgaatttcaaataatgataacttcagacaatattttcaagtactaaatgatttcaactgaaaaggtcatcaacaataaagttgtataactcatcaatatctataacttttattttggtcattccttcatccgataaagtgatagtaacattgttcacaaaatttacatatatctcctatagtttataaactatataagagatatatacattttgtgaacgatcttataaatcactttatcggaggtccctaaactctcataaaccgttcaccggaggtccctcggcaatatttttgcccggttttgcggacgtggcatcctagtcagcaaaaaaattataaaaagtacatggggcccacatgtcagctgcacatcttttttccttctcttctcttttctccacgtcgggccggccagacagtatccagaagaaccaggtcaacgccgacgacgggcgagggcggcggctggcccgcgcggtagcggagcggcgccgggctgcaggcgaagcggaggcgggcattgaagtagagcatgggcgagtggacgcgggagggcgccgggctgcgggcagagcgcggtgggcgagctccaggtcgctccgtgcgcgccgcatcaccaggggtgcgacgactggtgggtgtgggcagccgccctcctcaggctttgccccctactccccgcacaaaaaaaacagtttgggacatcaatgcagttcaaaagtattcggatgctagcagttcaaagatcttgccgaatactctgcaaatcagcaaccatccaagaaacaggaaccagacgctcatccaagaactaaataattcaaggaatctgagggaaatctatgtgataacccgaggtggcggggagctgtctgaagaaatgactgggaggtgaacgagtatgcagaatgaagaggaatccacgcagaaaaacccaaaggggctacacatgaaagcacatcaacacaaaactgaacaagcaatccaagcaactgaagttgcatttatccccctagtgggttttggtgattaatgacgaataaggttaagggactaatgattttattgagttatgtgattagtcccaaggtgaacttaggagatcaagagatgcttggagaccccccacaacaatcattcaagcggatttgaagctcgaaggacaataggatagtttaataattgaaattgagttctaggaaaaaccgtggctctgggatataaaaagtgctcttagtgagatccaagtggtagaatatttttaggagctatttttggaaatggctctggcccggacagagaaggctgaccggaagttctggtccctagacccggaacttccggaccttgtgagttgaaaattttcccaagtgttgtccggaagttccagaccccttccagttcaaaaatgtgagtaacggctagatgatgtcacctagccgttatatatatccagatcgcacccagctcactttttggccatttcacttcagttctttcatgccctaggtttttctagcctctcccaagatccctttgcttcctccactcaaatctagagctattcttgtgagattgagagtgtaggagtgatttggagaaggtttgaagagtaggtttgattgagtactttggatatcttgtgggttgtcacttgggcttattactcttagagatcctctcctagatggttaggtgtcgcctgtgagcttacaaagatcttgtggatctagaaaatgacctaggggtgttgagttgaaggccttggactttttctgggatctttgcacaagtgaggcaaggggttaattgagacccagctctttggagcacctcaacggagagtaggattgcaagatctgaacttcaggaaaaaatcacccttgtcctctctgtgatgattctgtgcatgttgctgtgattgtatatatgctctttcatccagtagtttatttcgtgcaatttagttcaagtccctgttaaggtcttcaggtttttctgttgcccggaagttccggacagtctgagcagaccggaagttctagtgttctacatccggaggttccggtcctgctgaatttaaagctgcaaatttgtttgtaattttaaggaaagcctattcacccccctcctctatactacatctttgcgcgttcagcaatgaaaatgagcagttacctctcaaaacatcaggacaaatccccaatactaacgcctcctaatcatgaggactgggcgggcgtggactggccggccgcctctcccgccgacgcccccacctctcgtgtcggcgcgcctcctctcctcctctcctgccacctccgtcgcgtcgaccgcctccgcttgccgttgcaaccgcactcgccgatgcccgccctcgcagccacgctcgctcgccgcttgccctcgcagccgctcccgccgacaccgccgctccgcctgcctccgcccgtgcccggagagaaaaagagaacaatagaaaaatgagggtcacttacatgtgggctccgcatatttatttttattatttgtactgactaggatgtcacgttagcgaaaccagcccactatactgtcttgggacctcttttgaacggttttgtatagtttaggggtgaagatttctggttttgtggttaagggacctccggtgaacttattccttacttagacgtggttgtttctgataatctctatggccgtgtgtgccattcgatttgttctacacgtgatcgagaagtccaagccacgtggacgtgctctgtacggacggcctgcgcatgcatccagaggaaatccgaccgtacgtcgctatccacgtacgcattgctgtcagcagtaccaactccagcttgcactgcaaccagcgcggatctacgatgttagcgtcggtgttaaatgacactgatgactttcgacaaaacctataattaaactgcttatccatatattatgacacaatattctaattataatgagcatattagacaccgatatacatatcatgacttcaagtcaccaacgaatcaattttctagatccgtcactgactgcaaccaacggtttcgactttaaagaggaaaaaacaaacgaaatcgaataaaaaatactcctatatgctttgacgcatggatcgatcacttgatacgctaattaatctcgatctgcaaagatttcaccggagacgacgacgacgaccattcctgtccatagacaattccctccctgttcttcattcaacgtacggccggttcagtttgcctcagcttcttcttcttcctcctcgtcttcgtcttcctcgcgcacgcgcgcagcgaccattcttggttgattcctctcgctcttagctggctctcttttgagatctagcggaatcactggtaattaatcatgccggctagctatatataaaatcttaattagtacggatgatgagtagagtagcagtgtagatcgtcgcagtatttagctaagctagctagttcgcgtcaccgttgatgggaatccgaccagatcaaggcggcggcgagttgggggcggcggcggcgacgagaaagaggaggcgggaggaggtgaaggtgacgcacatcgtgacggcgagggtgagcgcggacgaggcgagcttcagggacgtggtgcagcggctcaccgggggcgccgccggcaatggcctcctcctcgtcggtggcgatgcggcgggggtgctcccgtcgtcggaggaggagatgaagcggtggtgggccgccggcccatgagtattcactgatcgatgggccttgatttgggccggttgcaatgcgtgcacgcatgcacacggacattgcacaccatcatagcttttgtattattatcgatttcttgtcatgttttttctctctagatatatatgaatttattttttaaaaaaaatgtgtttgcgtaatgttttggttgcgtggtcgctcttgcttgagtggtagcggaggcttggccgcttggatatggttagtaagggtggacttaggatgacatatgggtcccacttgctgactcagctagtcaatcatgatcaatgtgccacgtcagccgaacgcaccttccaaaccacttgaggagtttatttgcactggtttctagagatgcgggaggtgttatacatggttttacggttgagtgatgcgattcgattaaggcaaagatatgagggaggaaaaatagacttattctgcacctaaatgagcttcgatacccaggcctaggtggactaggcctggtctatccctgatgattagtcttgaacctttagaggtagcagaggatccctaatggtttaaaatcatgaattgttatgcttaaaatctgtaacagatcaatacaaatatatgataaattggggaaaagtccaaattacaccactgcattattgggtgagtacgaattacccccttaggtctgaaaaccagacatcgcacccacagcaggtggagcccataagaaagaagaattgctgattggagtgccacgtaggaccaaaaccactccggtttaagtgaggggggtaattcgttcgatattaatagttgatggtgaaaaatgtctgattttcgggtctgagggggtagttcatactgacctaatagttcagggatgttattcgaacttttccctaataaactgtcacatagcaggtacgacaattgtttaaaaaaatgcttaaagcgagatcatgaacagttttttatatgatattataggttaaatagtactattaaacggttagtaaccttaagtgattaaccattaggtaatgcttcctaaccaccttgccattcctctaaactagcccaccatccctaatgggtggtgtttctttagcctagttcaaacagggcatgttgtacaagctggtttaactaaagctgtcataaaagttgtaagcatacaacccaaaagactgggtcaattgttctatctgatatgagactgccatgtgatttttatttaattgaagctctagagtatatatgttgatataacgaaacaaaaggaaaaaaaaacacttcaatattttgtaggtcatgaacgggctcaccttgtattaagtgtggctaccaaatttgtgtttttaaattatccattatcatgctctgcccctccactatttaatctgttgtaaaatattcagccacttcttcgagtttgatagcacaaccagagaattctcttcttgcataatgttggcaatagttttctttttcctccacaaattttgagtgcatgttcggttggtccaacaaatattaattaattaattaattaatcccctgcctaactagctaagccaatcatcctatggttttggaggcggtggcgatctaggttaggtagactcacaaatgaaacaaaattgtttgttggcctagctagcctcctattatgttcttgttcttgtgttagttcagcattagcaggggcttaggcttggttgcaaacaagtcactctcacagccctcgtacttctgaatttcttggagataaggctctgaagatgtgccatgtagacttggatgtcagcccactaggctggcgtggccacattttaattacgtcatgtgcacatttttcagttagaaatagacatccaaaattgaaagaaatttcagagtaatgaaaaaaaaattatcatcatctgagatgtcatgaactcgggaccacgacaagtttggagtttaggatcagttttagaatatcgtctgttttggactatttgtagattaggtgctttcaatcaactggagtatgggcgccatcctagcctccctccttcggtccttccccttctctagcgtccttgttgacgaggaggggaaggggataggtagtttttcgttgttgtgtgtgttcggaacttcacttcccaacccatttttctcattttctgcgtgcacgctttttaaattgtcaaacggttcgttttttttaaaagtttatataagaaagttgttttaaaaaatcaaaataatctatttttttaaaaaaatagctaatacttaattaatcacgtgctaatggactgctccgtttttcgtgcggggagatgggttcccaaccttcaagtaacgaacgcctaagtatgtttaggatttgttctaaacaaaattgagttttagtctattatgatgtttatggagttaggtcaatttatttagattcttttgcctttttacttttgctattgttttcacgggttcttcaatggagatcttgaaagacattgatcaggttgcagattatccaatcgacagtgtcggttttaggtgggtcactgatttgtttggtgatgccgttttagagatttgccaaatgatcaaagatggtggtcgatagaaagacttttgtgcggtccagagttgattagtgttatggctgtgcttgtgtacttgtatctcttgtggcattttaagatgtatgtagatcctctttgttctgtatcggtaccttatttctcatgtactagaactatcaaggttgtgatgatttcttatatttaatataaccaccattgtttccataaaaagaagtcaactggagtgataatccaaaagcagcctagctagttcctacaaatgagaggggaaacaaatgacacatcagaataaggaacatcgtcatcagacttaatcaagaacatgacaggttcagaatttatgtgatgcaagcctagcctagtttgctgatagatgcgagttagtaaattccatagaaatatatacatatccagggccccatccttttgtacatatcgatgtggtttaatagaaacccatacgatcgatggcgaaatcaagaggtagtctcaccatgatcaaagttggttgactcataatttgtgacctgaaatcgataaatttatgaatatatatattaattatcatccaccaatgcgatggaagatgagacactgttcgactgtcgattacctgtccccgatttaagaatcgaaatctccgtttgatcattgtcgtcgtcagagatatgatgatggatggactggcctgaaatggaagaaaagaacagcatctgaagcttccacactactgatgcttaatttccctgtgttcagttgctagtgatgtgagtggttagcttaattagcagctcgatcgcgttgatctctccaattcgcatgcacaccacaacaaccgatcgatcgatcgatcgagagcactcacgtaatacgtcgccttcgccgcgagaataatttagctatagctgcaagcatatataacgattcaatacagcgactcgcacctaacctaaccccgcaacaaccactaatcaaacacggcaagaaaccccagaaaaaataaataaataaataaacaaaaataaaaaagttcagatcagcagcatgtgatttttttaaccatttaatttctaaattttaaattgaatattctcaaaacttatttacaatgctgaacattttgtcacgcgtggcgaaataacaccgctagctaatactctaacccctcgtgatgtggcgcaccgtacgtgttagcaacaactacgggtgacattgtgacgttgttttagcacgtcaggcgggataccatggtctaaaggttcagatttaaaagtaaattttaaaacagcttatttttaaaataaaaaaataaaatggttcaataataataataataataataataataataataataataataataataataataataataataataataataataataataataataataataataattcggatgaagtagtgagcaatcagcagctgcagtacgtcgtagctaattggtgtgatgagtgatgagtgatcactctcgtcgatcggaagctccagctccaatcattcacgttttgatgatgcaagatgagtggccgggcggtcgctgtcggggaaatttaagaaacgggagccgtcggcgaactcgatcgatcgatcgaggtgccgtgtgcgttgcagctggcggcgctgctgccaaccaagctggcaggagagcgatctctgctgcgtgggtgatcgacggcgacacgcactgccctgtcttcctccctcgccgtcgtccggtcccggcctcttcgtggtcgtcgccgtccgacacagctaagattgcttgtgacctccgacttccttctcgccggactttcatcttcgcttcacttactccctccattccatctcaagtgtaattataagtttccgtgcctaactttaatcgttcgctttaaattttttttataattagtatttttattgttatgagatgataaaacatgagtatgtctaactttaatcatccgtcttatttaatttttttgtaattattatttttattgttacgagattatgtgatagtttatatgtgacttatgtttttaattaaaaaattaaataagacgaagatcaaagtactatgttttcaaataattgattttttttctaaaatataagacacaactatttaactttagatatgttgttttatatatttgacaggaaactgaggagaaatttatccctttttttcagcagtttggatacgagtaaagattcacgggtggcgggagaaaaaaatctcacgtgcaggggctcgatcccatgtacgaccttacatccactgagctactacatgtgttgtgtggttttatgagtcttacacctaaaatatattgtaattactttctaattacactataattatattaattaaggttgtactgtagtcacattcgataaattttaattttgagatgatttttttcaaaagttatataactaatccctactactgtatctgtcttataatataagaaattttgggtggatatgacacattctaatacaatgaatcaggataaattaggatgtgttatatctacccaaaatccttatattataggacaaagggagtatttgacttttgacctacaattacactttaatgacgtggtttaagtgtttgtaaattatttgtaagaggacgaatggttaaagtgtgaaagtgaatgtctcctgtcagttatttaaaaacaaattgaaggtagtaccaatctgcctcgtcgtcttgcacgcggccaaagctcatcgtcttttcagacatttacagtcgacagctccactctccatgtcaatgatttagtccagaacccaaatcaaaactgctgataagttaatcatcatcttcttttctttttgtgcactcaaacaaagttgttctagctttgctctgaattttgggcaacaatcactcaatcagtagcagtagacctgattaaggataagatgagatcaacgacgtgagtgcttgggcaaagagagggcagctttaatttgtgatcacaagtgcgagttcgttatgaatgtctgtgtctgtgtccatgtgtggtggtggtgcattttcagagaaggggattctttatagttcgctaataacaatatatacagggatgcctgtggctgatggctactgtcaccaccaacatcttgttattgttcagactaaagtgttggttgctagctcaggtttagctagctccaaatacaagtcttcactcataataatggtgttgctggtccatgcttgatcaaccatgcaagtgtggtgttctttgagttgggtgttgtcccatcaaaatcctctgtatatatatacttccatttgattcgtttgtgcggtttaagcacagtgtttagctttgctttgcttagttgatgcccatgtctgaatcacactgagaatatgccctctttgcttaatggacatgtatatgcctgttgctggtgatgttggttaaggcaattcatttctttttttttctaaccatgattgattattctgctctaataagatgagagatgcatgtgtggtgttggcttccactgtttagtgatctcagttgctaaccacctatcacaattggccagctgttcactctagctcttggacaacaatgtcattgttgcagttacaacggtgaaggagatatcctccaattggcaagataaagatcagagatggaaccaataaccaacctgcagacaaaattaactgcaagttcttccaattcttcttcttctttttttatccaagcaaacacagattgtaccaatttcattgaatacttccaattctctatcaaccaccatcatggcagaagactgctagtcttgaaaggcagttagctagttgtagatgcaatctattgcagggagattgacagattattggagcccaagtttcgtcgaaccggagacgcaaggaataaagggcaaagacaccggtcaaccatgcatgaacgtaaccatgagcacacacgcaacttgtgcctacatgcatttttcatgccagaatatattaacactattttttatcctatttttaatgatactatagtgggaccaagatggtccaactgatttgatatattaaaaataaataaatagacagttgtatacagcattgcatctgaaattcaaacttaatatgacctattctcactttaattttgcatatagaaattgttaatacattaaaaaaatagaagatatatttcttccatcataaatccatattaattatatctctcactttaatttacagatagaaattgttagcatattaaaagatataaaaagcaataactgatacagggttgcatcagaaatttcatattatttctatctcttgcttttatttgcagatagaaatatatatgtagatggctagctaaaggatttatttcattatcttatactccctccattttataatgtaagacttcctagcattacccatattcatatagatattaatgaatctagacacatgtatatacctagattcattaacatttatatgaatatggataatactagaaagtcttacattatgaaacggaggaagtagaaaaaaagaaagctaagatgcaaggagaatgccggtccatcacgtttgccatctaggcagcacactctaccagaagcctgaatgcaaagtatgcaggcaacctacccatgcagagacaaatcaaacaccaaaaaggtggcaagagatttcaaagggagagacaaatccttcttggcacgggactgatcatggttagtggcggcagcagcatcagcagccagtgattggtactccggatggagtactaattaattagctggctaacaccaatatattgcttctttctcaatcatttttcttcggtttaagtctctctttttctctctctctctggtgctgattgcaaagccactcacacgcaccacccataatgtaatgcccacccgaaagtccccacaaaatcacatggaagtcgcctcttcccaatcacaaagcatgaacaaaaaaaggagattgttccacagctcacaaaatcagctaaccccccttattcctgcctccctccctccagtaaccaaccacctgtaccgggcgcgaaaggacgaatggtctctcgcgctcggttagttcgttcgatggtgtacaatggactgtccagatcatcttaagacggcatttgtattgtcctaagtcgaacaaatggtatactcccttggtctatcttgaccacaactccataccatatgcatacatgccttgaaactgtggttcgctatcctgatatcagataaaaatcgctcacgagcagtatcttcggattttgtagaaaccattgataaaccaaaagaaaaccgatgaaatccgaacaaatctggaaaaaaattaataatccatttttattttaattttttaacttcacacaaaaacccgagcggtttatgttttagacatggtccgaaaaaaccagatttcacgaaatcagaaccggttttctcccgggataataaacccctgctgggaacaaatatccatatcgtcgcaaaccgaccgacgtatcggacgatctcgaccgtccgataccgatcgggcggtgcatggtagaggacccggatccgggaggaacagtgcttgccgaataccgacggcacgaaaaggtaaagtgcacacatgatagtgcattacattgctactactacatgatatgcattacattacacctgtccccagatgcgccaggcagacgggcctcacgcctcctcacgggctcacgcggtcacgcctataaaacgcgccacccctgccctttccacgcatcatcacatcatccactgctctgcttctcctcttcttttcttggcttgtgctctgttttaatttctttgcaatgatggggaggcagagctcgtcggcggcgaggagggtggtggtggtggtgtgcgcggcgatggtggtggcggcggcggcggcgcagaagtacaatgcggtgtacaacttcggggactcgatcacggacaccggcaacctgtgcaccaatggcaggccgtcgcagatcaccttcacccagcctccctacggcgagacctacttcggctcccctacctgccgctgctgcgacggccgcgtcgtcgtcgacttcctcggtaactttgattctttctttgattccttcgtcttcttggtttgcttgctccggcgagctgacggcggcggctggtggttgttgcagcgagtaagttcgggctgccgttcctgccgccgtcgaagtcgacgagcgccgacttcaagaagggagcgaacatggcgatcaccggagccaccgccatggacgccaacttcttccgctccctcggcctctccgacaagatctggaacaacggccccatcagctttcaaatccagtggttccagcaaatctcctcctccgtctgcggccagagtaataatcactcactcactgttcttcccaccacacaatttcaaaatctctgacaagaattcaattcgattcgattcgattaaatttcagattgcaagagctacctggcgaactcgctgttcgtgttcggggagttcggcggcaacgactacaatgcgatgctgttcggagggtacagcgcggaccaggcgagcacgtacacgtcgcagatcgtggacaccatctccaacggcgtcgagaagctcatcgccatgggcgccgtcgacgtcgtcgtccccggcgtgctccccatcggctgcttccccatctacctcaccatctacggcacctcctccagctccgactacgacagcctcggctgcctcaagaagttcaacgacctctccaccaaccacaacaatcagctcaagaccaagatctccgcgctccaatccaagtacaagtccgcccgcatcatgtacgccgacttctactccggcgtctacgacatggtccgcaaccccggcaactacggtacgcacaccactccgcttacactgttacacaaaaataactaattctacggccctgtctagttccaaagtttttttctaaacttccaactttccatcacatcaaacatttcatacacacataatttttctatcacatcgtatcaattttaaccaaaacttctaaacttcagtgtgaactaaacacagtctacgtatatattgcccgtacgttgcaacgtgatttggattttttttaaaaaaatttgtgcacgagggagacagggggccatgtgagccgtagcaagattcctcagttttgtgccagtgaatgagcagtttgcttaagtagggtagtagtgtccgacatgggcaatccgagctcgtgattgccattttatatggggggaacagtagtcgtcttgctccaacgactagctagacacccaaattatgccagattaatggcagatacgcccggttaggtgtgtggacttatgtttgtacctacgaatccaactgcacgcacgttcctccgttccctcaccggaactcaccccatgttcccccaactaaacacacatgtgagacagtgtcaaacgactacccccgagcagtggcgttttggcagtgtgcatcctactcctttcgttctgaaatataagagattttaaacggacgtctaaattcgtagcactaaaaagagtcacatccattcaaaatcgtttatgttttatgacggatggagtagatgatacagagaccaaagatgattaaactgatgagctatatatattttttgacatgtaggatttagcacggtgttcgagacgtgctgcgggtcaggcggcggcaagttcaactacaacaacaacgcgaggtgtgggatgtcaggcgcatcagcgtgctccaacccggcgtcgcatcttagctgggacggcatccacctcaccgaggcagcttacaagcagatcactgacggctggctcaacggcccgtactgtagcccggccatcctccacagctaaggcaaaatgactggaaagaacgagccattagttaatttattactttattattaaggctggtgtttattaattaagcgggaattaattaaaggggaattgtttgggttcttgatttttatttgggtggcatatatggtgggtggtgtgacggtgaaatggtttacttgcgttgccaaaaaagcaaagaaagcgatggcatctgtagaataaatgttggttactgttgtaatttgataattgtttctcttccagaatcaaatgaatcatcaatggtattatactcagttattttttttcttttgctttttagaaagagacttttttgccatggcagcttatgtttggatcttttgcctggccaggggcatgtggtctgtgctttaggaaaagcaactgcagaaaattcactctgatggtcatcctgtctgagacggtcttgtcattattagtcagagactctgaaagtgaaagtgacagtgttttcttctcattgcaaacttttagctaactaaccactaggttgatgaacaaattggacactcctactggggaaggaaaacctgagcaaatttatccaaggatagatagatatgcagcatatgctccaagtacaataatgcaaaaggaaagcaagctactcttgcatagtgatgcactcgctctcctactgctgaatctagctagttgcatcaaatcgacttgaatacatgagatggagtaatatgcagggcatgtgggtgacgcaagtgggatggcctgaattattcgtagctgttggaattaaatccaacggcgacccatccttggaaggaggagacgaatcttcgtatttgattgcctaacacatctattgattatgatagtgatgcacatttgcaaactaggacagggcacacaagcaagtacaagcatgaagcatcaatcagagcggctgatttatacttacataaacgcagtaaacaaaaaaaagaaataaaaacatggcatgcgtaggattgaaacacagaaccaagcctaccatagaggttgaaggatgttacgtatagcgaaggttaaaaaaatatattcaaaagtacgaagcatagaaactgtgtgttaatttgtgatgcattctactactatacaacaaaactgcttcacaagggcacatgatgagcattcctggcaagaatatactaccaagttctgaagtcataagcaaatgagaatgtgacaagaatgtggaacaagagctctgtgatcccgtgtatctgacgcctgaaatcggcggtgttggctgcctggacggcgcgccccaggcaatgattgtgcctggtgaagtcagtgaatgctcgggcaatccattcgaggcgtcagtggtcaaccattctgtcatcatgttgcctggactgtagtccgtgtagggacgataatttatcggtcgtcagattcagacaccgcagatggaccacctgtacattccttccttcgatgaagctccagcatctttacctccgggtggcatagccctggatgatgatagatttgggaacatgttagcatgcgtcagctagactgaaagatcttaggcattagtgtccttgagaaaaacaatgctttgcaagtttcagaaccagcttctgcacaagcacatccctcacttttattcatcttcctaacaagagtttggttttttagtactatgcaatacttgtgcaggttaatgttaactttattgattctcagcttcacagacctatatgggctacggcctttgtgatgttgaagttgatcaaaaggaaagtgtgatgtgataatactttaagggccacgcaaatatatagataaggaaaaaagataattcaccaagcacttccacttcaaatgacatcaatataagagtcaagaaagtaaataacctgaacattttggaatatcccaaacagcaattgaagactctgtgcactcaggtgaacaaagtgcatgtgtgttctcatggttgacgttcatagcaagcatccaggatccaatagtaacatcctcattgctgaacatacggaaactggagaaacatatgtgagaatccattaaacaaacatataacgtgactcgatcgtggatgaagtttaacagtgatgcaaaatgaaaaacatgaatgcaacaacagtcttatgtacgaaacttctactgctgaagcccatgacataaccatgtagtatgtttactttaggctccagggcttctgagtttaatatatcgtgagcaattaatcaataaccacacactatttcccttcgctcttaatttgttgagccagaaaagggaaagttttgctgaaaagaaacaccacttcttttacatgagagggctaaaactaccaagaatagctcagaattgtgggaacaaggctaatatgaaagccagtaagacagcagtaacagtcaatacaacttctttacagaagtatatggatttgcagtgcagtagtgttgctcatgttagtcatacagtgagcggtggcctcaccatcactggccatcaaagcagggaaaccatagacccaaaccaacattgaatactatttcataggctaactggtttgagaaggcaagttgaagaatgctgcttcacaataagataggatgagtactgttaattacctgttgttcctcaaggcaaccaagcttgccaccacatcggctgataaagcgtaaataggcccatatgcatgaaggaagtattctgatccgagcaaaaaggattgtggctcatacctgcatttggaaaaagagcagaaacaatatgataagcagtcattgatgaatggtacatggaatatttttgctgtgtggaacaatagaaagtctgaagtccaaacagcatgtggtatactcagcatatatgccctcacaccatttgccacagcaacatgccttggttatagaattctgtctatactaccctaaaagctaagctaacaactgtcttaaaactataatagcaaagaggaaactgaaaatcacgttggagggaatagactcacaaactgaacactttgtgcttgcaccaacttgtaggatcacaagagtgcttgcacagctaagctagcaatattttaagcacagattcaaaaatgacagctgcactggtgaattggagggtggagcgtgtgacaaaatacaaaactgatgaaggatatatatgattttctttgatcctcgaataatactgataagatgttgaacctgacaaaagtcgttaggattcaggaatcctttatacttacatagttcatccccactaagtgtagttaatgctatttctctcctctcattaagccacatcaccccaattatttctagcctttggatgatagatctataatccaaattgtctcttctttcttctctcttaaaaacatgcaatctcaattatttttaggctcaaaattgtatcaaattgttttagttttgataatcaaattacatcttatttgtacatattatgcaacttaattttccgcagcaacgcgacggagtattcatctagtttgggatacatgcgcattaacatctgaaaaacaatcaagtaaacacgttccttgctaatcctttccttcgccttccaaccctacagatcaagtgcttgctttacacaccatatctagtgtggtctgtgcttaactttatgagaaaccatccggatattgaggtaccagcagttctggttttgtacaatataacatactccctccgtttcacaatgtaagtcattctagcatattccgcattcatattgatgttaatgaatatagacatctatatctatctagattcattaacatcaatatgaatataggaaatgctagaatgacttacattgtgaaacggaggaagtaaacacgtaattacgaatctgaaactgagttattttcagttcatatttatacagtgatgaaatattttttgacaccataaaattattaacttttttgtggaggtgtgagggtcgcatctggacgaaaaaatttctttattatctaatttacatttgcttagcatgagccacgatgctgtatgcatttcttcatagagttaaactttctcaataaaaaaaacaatatggcataaaaggggttcattatgtcatacaagactaaataacagaactgaccatttcagctttgggtcagtaaaaacaggccccttcttcatgcatccaatgtatgtttgtgtatgtgaacgctccttagccaaaagcaatgaaagtctatctgcagaatagatatcagtaatgaaagtgccagccattaaaaaaaatatgatatccaagtcaaaatctgtaagaggatatgtagggcattggtatgcacctggtctcaagtagatatcatcatcagctttaacatagaagtcagagtcatacaatgcatacgcagccttaaagtaagctaacctacaacataagaataaatcagcatctttctgaagaaataacaaaagcatatgataatagttctgctatttacgttttgtacggaagcttgctatactcctcctccagatctaaaagcacgaaatcatcgtattcttgaacctctctttctaaagctgccatcttagacttgtcattactttttccaatcacaaatctgaatgccagaccagttgcttcctccaatctgtaatacagtgaacacaaaaatacaactattgtaatggcagttagccaaaatcaccattaacggaaactgaaatacagaaacagagatggtgatgatcatctctttattaagaatggttggacttttggacaacaaaagtccacttaggctgaaaccgaagcaaaacagttaatggctgctcatctactaggcagcatggagctggtttcagctggcaggccgctttagtcaaagtttattgaacctacgaattaaatatattccggaacctccatgtgcattttcatgtacattgtagacttatagttggatctcacgacataagtactagagaaaaaaaaaactaacaaatccacatgatcaatcccttcttcaagaatagcagcataattcttcctcgaaaacaatgagaacagatggaatgaattaagagcaggtacaatagcaggctataagctagctgtaaacatattttaaagagataaaggaagagagagaagagcagcgggctacagatttgtagccagctacagcacggactccaggacataatgtgtgtatggtaggtgggacattgatagtatagtaagcaactattgtatgaattggctattagattggctatagatgaattagagctagcaatgggccataccaataagcagatctcactaaagcaaatacaaccttatagtgatgagtgatctctatctcatgtttatttgacaacgaaccgtaaaattacatctaagatcatagaaatgaacaaattagattacctacgtactaaaatctaatcagtaactatttccgctccactcccgtaattaggtaaccagcaacatcaacagttgaacacctaaaactaaagccagatctcgagcaacacaagcagacacgaactagcaaactgtgataccagcgactaaccgaaggagaccctgccgatccgcggggagccacgtccgccgcagcgcgcgtcgccgcccgacggagccgaacccggtgaagatcccgacgaaggccatcaccttgtgcctcccgcgcgacccggtggcgtgcgacgccgggagatccacggcggcgcccgccgccgccacggccccggcggacgcatccccgggccggcggtcccacgcgacggagacggagagcgggcgggaggagtccgggcagcgggcgcgcggcgcgctccccggcgaccaggagaaggagagcgcggcggcgaggaagcccgcgaggccgaagaggaggcaggcggcggagaaggccggggtggagaggatgcggcggagcgtggcgcggcgggaggtggtcgccgaggagaagaccttcggcgagctcggcatggcttcggcgaactcgccgccgcgccgccgcgtgggttgacggcgaggcgcgccggatcggagccggggggagacgaggagggggaaggggtggtggtggacgctgggtgcggccgcgtttgctgcttctcctcctttttgttttgagttggtagagagagagagaggggctgtgttgagcccaactggtagcccactaagattcagcccaagatgatttcaccggcaaattttggagggctgtaattcgaaatgggcctagaatttcgttcgaattttatttgaaactggaattgtacgtgatccttctgttgcgtattataaaacgttttcgttttgttctcaatcaagtttaatcaatgtagcaacaagttcaaaaaaaaatgtagcaactcttgtagtacaaaacagatatatctctactattataaaaattaaagttgtttttgcggtattttggtacgtcgttcgtatttgagctgattttaaattcgttcgcttttgaaaatacaaattcgtattttagtcggattttaagttcgtttccttttgaaaatacaaaagaagtcatataagaaatcccttttaaaaaacttgcatgctaacttgagatgaatgttgaactcctaattgcagctcatgattttctagaaaaaaaatatctaagcgaattcccacagtggatttcaccctagccaaaccgtataacaataataaaaaaattataatagcattcacccgttacaacacacgggcatcttttcaagttataaatatatatattattcggtcgtagatttaatgaaagtaatctggtgttctatatgttaatatatttttttttgaaaatctttggtttaataacttgaataaatttggcttgggataggaacgaagggagtatataattattttttctagttgcacacatacaactattatcttctttttttccgtttacatcaaatgcgtactcaagtgcttctcctaatacacgttcagggaaccggagatgaacaacaaatcccaacaaactgaattttattcaaatccacagcgattacaatggtaaaaccaagttacaacacaataattactgtattcgagccagagaaaattgtccgacaaatcaattgcagcacggttacatctctgctagctcttctgccgccgtcagctaagttagcttagctgcggcgcttggtcttgcggtggtggtggtggtggtcgtcgtcgtcgtcgtcgccggcggcggcggcggctttggcgagctcgcactggtcgatccactcgctgtagacgtcgatgggctcggtgagcgcgtgggcggtggtggagtagcgcgcctggcagacgaagcaggaggcctcggcgatcatgtgcttgatgtcgatgctgcactccaccgcgccgccgtggtcgcagaacgggcagctgaacgccgtctccagcttcggcgccgccttcttcgccgtcgccagcatcttcgacacccgagacttcctcttccccatctccgactccgacgccgacgatgcccttgctttcttgcttctgctcccggcggcgaatcgatcggcgaatgcgaaacgattgatcgagagagagatgcatcgtcgaggcggcgccgcgcgtgcttatatcgggagctcttcccagttcgcgtcggactcggactcggactcggactccttcacgaacacggcccgcattaagcaaattaagtgtccaattagtacggactaattaaaatcatttcttccatatcgattttgcaaatttgcagttcgttctgcggctacacttgacttggatcaagagatgatgattaattgattgattattaattaagcctagtgttttcttggtttggttcatgcatccatccatggcggcggcaggtggtgcagttgatcgatggttctagtggtgcaggatgggagggtggcagtagggtcccctgagccagccgccggcgacgagccggttcgccgcctccgtcgtgtggacgccgtcccagcacacgtgcctcgacgggtcacggcacgccgccgcgcccttcatcccgcaccgcgcctcgaactcgtagttgtactccccgccgccggcgccgcagcacgccgtcatcccgctcctgaaccctgcgccgccgccgccgccgccattgccacccccatcacatcagatcacaaccaccaactcaaaccaaacatgcctctccaagatcgattaatcgttaccgaagcgcgccggcgtgtgcagcatctgggcgaccatggtgtagtagtcggcgtacatgatcctcaccggcgccggcgccgccgccgccgccgacctgtacctggcctggagtccggcgagcctcgcctgcagcagcgcgttgtggtggatggccagatcgttgagcggccggaggcatccgtgctcgtcgtagtccgactcgttgctgctccggagcatggtcaggtagagcgggaagcaccccaccggcatcacccccggcaccacgatctccgccgcgcccatcgcaatcagcttctgcaaacgattgcaatcgcgcgcgaaagatcagatcgaccaagaaagtgaacaacattttctggatgattcattggttggttggttgattgcctcgacgccggtgatgatggtgtcgacgatcttgggcgtgtaattcctggcctgatcgacggtgaagccgaagaacagcatggcgttgtagtcgttgccgccgagcgagccgaacaggaagagtgacttggacaagtaggctctgcaacctgatgaacacttagagtaattagctcgtgagcgattgattagctgaagaaaaaatgggagtaattcgatcgatttgaattttgattcagatttagaatttgatttttaccctgtggttgtgtggcgcagatggaggggagaagatggtggaaccactggagctggacgttcatggcgccgttgttccagatcgggtagccgaggccgatggacttgaggaagtcgaagtcgagggcggtggcgccgacgatggccatgttggcgcctcgccggaagtcgccgccgccggcgctccgcttcgacggcggcagcagcggcaaccccagctcctgcgctgcattggcaatgcaggcgaatcttggcatcaatcagcaatggcggcggtggcgacggcggcggatgcgtgtgcttaccgaggaagtcgacgacgaggcggccgtcggagcagcggcaggtggggtggccgaagtaggtcatcccgtacggcggctgcgcgaacgtcagcagcagcgtcgccgccgccgacttgttcacgcagatgttccccgtgtccgccagcgagtccccgaacacgaacatggcgttgtacttgcacctcatcccaccatcgccgccgccgccgccgacgccaccggccaacgccggctgcacggcgcaccagcagaggcagcaaaccaccagcacgctgccgacgacgtcgacggcggcggcggcaagcgcgcctcctcgccgcgccatcactcgcaacgccacagctcagtgacgacgcgagacagtggcatacttacattatatacacttggtcttggttggtttaatgagcagtgacgtcacctcgccgccattgttgctgtgcttttgtacacacgtacacgtctgatatctcgtcgtcatcgttgggctaaggctaagctgcgcaacgtttgcatgttgcaaccgatagaccgggctgggccggcacgacaaggcccatgggccttactgggctatctcggccggaaagtgttctgccgtaaagtaagttcactttgactcccttaactagaggcttaatctaattcgtatccctaaaccacaataccgggatatctcgactccctaattactaaaagagaaagactacacaacggtataccgttgaatggtataccgcttatcccccatgacgcggccccgcgtgccggcttctcccgagtatgtcgcgtgctgctaggattatcatcacgcatgtttgctatgtgtatcagtgtatagtcttgttcctgacagctagctaatacccagcatgcctgtcctgcctttgatactagcctagctattaaataaaaccgaaagtactactagcttgctgtgcatgtcaaatccctgtaatagctactagtagtcccgtaccctagccatgtagggtacttattatggcagagcctagtagcctagctatgtgtttaagatgggttgcatctatttgcatgtgtcctataccatgcatggattagaccagacaaataattacctaaattatatatggatacaatgtattctaattagatatgtcatgttgggctcttggttataccacatcttagaaactctagtatgtgatatatagatgctagattatcatatctgatatccaagtactgggtcgaatacctaggtaccaagtatgaaacctataaatacaagatctgatgccgagttatcgggtctgatacctataagtaccggatccgataactaggtatcgcgtctgatacctatgagtaccagatcggatactcgggaatcgggtatctgatctgatacctatgagtatttgttctaatacctatgcgtaacgggtcgaatacccaggtaccgagtatgatacttatgaataccaagtctgatacctaagtatcgggtttgatacctatgagtaccggattcgatacctaggtcaggtttgatacctatgagtaccagatccggtatctcgtatgatacctatgagtatcggatcggatacctgggtatcgggtatctgatctgatacctatgagtatcaattctgatacctgtacgtactaggtcggatacctaggtaccgagtatgatacctatgaataccaagtctaatacctaagtattgggtttgatacctataagtaccggattcgatacctaggtcgggtttgatacctatgagtaccggatccaatacctatataccaggttaatacatattagtagcggatctgataccaaatatagggtgtgatggtaggagacttcagacgtgataccactaattctgatatttatgggttatatacttctattcaaccatcaaataaaaagatggaccatgcatagctaggccagaaagtacagccaaacttgctcatgtgccgctgagtgcttaattctaacttgctgacatgctttgtttaggctcatgctactagctctagtgcttaattctaactttgctagttgaagcaggtgtgagacccatatggacctaaagaggtgtagaagtagtgttgtattagagtatttcatagctattttgtactgtaggagaaaagagacctctcgtcagtcgtcactagtcagcagcctccatgtgaaaggacagcacacgacatgctttcagagagaaagaatcgatgagtgattggtaagtataaattataaactataccgttgagacggtacaccatcccatagtttttctcttattaaaaccggtacaatttaactcggtggttttcaagagcggtttcgttgatgtggcgtctacatgacggtattaatctggcatgtggcattgactttatgccatgtcaatgccacagaccaggtcaacagtgccacgtggacgtcacgttaatgaaagcatcctccaaaattatcgagggagttaaattacaccgatattaatagttatgagtcgagatatctagtattgtggtttaagcactggtttaagagtttaagagagtcaaagtaaacttattccttctgccgttgttgtcacgtacagccgtacaggagagaggaaattcggatggttattggtggctcatctgggtacacactacacagtattcaatggcgattcagagtactacacggcattgcatcattcaatcatatgcaacctggtagatcgatcagggagaaggcaccgcatttggaatctatatctttactcttcataaagaaactgattttaagccaaactttactctttagcatgtaacagtagtagtaagtacaggcttaaagatgcttaattttgttcttgcagaagagtttgttagccttggacagtaaggtggagaagccaaaataaaaaaaaaaaacagacagaaccaaaagggatcctgcattattttggtttggtatctaaaactggggtgcatgcatcatattcagacttaaagtttggccaaacttctttaataaagaaactgttttttttttccctgtaaataaactccaaagcaacatgcacagtcactcactctgtgtagcatagtttctgtaccagaaaaggaggtgaagcattcattcactagttccatacaagcatgtggtcatgcgatccaggattcctaacttgtattaaagtttttttctttctttttttgagatggcagcaaaccaagttgatgagcttagataagatcttgctcgcatttatgatttcatccggatccagcatgtgcgtatgtgaccatctccaaccaaaccatgcaacaaattactaagatttaattaattaattgcaacacataattaaattgcctcccaatctcatacatactacacaaatgtgcattacctaaaacaaaaacaaattaaccacccacaacgaaaatcaactaatcaccatcttattcatttcccagtcgatcgcaagatgtcttcttcttcctcttgctatccatttttcttctcttcttctgctaaacaaatcaaatcagcagcagctagccggccatcctccggccgccgtcgccgccgccggcgatgatctagggcatgatcggcgggtggcagtagggcccgttgacccacccgtcggcgatctgcttgtacgccgcctccgtgagatggatgccgtcccagctcaacgacgacgacgggttggagcacgcgtaggctcccgacatgccgcacctcgcgccgttctggtagttgtacttccctcctcccgccccgcagcacgccctcaaattcgtgctaaaccctgcgcaaattcatcacaaaaaaccgtcgaattaatcattcataaacttcaaaccatccaagaaaatccgctactatcgctttaccgttccagcagaatagctcatgcgagcatggattcagcacgatatcataggtagcagacctggtacccgtggtaccagataggtaccaagcacgatatcacgctaacgtcataattcgtaccagaaatactacaaaacgatataccgttctaatggattagctgacatcatgatgacgttaacacgatatctaggtactagatccgtacctacgataccatgctaatgtcgtgttgatgtcagctattccattacaaaagtatattgttctgtagtctccttcaattggtacgtaggtgtcatgctgatatgggctattccgttggaacgatattaccgttttgtagtgtttgtgttgaggattttttttttcttaccgtagttggagggggatttgaccatgtcgtagacgtgggagtagaagtcggcgtacatgatgcgagcccaggggtacttgctctggagggaggagaccttggcctggaggagggagttatggcgggaggagagggtgttgaagcgggtgaggcagccgtactggtcgtagtcgccggcgttggaggtgccgtacagcgtgaggtagatggggaagcagccgacggggagcacgccggggacgacgacgtacatggcgcccagcccgatcagctgctccacccccttcccgatcccgtccacgatggtgccgctctgccccgccgcctgctccggcgtgtacccgccgaacagctgcgcgttgtagtcgttgcccccgaactcgccgagcacgaacagcgacttggacaggtacgtcttgcaagctgcacgcaccagcagatcagaatgagatgatcggagttcatggcggctcgccggcggcgaggttttgtgggggggggggggattacatgagccgcagatggagggcatgagctgctggaaccactggatctgggtgttgagggggccattgttccagatcttgtcgccgatgccgagcgactggaagaagccggagtccatggtggtggcgccgatgatcgccatgttcgcgcctcgccggaagtcggagccgcccctcttcgacggcggcagcaacggcagcccgaacttctccgctgcaaacgcacgccaaaacagcagtgagcaaagcagagtttgctctgcttttttttggagggaaaatttgaaaaaacaagaagaaacaaacgcgcgccacaagaatcatcggcggcggcggcggcggcgcaccgaggaagtcgacgacgaggcggccgtcggagcagcggcaggtggcgcggccgaagaaggtctcgccgtagggaggctgggtgagcgtcaggccggcgggggggccgttcacgcagaggttgccggtgtcggacatggagtcgccgaagctgaagatggcgttgaacttctggccggagacggccacgaacatggcggacgcaaccgcgaacgccacaacaacacgcgccgccattgttgcaaaggtttagattcagctcgagctcgatgaccaacttgatggatggatgaggcaatgcaagatgctgcagggactccgtgagcttatatacacctcgctaatggtaggttagcacgtagctgttcgccattagcccacctcgagcttaaacttaactactagtctactactgctagtctgctacgaccaccttcaacttactcacctggttgttgtgcatgaattgcatgcatggatgaacagcttttgatttcttttctcgttcatctctctttccctcctgtttcctactctcgtgtttgatcatatcagtatcgaatctttgcctttcttttggtttctacacacttttgatgcaacatcttaatttgtttttgatgtatgtgctttaatttcctttttgcataagatgttttctgagttctgacaatttgctgcctgatcaattgctaacagtttgattagtccctgtgtaatttagtagtactgctttagtggacgcggcaatgtggcttatattttcgtcgtcttttcattatatgcgtaataaaaactgaatgattgaatgtgtgtacaatacatctgagttggaccagcatcgctggtgctactctaggacagtatgtttcataattgaaagtttgaaaagaggcacctaatcatgtattccactgacttattttaacacttggaatagccttttggattgattatttggcaagtacaaatatactaatgcctgcagaacaattttcattttttgtcgaacttggaagtgagtgattagtaaattaagtaggagtactaatgcaacctgaggctgtcgactctgatgaagtatccatgcattctggatgtcactacatgtctacatgatgtctgcttttgcttctcagtagagaaattcatgccattactgtttgagaactgaaaaagatttaatttgggatctgaagaaacacttctccttatttactactaccagcattagtcttcctgaacattgaattgtgtacttgcaggagtggttgctattcataactgtcaatctgtcatgcatggtgttattgacttgcctgtaactgctgaaaaagctttttagtatttatcaagaactttgttaggtaatccaactctatcatccaaaacagcaccctcgctctcatctacatgctgcatgattccacaaacgcattatgattgtcagatagtcattattcatatcagtagccaaaaagttatttgcctgtgatgaaacagaaagctagtctagctaagatagttgcttcatttcagcatcatccagctaaacagcactgatcatcacctcccttgatcctttgtgtcaattagacgtcaccctacctttcttcctcctcttttccaggattgggaaactgctagcaggtcaagcagcattgtcagcaacagcatgagtctgcatctactatcccaaaattatgcgcatgatttatatagttaaaaagaaataaaaaaatatagttatatatgtataccaactctataaagatataggggatgctttaactttatagggaagaatttgaagtggtggttatatttgtagtacttgaatctccattgatgcctacacttcaacataaaaaagtagggcacaacaactccaattagttcagtattgggcaaggcagtgacatgcactggctattatttggggataggttggatgccttgtcaattctttgagctaacttggcactggatgagtggatgggccatgcagtcagttattagccaaagtgtgagaaaactatgtttcttttttcttaaaaaaagtgtaactgattaactgaagcatcagttagtcagactgtttgatctaatatcaaccatcatctgctgtcagtttgtcacagttttgtcactcataatgtgtcaacctcagagaatggattaagctgtgacatatgttgtttgttcagagttcaggctaatccagagagagaaataatatgccattgtgttaccatcattcagatcaacatcttgcaacaatatatcatgcatttgctgatttgctttgcatggatggatgcagataactccatcatgcatgtgacatgagcaaagctcaacaactactaattaatttacaagattatccacatgagacctctgtctacaagaccaatgtcaaagcacatcttttgacaacttcgattccttattcctctagctgtcacacattcccaggaggaaagctcaattagcatctaatcagtggatcactgtatttgtttaatctgtcagctgtaattatctgcctgctaactcagtactactccttctggtttcctaataccaaatcattaacttttaaatacacgtttaatcaacattctcatttaaaaatcttatacaaatatataaaaaatatatgtcacatttaaaatacgtttaattataaaaacaaatcacaacaaataaatggtaattacatattttttaataaaacaaatttttggataataaaaataaattacatcgtcggtttttattataagacatacaaacattaagtttttttaacaaataaccaatcttaaagttaatatcatcgtatattaaaaaacaaaaaatatcatcgacgaatcggatgagagaagctggcgagtgtggtgtagtactagggtactcgcagaaacgtctcgtttcgctaacggacaagcgctccagtaccacgaactgctgcagcgactcgcagcgtggacttgatgcagagcaatttgtgcaaaatggccgtcgttttctgcggcatctgatactgtgttttgcaagcgaaccttccaatgtaactaactcactctctctctctcctgctaacaactcaatttcccttttctaacgccctggtttagggtcgagttgaagcaaccaaagagctttggtactctgcctgcaatttgtggttgatgctgaaaatgagatgtctgaaactctgaatattcaggtataaatatgtttgctagctgcaatttgttcgattaagagaatttaattttaccgatctcgtgaagtagtgtttctactaccaatagatactactgtaaaacggtatacctttttggtggtttctagttgcatcgatctaatatgttttgttttccttaaaacctttagctgatgagctttcctctgtccttccatgaatcattgcttaatccaccgggtgacatgttcacatcatgagctggagaattgaattccaatggatgatgcatggatgcaaccgacgatccatcgatcgagacggtactaaatggagaatattagtgcaatacgtggttagctgcaacgacgtgcatgcataatgcattgcatcctgggagggtacagctttgtgtacattgatcataagataatccaaatgtaatccaagtgtccaatagcctcacagtttcgatcgaaattgacaggttgaaaaatagcaagagcaactcatcactcgcatgatgaacgtgtagtgctatcgatcaacagtcggcacaaattggggcggttaatgtgtcaagttcagagatgaatctggcagcaacatgttacctacctggaagcgacgtccgttgattaattaattggtttatttagctttaaggttgatcctatcttacaggacaaaaatggacggttaaccgtttgagaaaatctataaaaagcaatcgattataccagaggttcagtttatggatgcatctgagaaaatctggacggttaacagttcattttccgatcagacggcataagttcttctgcctcagatggtcgaatcagaccagaggtataaaacaaatacactagaaaacaatgttattttcgaatagctctaataatctgaaaagaactcaaatctgatgggtgcaatcaaaccctgaagaatcgaaccggacattcacgaagaagaaaaatcaatgcgagatcgcccgagaccgatcattctggtgaaagtacattgcatttacatcacatggatggatggatggatatccatcctgcagagagcctgaaacctgtagctgaaggaggtcgatctacagactacagctgaggctgcaggaccatggttagctgggtgtccggcacacagtggtttcatcacttagaaagttcacagggatgcctgaattgctgactcgataggcatcataacagctgagattaattgtagccatcatcatcatcatcatgccaggacaacccaactaactgttttacatatgtgttcttttaactctttttctttcagcatgttcagatcagtacttcagaccattgtcaacgggagaaacagggaactaatctacatcaacattgtttacacatgtgattgaatgctttgcagagagcagatgctagttgctatctcatttttagaatgtaagctggttcggttttgttataagtcaaactttttaatttaaatttaattaagtctatagaacagacgtaataatattttaacactatatttaataggaaaaattgtaaccataccattataattttgtaaaatttgagatatgacatcctgacccacatgtcattgactcatgtgggttctacatgccattgagataccgatgccatatcttaaactttgaaaaattataatggtatggttccaaattacctatttaataagtgtctgaaggaaacgatggacttaataaaactatttaagtcatgtagatgtcattacatttttcgataaattcagtatgaaaaaaacagaatatcatcttaccttctaaaccggagagaacagtagcagcaaaaacaagatgggccaagctaatgaagtaaagttatacaacgaccaaaggaaaaggattaaaaaaaagacaataattgcttactcctacatggatcatggatgcatgtaggtgactgcatttctgttggaggtttgctgctgctgattgatgacgaagtttgattcaacttcttctccttcttcattcggcagtcaacatatatatcagtcatcagtgcagacggtcggtggatgcaggtagctgtgctgacagtgtgtatagtatgtaggtgagttggatgttttcagggtcactgcaggtggtgctcgttaaggcttaaatcaataattatcgatcgcgtacacgtaaccatcagcttttgcatggcttaacatgcatgatgcattattacgggtataaatgtgtaatcagtacatgtaattagtcaacacggctagtatttagatctttgtttagatcatggaccatctatgattcagctagctaacctttggtgctctggagcagtgtgcgttgctttcagtaaaggtaggcaggatgttgattagtgaaatgtatgtatctgtctatatatactacgcatataaaatactgcatgagtttgtcggatttgtcattgtagtgcgtacgtttgattaatttgatgttaaaatcaaccatatcagattataatgccgtaatttagaagtatgcaggttatttagttgtacgcttgatttgaagaaaaacgtcgaacggagttttatcatttagtaaaaaataatttattacttactaaaaatatttcaaacagatgcaacattaaaaatactaattgcaacactaaagtaaccactgcatgcaacatcgaagaaaaccgacactacttaaaaacaaagtgtttttcctgacggctactttgcgttctctatgacggccggcgctaccgctagcaactaaaggccaatgaaaatgaaccatctttacaggcggaacttcaccacagttaggttacgctgattgttagggaaaatgatttttgatcacaaaataaaaaatcacaaatccgatgcctggccgccaggaaaatatgattttcgagcgaaaaagttccgcaaatccattgttgtgcccggctccgccgctggatgcgccggttgcaccccgagtcatcgctggatccaccaccccaagccgccggatccacagtccgagccccaagctgctgcctgttcgccatatgtgggataggggagggggtggaaaagccacgccgaagcccagacatcgcgttgtcaagcaccgctaccgccatattcgtcccctccaccgagcaccgctgctggagagaggtgaggtaggctggtgtgactggatctcagagagagagaggggggtgaggaagacattggatttagagagggttggagaagaggccgcagcagcggcggtgggtttggtggtggcgggggaaagggaggagcgagggagaggagggttggtggtggccgctgcaacgacagtggtaggacgtggtggaggagagggagctgggtcagggcggtgacggatctgccgccgaacagggtcaccgctggttgtggatgctgccacccatggggaaggaggaggagacaggcgcgctcaagctcatagtggtgccgatgaggaagaagaaaaggtaacggaggagggaggatgaagtaaaggagaggggacttaagtatcggaaattttttttaaaaaaaaaatcaatatagctatttaaaacaactgttttataatttattttacataataaaaaaatagtttagcagtttgaaaaatatatactcaaggaaaacgaagaatgaagtattgacggtaccaaccgccacaaccaagataggggtcaaatggttgcacgcccagctcagccaacccattccaaaagcagaatcgtcttgttaggcccagaccgctccactgtcgacgtaggcctcgtcggccgtttgctgttgtactcggcacaggtccaggttcacatcaacaatcgggtatacgcatctgtactggtgccattgtgtttggcaatttttttgtctaatcgtatctcgcgttccagtattaattatcagccatccgtcctcgtgtcgcaaaaacatgatagacatgcagtttaaagtgtacgattatgtttacagcttatttgaaaaaaaaatgattatgtttacactacagtgacgtccaggataatggtcaaaggcagcatttgtccagatcagcccagcccattccatggtatcttacctcaattacaaaataagttcattttaactaatctcacatatacaaatacaaaatctcaaaaactagaatattcatattttatcaaatcccaatataatttctctctgtccaaaaatatatgagattttggtcggatgtgtcccaatctaagctagactcttctgttcagactcgtagtataggatgtgtcacatccgactaattttttttattccccttaaaaaaatcttttgtattctaggatgggtggaattttgctcactttatctactcccaataaatcattccctactttcataaattcctatgcaatagttactccgaaaatacactagtgtataactttgagataagcgaaggaagctactccaagtcataagtacaaatgaacttagtatagaacgaatgatacatactgaaataaagaaccgcaccaagcgatgaatttttttaatttttaattttatttattaaaatatttacagaaataatttttgatttgaaaattttacaaaactagtcgtccatcgccctctgggagagcgattttactaacgtggcagaaagccgatggccctcctgtaacggttggccaccgagggatgggaaatttataggcggcccccttatagccctctgggagggcgactttttactgtgcagggtctgcctgcatagtagaaaatcgtccacccagagagctaaagggggccacctgcaaaatgtcacctcctcccgtacagtacaaaatagccctcctagagggcagtaagggagctgcctgcaaaaatgccaggcagccctcttagctcttttgcaagcggccctctagagcaaaaatcgccctctgggagggcgacaagggggcggcttgcaaaatttcagcgcccttggtggctgaccgttatgacaagccaacagccggctaccacgtcggaaaaacgctctctgggagtgcaatttttcccagaaagcgatgggcgactagttttgtaaaattctcaaaccgaaaattatttctgtaaatattttaataaataaaattaaaaataaaaaaaattcccaagcgatgcatagcatgacccatcagatccattttgttaggcccagatcagaccactccactcgtctacgtaggcctccttggtcacagcggccgcccacttctgcccaaatcgcatgtcccgtccaggttcaccgccacaaaccggccgggtggacgcatccgcactccactccactccactccactccactgcacgccaacgcccaagcccaccaacccaagttgagtcgtggcccccccttcgccctctcctcgggccggtccacttttgcggccgcgcccgcgcaacgcggcctctctcgtgacgcgagcccgattcccccgagccactgcacctgtacccgacgcgcgacgcggcacaatgcccgcctcacctgcacgtacgccatgcctcccacccctccgccgctccgcgcgcccatgtgtccaagattccggaaccgacgacgtacgtcgacgtacgtgagccgccgccatggattcgctgcctatatatacgcacgcgatcgagctgatcgatcagtgtagcgatctacgagatgaggccgtcgatcgtgctgttcggggactcgatcacggaggaggcgttcggggagggagggtggggcgcgcacctggccaaccactactcgcgctccgccgacgtcgtgctgcgcgggtacagcggctacaacacgcggtgggcggccatggtcgccgcgcgcgccgtcgtcgccggcgcggcgggggcggcggcgccgccggccgccgtcaccgtctgcttcggcgccaacgacgcctccctccccggccgcgccagcgcgctccagcacgtcccgctcccggagtacagggacaacctccgcgccatctgcgccctcctcgccgccgcctggccctccgtcgtcgtcatcctcatcaccccgccgcccgtccacgacgccgcccgtgtccggtatacacaatcgctctcatcttgcatcaattttattggttttctcgatcgtcgaacacaatgcaagaatggatcaccaatggcgcgccgccgcgcgcgtgcaggtaccagtacggcggcgattgcgccggcttgccggagaggacgaacgagtcggccggcgcgtacgcgcgcgcctgcgtcgaggtggcggcggagtgcgggctgagggtcatcgacatctggtccaagatgcagcgattccccggctgggagagctcattcttgaggtaatcaaatcaaagcaaatcaagcaaacacctcatcaccttgttcttgtgatgagctgctgagagcaagtttagtactgtagctaactactagcctcaaatcacgttaacaactaatttatataataattatctataaacatatactacattattaatatatgatcccacctatcatatatacattatgttttggagtccgtgtttcaaatagctacaaatctgtagtttgccttttattttctcttctattttctcttctcaatatgtgtttataattggtttatagtttactgttatacccgctctgatgaaatttggcgcgaaatttgaagggacgggctgcacctgacgccgcgcgggaacagggtggtgttcgaggaggtggtgttcgcgctcaaggacgccagccttggcctcgaagcgctccctgccgacctgccgctcttctgcgacatggatccaaacaaccccgtcaagtccttcgacgaatgactcatcatcgcaaaaaattcgcattactgatttgagaaagagaatttgaattccttttcgttgcgttttttttaatttacggtgctatttgctggagaaatgtttgaggttataaatgtctcggttattattgttttgattctttagaaagattggatgaataatacatgtatcgaccgtattgtcatgtaatgttttctttggacaatgaaattcaatacacgatcgagctgagctttttttaagataagagctcctgcttacgggccattacaacaagttcagaaacaatgatagcaacacacggctaatggtgaaggtacattgtttaatttggtggacttgcttgtaaaccgttgcaacttttgtcattctgaccatttcatggatacaaggattgttaggagaaatgaacagcccataatatgtttttttttaaataagggaggccagaggacttcgccgggcagaaacaaaccaaataaaaaaatattggtacacgctgtgaattggattaacgtccaaaatagcctaatcaaatcgtttctcaattcatacttactccctctatctcaaaatatgttaaccaagaatgtgactagtgtcagacgtaacgtagaggcggagaggtctttaagcctccactgtttgaaccatggaagcactccaaaaaatatatatatattgccacacctccattgaaaggcggggcttggaccttggagctctattttagtttcgagataattttgttcttgtctccactttgatgtctaatattgattttgcccttgttttttagggttttcgtttttacccctacttttttgaaacgaaacaactatttgccccagttccattaattcttactaatggtgttaaatgtagggttaaaaagacaattatacccttagatattttccggtacttttgacaatcaaaacacaaattgataccatactatagcagtaatttaatttgtcaaaattttgtgaaagtttgccaaaattccttatctcaaaatagggcaattgtgcaagtggtgtacagaagtatcagaatcgctctctctctctctctctctctctctctctctctcctgtcctacccaattcccaatcttgctctcaagccgtagcactcagcatcgcagcggccgggacaacggcgacgaggcagcgcaacgcaacggcggaggaggcgatgaggcgtagatcccccccaggtggaggtggtgaacgattgaccgtcgacgatagaccggcgatgcgccgaggcgcggccgagcggagccacaaggcagcagagacgacatcagggccactgtctagtgtcgaaggctccaagtccaagggggaaattaatttcaagacttcaaggtacataaaatttgaaatcaatatcaagtccagttgtgtggtaatagttaaagttcagtgctcagttaaaatttgaaatcaatttcaagtccagttgtgtggtacggagtaatagttaaagttcagtgctcagttaaaatttgaaatcaattttatgcttgatttaatgctttctgttgctactttgctgctcacatctcaccaactgagtcctataacaaacctcactcatcaaatccaatgatccagaatcatctaatccaacgctttagatcgtcccacgttacccctccccctccgcacgcacccctcctctctcagatcaatttcaatcgcgccgccctcctctctcggtcactctcctccccctcaaccgccgccgcatccgccaccgctgcctccacgtccccgatccacgctgcgccgtcttctacgccggtcgagatctccgccgtcgtcgccacgcacagccacctgagctgccccctccgaaatcgccataccctgcacctgagtcaccgaggtccgcgccgccaaaactccgtcgcgccaaccctccatccgctatccccgtcgccatcggccacctcctctacggctgtccctaccacgaagactgcctcctcctcgcttgcatcgtacatttgaaggtttccgcctcctgattctatccccgatcccccaaatctctaaccccaactctttgcagttcaacggagaaggccggtgtcttcttggtccttccgttctgatctccattcctttactccaattcccattctctgattttttttctttgttatttgcgtgtgagggtgggcccaccagtgattcaagggtattcagacgtatacccaagatttttgaaaaaaaataagtatatatactccatacctcgtatatgtattaaaaaattaaagagaaggctaaaacttctcattttgggtcctgttttaccatttcttctctattggatctaaatttcccacttccttccctcccctttcctctcagcccacactcagcttgggccgcaactagttcatttcccctccccgcttaggcacagcaaacccaaatcgggcaaaccactgaggacgtgcgcggtgcggcggcggcgtctgggcggcggcgactgcaccggctgcggcggcggctgccggctgcgtcggcggcaggcggcaccgaggcgagtaggtagcgcgtcgggtaggggtgggcagaaaaagaccgaaccgaaaagaccgagaccgagaaattcggtcattaattcggtcctaggtagtgaaagaccgaattttgttcggtcaattcggttagtctcctcggttaaccgaatggaccgaaaagaccgaattatcaaaaaaaacgtctaaatgcaacatacaatccactatgtttaataggattaaactctaattttcacatccctacttcttctaggcatgcaacctaacaagagtctttactcataagtgcttacaaattttttttttgatttttgtgttgaaaattttcattatttctttgcatatatgaaaatgttcttgaatttcggtcaagactgagaccgagacggaatttgtcggtcctaacattttttttcgctgaaattcggtttttacttttcaaagaccgaagacggagactggaattttcggttagaccgaatgaccacccctagcgtcgggcgtgcggcggtgactgcagtccagtctgcagcgtgctcgtcggcggctgcggcgtgcgtggcggcgtcggcggcaggaggcgccgaggcgtgcaggcggcgcgtcggcggctgcggccgtgcggcgtcggggttcgggccgtcaggcgtcggcgcgtcgccggcgtgcaggccgccagtccgctaggccaccacacaggtacgcgatgcggcggccgaacgaccacggctcgccggcctggcatggattgcgtgaggggcttgattcattgcattgatttgttctaggtagttcaatagtagttatgttttctggcggtgacggcttgattcattgatttgttctttagtagttcaatagttcactagcactgaaggattcaacttccttagttcctgtcttctttatttttcagtgtcaactgttaagtgtatatttattgacagattgatagtataaagctgtaaatattaggaatttagataacttagaaccataatatttaattttcggagtgtaaaatttatatatatgatgatagtatgaggctatatatgagctgctgttaggaatttagagaatttagagggggtgttttcttcgatggactatataaaaacaagaagcaagatgagcaacaatctacattcattggaagagaattctttttacaaggtaaaggatgaggacatcatcactcatttttaaaataccaagcatcgaaaagttctcctctaaactgtaagagttttttttatcattttaccattctccatcctttacatgttttatatgttgccactttcatatgtcgaataattagtacttatatatgttaaagaatttggacttatgatcaattctaccaatttataaagttatggccaattttgtgttctatatgctataatattatacaattagtaatgtgtgatattataccaattaattattggacttctggaggtaaaaagaattttgttttacccctacctattttgaatacccaacctctaaatcttaggcccaccccttagatatatgataagttcatttttgatgttcttattaaattctcaaaagtcttagcattgatctgaactctgatgaacatgttttctatatttggctttgttcaaaagattgctacctttcagaaggcatcttgttatcaggtagtgattcacctaagcatgttgctcatggtagctaagcatgttaccatcataattgtaattcagtacgctcaactgattctatgataaataatgaatccatttcagaaatatataataataatatatatctttgcttggatatttggttttcaagatatttcaacatttgtattgccaacatatatatccttttcttttaattgtttgatttacacgcattacgatattgtgtcgttgcattagcacgtgcatgttactagtattattctagtttaagaaacacaaataatgagattgcaagtcagccaaagaggctagagcagaagttagtcatttggatataattagtgacccagggattcgaaaaccaattgaagattatccacgtgagcatcgcattatctattggagaattgttttgtagggacaaaattgcttgcctatttttaattttatgtatgtgtaaatgtgtagccaatttatacatgaaacatgttaatttttttctagattcacccttgttttcagccgccatggacgcggcggaaggtggaggtggcggccgaggctggggtgacgccgtggttgcgctgccgtcgacatccgcagcagcaatggagggctgagagagggcgctcaccccgatgatagcgtacaaaggggaggaagaccttcgacttccagagcggccagggtttggttcaactggaagggaagtggttgtcaccaccaaccacttccatgttggcgtcgagaacgccacaatctatcagtataatgtaagtttcttcctcacagtcgcataatattctactcatctttagttcattttagaagcattcgcttatttcatactactactaaataaatcttgattttatattgaacattcaaagattcgttttttaataatactagttgggtgcccatgcgttgcaacgggcaaaaaaaaaaaactatacattaattttaaattacaccaattgaaatgatgggaaataatcattgagaaattttaatatagcacaaacaagaaatatgccataattttatagtcttcatatattagtaacacaaagagcaaaaatggttgaataaaacgctcgtaaggaagcacaaccatgtatgtaaatatttcaaatcatagttgtggttcaaattttattgtattggccgtaatcgtgaaactaaatagacaaaaccatccatagatatcacaaataatttttttttccaaagtcttcttaatagattgtgattttagtaccgacgaagttgactacaaatcttagtacattccacaatgtgataaattaatttttgagcatttttttccactgacttcatgattaggtttctatgaaccccgagccaaaatcaagagctaaaaaaggagaggtactttcagagatggtagagttgcatgaggagatgacttatgactgcaaagtgcttgcctaattgatccaggctgcttatgggcctctgccttctgtcccaatgcccatgacactacaccctccttttgagcagctcatcctcaagctgcaacacgatctttgttggctgagacaactccctaaacaaggcctaacatgactcaagccatgcagccgctgcacattgcttcaatccatccgcctctgaaaatcgtgccgatgcatgacgaaacaaagccatctcacctggaaatcgcgcccaaggttgtgtcagccgttgcgccgcaatcaccgcagtcgttggtgctagaggttgtgagccctaagaaacggccctgctcgtggcatcaccctgcatcgcggtcgccgacgacgacgtcgttgccaagtccaacgtcgaggttgagggcttcctggacctggccgttggtgacacgaatccacctgcctggacaacttgaagtgacgtggacacggtagtggttgctgatgccgtgtgacgatgaccttcgtcagatttgttgtgtctcctgcttcttccagaggtcagccgccatcttcgcccgaggcgatggtgccacagccggccttgtcatcattatactcagcaccatcttctgctgcactgccacctcttgctccatcgcgaaggctgccagcgggaacggctgagttgaaggtgcagtggtcagagatgttaacatcgtgtccacaacctgagtagaacttgttgccggtgccatgaagtcactagtcaagccatcgccaaacgacgtcattgctgtcctccttgccgaagaagaatgttgtccatctttgcctccaagacatccagcatctctaacttcttaaggatggccgtcagcttgtcatcgatcgacataaccacaggcgtaggagattctaggggtggggaggggggaggggtggggggaggttcttgtcaggttttgaaaattcgaggggagagatgtctggttttgagtttagaggtgttatttgtactcacctaatagttcgggtaattcgtacttttctcataatttaataatgtacatcttttgtgataaaaatgctactatatactctctccgtttctaaatatttgacgccgttaatttttttaaatatgtctgaccattcatcttattcaaagaaaacaaagaaaacaccacattaatatacatattgcggagagatacactattatcgtctgttacaaacttggtcattcttgtccttttaggccttcattactaaatacagagatgatcaaaccatttgtgtataatacgaagcatagctaatcttcttcctttttgaaaggggaagcatagctaatctgattgttcaaataatggcgaccacttggcagtggccgaaatctcaagaccgtccatacaactagaacagcctccacttgcagtagaactcccctcgttctgtggtacaaacgacatactcccaaacaacacatcctcagtgacatgctcaaggagatcattaacaccaccaccatgactaaagctcttatcatttgaagggctgttatacgtgaagaagcgaagcaacagaattccatcaccgtccacgcataatgtgaccgggggcaacttgccaacgctcaacttgccgtcaaatatcatgaattgtccccactgtacgcagtaacctgcaacaactgtaagtgaatcaaaacagttctctccgagatcgagtacctcaagctccaatgtgcccagtactgccttatcaagggcaaccatctccagagcaacagtgccacaatgaccagtgtcgatgtgccaacggtatctatgaagttctgaatagaacgatggggcatacatagaatgcccgtctatcaacactttatcgtctttcctttcttgacccttaatgacaaggtagtattcgatcaacataggcccaactgcatatatgcctctaggtggccaaattagaggccgtatcttattagagccctgtgcagtaatttgtgaaagaaacatcaaagttattagacatacgtgcatcaaatgttacaagaataaaatgaagtattaattctagtgcctaatcatctggtacataaaacacttgtcccagagataatatattggtgttttaaccactaatccctccatttatgaatataactgttggtgtctattactattttgactctgaccgcaaattactcttaaatgattagagtttgatgaatgagagcttcacgtttgtatatatttaagatgccatacactacgaaaatatggtgtacttttttttttctttttgcgacaagtggacaaagttaaaaaatgaataattcccaatgtcagttatttcaaaaaggagatagatttatgtcaaagtttaaagagcacaactacagaaaaggaggggacccttttaagacaaaaggtataaacaaaacaaacttagtcatgaaatctctcaccggccgaagcttatatggtttgtccctcgagtattgaaagacatgattacgttgttggttgtttcgtacatctctaaatgcaaatataccgtagatctccattggttcatcatggggggacgatacattcaaatcatacacctggattgcacgccgacaaggttcattcctgtggttgtatccatttacccaacgatttttccactttggcagctggggcactgcaacaggatttcaataaactagtattacagacacaaacaccgtgagtcattaacttgtatcctgcattctaaacattatacaaaatctgtaatcaatatttgtaaactatacttccacatgttatatgtaaagatatagttcaaacgtaaaaattaagttgttcactagaaataataataactaaatggacaaaggccatgtttggtgagattgagagatcctgggtagctaggtaagaatatggataaacaggggctgcctagcttttggtagctactactaagtcttagaatctccagcaagcatctggattatttgagagaactggatatgaagctctcctaaataggatctaaaaattgaaggaaaaaaaactatatatgatcatttgtgatttatacaataccttgcttatataagattaataaatactccaattatttactagaagatgtagcatgttaagacttacatagatgctccgtcgacaggatatctggatccaaatgacatggcccttcaacatgtagagacccctcaaaaataggacaaaagaaatcattttgtcgttgctttgcaattgatactgtgaacttcatttgctccataacctgattctcccatctctcctccctctcagcagcgtagtaaggatttccatcctcgtagcggaattcataccagtatccgtcgaaagaatcgcattcatctggatcaaccgagaattcactttcggactggtaattatcttctcgagggcaggcccagcctggaagtgtcccttgccattcagattcttcattcagaatagagtccatgtccttgccccagagccaagtgttgagcacctcacgctccaattcctccctcatcatccccaaatcccggtccaaatcgtcagcctctttctcctcctcctcctgctgcgaattcccgtcaattttactaaaacctactcccgacattgattcttggggggatttcagccacaaatcaacaagaatcgcgaagcgggacgggaccaaaaataatttgaatgcctaacctttcctccgtagcttgttggccccggctgctctacggattgggattgcgattggaaagaagcatagcagcatcgagtgtgtgtatgtacagtacaggagcaaatcgcttccaacacggactctgactctgagatgcattgcgaggcggctagggttttccttcctttcacggacgggaaagcagaggcttttagtgggcccagcccagcccagcccagcccaagcccgtacaagctgagctctttctcattgggctacatctcagaaaggcctgtttctgagactcggctcggctcggagccgacgtgcctccaccaccactcgtcgcacgagcttggcgaaggtggagggagtggctcgtgggcttcctccgcggccgacacggcttggcgggtgggcgggcagagccgcgtcgggtagcctcctggtggggcggagccacccccagctgcaacggccccagcctcacaaaggtgacatagggtgaatctcagccctagaaagtaaatccaatggctaagattcgtccacataatcacgagttaaaattttactcccaatacctgaaaatttactcctagtaaaatttttactcctaaataaatctgcgagtaaaattttaactcatgatgacgtggatggatctcagcagttggatttgttttggagggccgagattcacgctatgtcacattgtgacatgcctaccttatgtcacccaatcccaatccgagggagagagagcagtggaactgaggaagagataaggtggagactaaggataacatgtggggcccactttcattttttgctacatcagtgtctagtcagcacgagtggatcgggtcaaattgttacgtcaacaaaatcagatgtatatactgctataggatccaaattggatggttttgtatagtttaggggtgaagatttctggtattgaggataatggatgtcaaacaaactcagtgtaaagttgagtgacggcaggtgaacttatacctttacttgggcatcgggttgcaggaacggaagaggaggaggaccaacaacgcttcctcctcaagctcatgccttccacaaggaccatcatcagcgtcatcggtcggtgttcgcgtccgagctacatagcggcaggcaggaggcggaggctgacacccatgacgacgggttcgctggaccaccacaaatttctaaggctctctgatcaagagcccgaggagtaggttctatgtgagttttatttttttatgtcacgccatccaaaactatactcaacactgagacctaatgtgatatgattttataaggttatggatgtgttatatccgatattttgatttatgggtgattttgaaattcgacgacatggaacataaaagtgaacattttctttatcccatgtaaatagttaatatgggcagattgtcgtgaaggccgcctacattaactgggtgccaatgcaaacatcgtaaaaatggcacaacacgtgtggtcaaataatttactcgggcagtacttctctatgtctgctcaggtaataaagtatttttcctttataaaataatctccataaacttaaaaatcttgtagaaatttgaatttagatccgattgacacggtgagcacttctacgtgatccttgcggtattccctagctttaaaacggcatgctaacaacttgtcatggctacctcttttttcatttggttcttcacgggcaccggaatttccgtatgccattagctgcagttggagcaaaaaacacccatgcaaatagcacatggccttagacgccatccaacgtctagagatggtgcaaaagcaaaggcaacttacctccaccgagctgagcctaagaaccgccctaaaacacaggctgctagggctggcagtaatcgaaagagcaaggaaaagacatgcctcaagaatcaccaacatcaaagaagagggcaccaataccaggttttttcacttaaaggttaacgcgaggagatgaaagaaccacatccattgttttcacacaaggcggatgggcggtgacgcacgaggaaaaagagcgaaatgatatttgatcacttctaggggataattggaagacctagtccaagacaacggagttgaattgggaagcccaagagattcagccctcgatggaccttgctgtccaatctgaaccattcactgaagaggggatttggaaagccataaatgcaatgcagtagacaaagctcctggacccgacggcttcacggtcaatttcttcaaaacctgctggggcatagtaaagcttcactccatccatgatcagagatgcaatgatctaaaccttctcaactcggctaatactgttctattaccaaaaaaggaaggcgtggagagtagcaccgacaataggccaataagcctcatacacagcattgtgaaaattctcttcaaggtgctagccctgcgacttcacctggtcatgcaatccctaatctcggtcaaccaaagcgctttcaaccgtggcaggagcatccacgataacttccattatgtacagaacatggtgagaagatgccatcgcaacaagagcccaactctattcttcaagctagacatttccaaggcattcgactctgtgtgttaggcttatctgttggctcttctacaacagtggggcttcccgcagaaatggagggattgggtcgcagccctcctctcaacctcttgctccaagatactcctcaatggggtcccaggaagtaaaacatgtcatgggtgtggactacggcaaggagacccattatccccgcttttctttattctagcaatcagcccactacatgccttctgcccgaagccacatacctcaatttgctcagcaagcttagggctagggtcggtcaccatgcctctgaatctcaatgtacaccaacgacgcaacggtcttcatcaacccaaagaaggacgatgtagatgcattcgctggcctctgtgaatgcttcggacaagcaacagggctatgcaccaacatacaaaaatctcaggtgaagccaattaggtgtgccagcatagacctcgacgacttgttggaaagcacgccgacgaccagagcaagcttcccaatgaaatacctagggctctccctagccatgacaaggctacacaaggcagacctccagccactttttgacaaatccgcaagacacctagtaggctagcgaggaagaaacatagggatagggggggaggggaataacactagtcaagtcaatcctcacgtcagcaacctgtctactctggacaactctaaaagttacgaaggaatcccttgaggtgcttgacaaacagaggaaacggttcctttgtgcaggggccgataacatcacaggcgaaaaatgcagggccaactgggcaagaacttgtatgccaacagcttatgaagggctaggggtgttcaacctagaaaagtttgcacgagcgctgagggtaagatggctatggcatgagtggaaggccccaaatcaaggagaaagccaaaacttgggtctcagcaggagcaaaacaccttgcgcttttaattccttaggctttgccattttttacagttctttatttcttgtaaatgtaacatttactcctgtgctggttcgttaaaaaaaggtatttaaggataattcggttataatataaccacggtcatctttgcaaactttattactaccacaaccataccgatagtccacatcgtaggctcgcagctcgatgagaactgaacttggctcaattacaacttatacaatagctcaccacaccatacagctcgatcgattagcttagatggtgtttgggtgggaggggctaaacaaaagcataagtctctagaggagagacttatgtttttgtgagagggactaaaataagtccctcccctcccaaacaccaccttaattagctgcgcacaacaacacagtgaattaattagtagttactaattgattgattccacgtagggagttggacagcctcatgcaaaattcccacaggatcaatcaatggtgctgaggatcgggccccccggggctcgacctcttcgactcggagtacggcatcgccgccgccaccgccgtctgcgagctgatcgtagtggcagtgttgctcccggcgacgacgagcattctccgcccggtgatcacggccagctggagctgcacatgatcatgatcaggctcgccgcgcgagacggcggcggacatgacgacgagcagcagcatcagcacgacggcggcgcgcaccagcggcgacctcaatgtgctggatgaggagtaggccatggaaaaagctagaggtcttcttcttcgtctaatctcctagcttagcttagcttgagagtgagctagctgtgttctcaggcgcaggttgcaatggcatgcatggtgctgaatttatagctaagctaagctgatcgagattcgaggggcagtttccggccgttaccgtgagcactatcgagctagcgacaggtgtagagagtgatgggtggtggtgatataccggaagtggatttttgtccctagaggagacattccctcgttttgtgcataatgtttaaatagttattaaaaaaatttaaaaaaattgtcaagatatagattaatatatgatatatcttttcgcaaacatgtaagttaaaattcgacttatacgattcgaaacaaaaataataaatttgactgtgaattacgctttctattcatagtcaaattttttgtttttgtttctgcttgtataagttgaatttgaatatgcatgtttgtgaaattttttcaattttttttatgactctttaagtgacaagtaaaaacgaggggatatccccttaaggatgaatagagttttccgtgatatacctctgtggcgcactgatctctgccattcatgtcgacgatgcatgcatatgacctcacacacaaaaacggctcaacttttcatttttaattctgccttaacaaggcagtgcaaaactgtgatccaatacaaaatccaatgctatgcatgctgagatatgatcgattaatgccattatcatttctgttgcatagtgatcacaataacttaagacatggatgcatgcatggtcccttcttgatatatagtaagatttttagggggaaattttatgagcatgttgcacgttttagtgggcactggcggttgtttagttttgtttggacaaaaaaggaaaaaaaaaaacacaccaggccgttagccaaagcaactgccatttatcgttatgaaatggccactatatatatctatatatgttcattaattcataagctagccaagtcagctcacacgaatcagcaagcaccgtgatcttcagccggatctcatttgcttctggttgccacaagcatcgatcatcaacttttaaatacatactccctccgtctctaaatatttaacgccgttgactttttcaaacatatttaaccgttcatcttattcaaaaacttttgtaaaagatgtaaaactatatgtatacataaaagtatatttaacaataaatcaaatgatatgaaaagaattaataattacttaaattttttgaataagacgaacggttaaacatgtttgaaaaagtcaacggagtcaaatatttaaggacggagggggtaatggagtatattgatatatatacttgatctttattactctcttcatgcccatttgtcaacgtataaattatacaagttcctccacgtacaaatccactttcaaggagtacctgcagtacacaaaaaaggccttgttaaaagccaaataaaggcataactaaccaacctatgtggccatatataggtgaacatgcatgtaggtgatagatcagagagtacaatatgcagtacacacacattcagttacctagttggcctcttcttccttaatttttccctttaaattttcagagacccatatatgcatctccgtgtcattttccactggtcacaaacggaagcaatgggcgtacgcgaggccgccattaatcgcgtgtgtgttctagctatatttcttcttttgctcaaccaccgggctgctccaatggcggccggcccaggaggaccccatggctctgtggccacgaacttcacctgccattggaggctttaagctcgtcgacgacgacgaccctgagggcgacgagcagccacggtttgctgcatgcggcgcaaggaagaatgatgaatgcacacaatgggaaagtactctgttttctatttatctctcaaggggacatcctttttgttttttccatgccgcctaagaagtcagaaaaaaaattctgaattttgttggcaaggtatatcgatatgtttatatcacactataaatatgcaagtttaaattcaaaagtagaaaaaaagttataaatcattattcgtagttaaatttattgtctctgtttctacctgtgtaagtcagatttaaatttgcatgtttatatagtaatataatgcatacttgatacttccttcgtttcaaaatgtaactatttctaactacgaatttgaacatggctccatccaaatagctatatgttgggatgggagggagtattcatctattataattctataggaggacgacatgcgcaaatggaggacgtctcctggagggggaaaaaccatccacataattctttggtcccaactcacaatgggagatgatagtaagaatgtgtagtacaccgagctagttacatgcatgcatccgggagacatgatggtataaagaaacccggcagccaaatgtgtttaatttcacactgaaactcagcagccaaatgtgtttaattccacaccgatataagattgggccagtagcatgtgtcggcaaacattttaattgcatttacaaactcgcagcttgagctgtataataatcccaggagggaatgtgcctaacaactaatgacagtatttatcacccccagctcacaaaagttgccaaaatgatcctgtgagtcatctgaaggccgtcaggttttatttctgacttctgagtcggaaccgattctgtacttctgtatgcgtaatgctgcactatctatccaactttgtaaattacagccactttctgatggatgttgttaccatgttatcaatagcaacccagggaagtggaaactggaaaaagaattgacattcatacagctaggaacagcaggagggtaagatagtgagtgctactctgggaggaaaggcagcctgctgacaccgttctgtttatagtccatgtcatctgaattgtctgaatctgtgagctcagttgcagcttcttgcttgacagacttgccgccttcttccacgcctacgaattgcggaagaattctgaggcatgcgtttggctcctggcctatagattcccacttgagcttgaaactttcgactagatccacctgggaagcgatgatgcttggtggtctgggcagtagctgcacgctttcaccttttgggatcactacttgctcgattgccaatctagcttcctggcaacaggagatgattgtttatgttattcatgaaggtgttgatcagaataggtcaaaactgctatagcaatggcaggagagataatgtaaaggaaaatggtaatcatacctccaaagcatcagtttcctccgaagatctcacttcagtatcttcaaaatccatcaacccatccgtgtgatcatcaacaagggcacgaagtgcccttctgatttgcaccagggagtttgtctatacaaatagttagccaatatcaacattctgtcacatcaacaattaacagtgccatgaaaattaacaatgctctatacaaaccttggtgaaaaaaacaggtatatcttgagacttcacaacagcctgaatctgggtattcttcttgagcttcgattgcaatgcaatcactgcatcagcttcactgatgttataagtcaaggttacaatgtcctccagctccagctgtttaatggcttgcaaggcagtcgactccgagatctagaatagcctatccaataagttacaaactaagtataggaaacttaataaagagttgacagtgcgtgaaattcagcagtcatccgatgataagagatatccaaccaaacaaaggaaggaagttgcaaacttggaggcttcacaacgtaagccatgaaacaacttctcttccctcaccactccaacaataacagcccacagctacacttactaaacaagaactaacagggttttgtttaggtgtacaaggcttaattaatgccttggaggtttggtagctcaccattacttcaatgtgccatacctaaaagctgtaaatatattaagccatacagcacagttcataccaaataatgcaaaataaagcacaagtccaggcaaaaccttgagcaaacaaatgaaaagctgaagtacgagagagggggtgggtgtggggggtattgaagaaatgcataccccataagcatatagattgaggtctggttcagcttcagttgatctccctatatgcccttcagcaggatcaagattaaatgccgagtctaagcttcttcttgcattgctcaaagaatcagtgtccaattgagttgcaccttcagaaggaccaagatccaaccgttccttttgcacataaacttcctgtactggcccctttgaaccaactttacgaatttcaacattaggcattttgcctgcaccaaccaaatcggactaaatcatgctgatattggagttacacgttttatataagatattgtagcatcatatctaacatgataatgcagcttactaatgccataataaatgagaacctgcaagcagagcatctacagtatcttccaaactacgatggacgcgcaattcaattttggagacaatctccgcagcacatgtaaaagtcgatggacccttgcgctctaggacagttttctggacccctcttcgattagcttcttcatcaccaagggtgacgctctttcataaaaagaaagcatattgtaagagatctccatgacagaaatggcaggtacagaaattcagaaagcacatgaaagaacattagatgcttctgtgtattcccaatgaaagctgaatagatgctataacagttagtttctgaattgcccttaaccattgctttaaatatgcatagtcttcgattaaaaagcatagaagcaaccttcaacaagcaaaacatagtaactaaaaatttacaagcctacttggaacagtcacgatgaaccattaaccaatggtggaagggaagcaggactgcaacttgatttaatactcgtatacaattacatagtttgcagtaagatttcgctggctcttccattctgtataagttaaataactgtttttggaaacacacccttgttaacatcaacaagcaagctggagtatactgatgatcaatatcacaatctttccatgtgtgatactatctcactttatctctcatatgggataatttgaacgcacagataaactacatggtagagactacagacaggaacataatagcacactacctcagaattgattcagtattgcaaagatacttaggaaaataaagagcatgtttctaggtgactaagatttggcgatcagcatgttcaatttgacatattaatacataactattctagctacattgcatagaataaaatgcagcatatcattacctgcacacctcctacaagcatatctagtgatggattcatgatcagattctctattgttattccatgggcagtggcaacaagttgtatcccccgttgtgcaatggtgctagcagccatagcctctagcttcgttccaatttcatcgatgactattgcctggggcatgtggttttccacagcttctatcaatacctgattgagattgagagaaaaaaaaaacaaataagcacaaatagacattggtgtgttaaaaagagcttcaattatcaattcacatgtaattggtttggcatatatacgatcacggaccttatgctgcatatcttggttaggcacttgtaacctgcgggcattgcctattcctgggtgaggaatatctccatctccacctatctcattggatgtgtcaacaatcatcaccctcttcctataatcatcagctagcattcgagcgatttctctgcaagtcaaggcaagcaacttgttgctacactaacactgatacatttctcgatcacaattaacaaatgcacaactctcccgatttacatcggaatcaaaatcaatactcgtcagtccaaacctaccttatgacagtcgtcttccccacacccggtggaccgatgagcagcaatgacccaccatccttcaccaaatcctgcagcaaattagcacttccaggcacggcacgcccaacccggcaagtgaggcctatgatggcgcccttccggttgcgaatcgcgctgatccggtgcagcgtccggctaattccagctcgattgtccgctccgaaatccccaacctagcacaatgcgaatcaccaattcaccataagcaaatgctgctaaattcaccatgagactaagtctagcgatcgggatcaacctgggaggtggcgtggcggaggtcgtcgaaggagatggggctctgcgagaggaggaagtcgccggaggggaagcgggcgagcggcgggcggccgaggtccatgaccacctccaccagcgccgggagctccgggtgcccctccacccgccgcctcagctccccggggagcaactccagcagcctccgcatctcctcctcgggcccctccccacctccccgcgccgcgcgcggtggggcccccaaccggcggcgccgaccgacggagaggagggggcaaacggctatccggcggggagcagcggagcggaatccatagggcgcgcggcgggggaagtggagcgggaggggtgggacgggggagacgccgaggtgcatcgccggccacggccgcggcggcggcggcggcgagcactcgagtggagggaaagagcgcgagagcccagcgtttcggctttcctatcgcttaggttgacacgtggcggatttagatccgatcgatctatccacctgggggagatctaacggtcaggatcaaactatagttttgttctaattttcacaaaactatagctttgcccttgggtgattgggtccaaaatgctttcgccggcggagaagtcaggcggtgggtgacaaggcgaggcagtcacatagcaaagga

SEQ ID NO: 7227 - DNA, 12088 bp, Oryza sativa
ttcctgcagccctgcggtatttgcggcggctaaggcctgcagaaggggctctgcgctcagcggggcgacggaaggcgtggggaagggctgccttggagaagatgccgcgcggctcggcccgccaatagacgcgcccgcggcctcgtcgcgagccgcccccggacctgtttggtcctgggcgtcacccgaaggggtggacccaagcgaggcgcccgcggcctcgtcgcgaactgcctcggaagccgccatcgcctcagcctggcgaacccgggcggcctcctcccgagcggcttcttcgccttggcgagcccgggtggcctcctcccgagcggtatcctcggcttggcgagcccaggcggcctcctcccgagcggtatcctcggcttggcgagcccgggcggcctcctcccgagcggtatcctcagcctggcgagcccgggcggcctcccgggcggcctcttcagcttcccgtaggcggtctgcggcctctcgccggtcagattcccgcctccgtgcctctgcggccgccggatcttcggcctcggactggccggacttaggatggtgggaggaacgcgatgcgatatcactgaagcagaaagaaaaaccagaaggcaaacaagataggtaagagaaaacttgcttttgggatagaagaaaagacggtcgcaatgagcgtgggacgaacctgcgagggggtcggttaaatgaccaccttggaggagaaattaggtttccccgggatggttctgtctcccccatcttgcgcagccgcttcttcttgcgctccccctcgggctgcgatgttggcgcggccccctccgggcgcctgctgctggcgcgcaccgccccgccccctcggggaggagatgggggaggtgttcctcccagcttcctcttcccccgggcgtcggtagggcggctgctccccgagcccccgacgcggggcccagaagcacgaccccctccgggggtagattgatcccctcggcggctcccgcctgcgccgtcatggcccttaggagcctgctcctctgaggccccgaccgccgtcataatggtcaagatggaggcgcgatctggatcgctgcagagggggaggataccgtgggggatgagggacgcctccacggagttgagatttagcacacgttggaccagtatcttgaagtcctcgggagcccaatcccatctgactccctggtgggtccgcatgtagtcttcggacccggtgtactcccaggcgccccgagcgcgccgctggagcggcgcaatccgacgacggaggtagtcgccgtacaccatggccccggtgagcccctgggatcgcaggcccgcgaggcggtcgaggacggcgtcatagccatcccccagatctaccggcgcccgccagctggaggcctgcgccgggggctggctcggaagtcggaggcgcgcttcgtcggcgaggggggtgtagaaccagtcgctcttccagtcatcccactttttgcggaggacgcaggggatgtagcggttcaacaccggcccccgcggcaggaaatagcagccgccgaccaccgacggtggcgataccgactgcacggtgaagaaccaccggaacagccgaagagatgggcacaccccaatgaacatctcgcacaggtgtgcgaagatgcccaatgtcatcactgcgttgggggtaaggtgcgccatctggagatcgtagaactccaggacatccatgaagaaagaagaaaatggcggaaccagccctgccattgcaaaggggagaaagaagacggacctccccgggtagtctggcgccgggcgtccctcgcccagcgtgactatatcacggccggtggcagattccggcataaagcggcgcggcaacccagcctgcttctcgctcacgatgcgggaaggcggcagcacgctaccatcaagcagtgcggagccccgtgccatggcgccggacgaagagaagatggagagcgagcgtgtgtggcgaaagaagggcgcagggaagaaggagttagggcgcaagcggcgaaggcaaggggaatgatggcgaaaggaaggaaacaaatcctatcctcagtgcctttatacccttgccaacgctgtgcccggctcctcgtttctcgcgcccattatttcgccccctcgtttctcgcgcccacgcttccactgatcccattcgcccgcttgcggcgcgtgaagtggatatgcggttgcggcagtcgagatagatcgtatcgtgcgcgcgttaattacgctcgccgaccgaagcgacattaccgtatctccaggcgaagcaaatcggctcgcccagattcgttcgccgctcaggtgatgtggcagtcttgaagagaccgcccattattgacagctaaattaccataaccggtgtacatggtttgagaccgttgggtttctgcccaaccatggagaccggtcccacctgtcaccaggctttaggagtggcgtcacgcccggccgcttcccataagaagggcgatcgccctggcataacgccgggggctactgtcggtgacatgggaccgggagtatcatgactagaggcttgaggcagacgccatcgcccacgtggcctggcaccctcgggggacgtcgggcccgagggtgatgtgtgcgcccacctcttggtctccccgagggggggggtcggaccactcctgcctcgcccccgagggccgaggcgccccgacccctcgcgtttctactccacgtgtatgggttaggtgagcacagcggggctcacctaaccgcatttattgcgcctcggttaagcgtgtcacgccgcacgaagtgcagtgcagtgcactcgattatccggtctgtgaccagtcacagaccggtcaaatcgcgggttaggtggcgacaggcggtctgacgcccgcttcgccccatcccgtcaagacgagagcttctaggcactcgtccccggctggaactagcgtgttacatcccagagatgacacgttagccccgatcgatatatgccaggcttcatcctaaccattacaagcaagatgttgtttgaagaagggcaaacatgcacgttgctaagccgacgcgtggtggacaagaatgaccgatttgtgaccggtctgacactgctcatgtcgtcagcacacagccaccttcccacgacgtgcccgcctcaggcagaagtggaggtaggtgtgtgccgtcccgtcaggaggatgttcggaggacgaccgtgcaaatctccgtccatttatgaagagaagaaaagtccagtttggaaagggaggggtgcatgtggtatccccttgaagtataaaaggaggacctggcccatagagaaaggggatgatcttttccagattcagaacctagaacgagggagaggttggctcacactttgtagctccttcatacgcagatccaccaaaacacaggagtagggtattacgcttctcagcggcctgaacctgtatacatcgcttgtgtttcatgctcttttgagaggccgcgatcttcccacatacacggagagcttgagatctcaccctgagcccccggccgaaccggcaaaggggggcctgtgcggtctcccggtgaggagcaccgcgctccgtcatctggcgcgccaggtagggggctcagcgtgtgttttctgagctctcgcgcttttccgtgtgcgtcaagtttttcttgatcagcctcatggctgagcaagcaaaggcgcccgacctctctcccagtgtgagtggcgacgacggggagccgaacccacgtcgtcgagctcgtactccaccgccccctccacgccaaagtcctaagcagggggaggcgctcgaaagggtcgaaagatccgcggcttcaccgatcgcgggcgatggaggagaacggcgagatggggaccgtcgcctcctcgtctacggcgacggcagcacgccccagggcgcgctccaagctgcgggcgcgctcttacgccacccgcctgtcgtccctgacccggagtctccagcccaacgatggctggacgatgtggccaaattggtcatgacggcacggcggcgcctagatgctggtggccggtcctccgccaccaaggcctctggtgctgctaccaccggctccgcgtcgtcaagacggagggcacgacgagcggcagccgctgttcgccgttcggctgccactccttcgtcgactccttcgacccgggaagatctgcatggggagcaggacgcccgcgccagcatcgagcgccggcgtaatgaccgaagtgctgcccacgcaacggagggcgcttcctcgtccagagtgtcacctcgacacggacgtgggaatcagccctccgtgcccccggttggtggtgtcggctgtagagcctttgtggcgagtcttcggaatgtccgttggcccccaaggttccggcccaccatcgccgaaaaatatgatggcagcgtcaatcccgccgagtttctccaggtctacacgaccgggattgaggccgccgggggtgacgacagggtcatggcgaatttctttcccatggccctgaaggggcaagcgcggggttggctaatgaacttgccacccgcgtctgtccactcctgggaggatttgtgccagtagttcaccatgaacttccaaggcacgtatccgcgccccggtgaggaagcggacttgcacgccgtacagcgaagggacgatgagtcgcttcgatcgtacattcagcggttctgtcaggtccgcaataccataccatgcatccctgcacacgcggtaatctacgcgttcagggggggcgtgcggcacaaccgcatgctcgaaaagatcgcctccaaagagccccagactaccgcagagctttttcagctcgcggaccgagtggctcgcaaggaggaggcctggacttggaacccctccggttccggtgtggcagcttcggccgcccccggatccgccgctcaggcagggcggcgagacaggaggaggaaaaagaggtcagtccgttccgacggcgagggtcatgtcctcgccgtcgagggcgcttcgcgggccacccgaaaggggaggcctgcgagcgacaaaaagaaggaggccagcgttcccagcagggagcgccctaccggcaagtggtgcaccgtccacaacacctccctccatgaccttgcggactgtcgcgcagtcaaaagcttggcagagcggacaaggaagtgggaggaggagaggaggcaggagcgccgggaaggcaagtccccggcggttccttccggccgtcggcgaagtgaggccaggcagaaggcccccgccgaggacatcgatgatggcgatgatgacctaggtttccaagaacctggggccaccattgccactgtcgatggaggagcgtgtgctcacgtttctcgccggagcctcaaggctatgaagcgagagcttctggctgcggcccctactcatgaggcgacgcgccgggcgcggtggtcggaagttgccctcacttttgaccagaccgaccacccgccgtgcgttgcctggggagggcagattgcgatggtggtttctcccaccgtttgcaacgtgaagttggggcgtgtcctcattgatggaggagcagccctcaacatcctttccccgcagcctttgatgccatcaaggccccggggatgatgctccggccgtcccagccaatcatcggcgtgacgccggggcacacttggccgctaggtcatatcgacctcccggtcaccttcggtggacccgccaatttccgcacggagcgggtgaacttcgatgtggcggacctcagtctgccctacaacgcggtcctggggaggcccgcgttggtgaagttcatggcggcggtccactacgcctacctccagatgaagatgccgggccccgacggccccatctctgtccatggcgacctcaaagtcgcgctcgcttgtatggagcagcgtgcggaccgcctcgccgtcgtgtccaagcccgagggtggcgacgagaggcttggcgcatccgcccccgccgccccgaggcagcggatagtcacgtccgatgaggtcccggtcaaggaggttgcactgggcgacggcccgtccaagaccacacggatcggtggtcttctggacggcaaataggaagacgcgctcgtctccttcctgcgggcaaacgctgacgttttcgcatggagaccggcggatatgcccggggtccccagggaggtgattgagcaccgtctcgccgtacggccgggcgcaaggccggtccggcagaaagtgcggcgccaggccccggaacgtcaagccttcatccgcgaggaggtggcgagacttctggaggccggatttatccgtgaggtcatccatccggagtggctggcgaacccggtggtcgttcccaaggcgaacggcaagcttcggatgtgcatcgactacaccgaccttaacaaggcatgtcctaaggatccttaccccctgcctcgcatagatcagattgtcgactccaccgcggggtgcgaccttttgtgttttctagatgcatactctggttaccatcagattcgcatggctagggaggatgaggaaaaaactgcgttcattactcccataggaacttattgttatacgacaatgcccttcgggttaaagaatgcaggtcctacttttcaacgtactactcgaatttctttgggtagccaattaggacgtaatgttgaggcttatgtcgatgacttggttgtaaagacgcgcaaccaggaaacgttactttcagatttagcggaaacttttgagagcctccgctccgcccgcataaaactgaaccccgataagtgtgtgtttggtgtacctgcgggcaagcttctcgggttcttggtctctgcccgaggcatcgaggccaaccccgagaagatacgagctatagagcggatgcgcccccccagtaaacttagggatgtgcaatgtgtcaccggttgcatggccgccctaagtcggttcatatcgaggctgggagagaaggcgctacccttatttaagctcctcaagcgctttgggccgtttacttggacgaaggaagctgaacgcgccctcactcagttgaaagcatatctcagctctcctccggttctagtcgccccggagccaaatgagcccctgctactctacttagcggcgcccccccaagtagttagtgcagcgttggttgtggagcgcgatgaggacaatcctcattccgcgcacccccaccctgtgctgacttggcccgggagggagcagggagaagaggcccccgagccgaacggtggcctaaggcccctgacgaccggagtcggccctctgcccgctcgtcagatggtgctgggcacccccgaccctcaggaaggccccgaggccactgcgggaaggctgcatctatcgccctctgaccccgaggctaaccctgtaccgattcgacccgggagggagcagggagaagaggcccccgagccgaacggtggcctaaggcccctgacgaccagagttggccctttgcccgcttgtccgacgacgccaggagcccccgacccccagaacggccccaaggccactgtgggaaggccgcccctatcgtcctccgaccccgaggtcatcggcacagaagacgagtgcgccccgaggggccacttggacgaggagcgccccggggatatggcccttagcgaaggggatcggccccaccgaagggtgcagcggcctgtctactttgttagcgaggccctccgggacgccaagacccgataccctcaggcccagaagatgctttacgctattctgatggcctcgaggaaactgcgccattatttccaggcgcatcgggtcactgtggttacgtcttaccccctcggtcaaatcttgcataatcgggagggtacaggacaggtggtaaaatgggcaatcgagctttctgagttcgatttacactttgaaccacgccacgctatcaagagccaggccctcgccgattttgtggcagagtggaccccggctccagagaccgtttcagtctctgaagctagctcggacccctcgcagctgcctcacgccgcccactgggtgatgcagttcgacggctccttgtctcttcagggcgccggcgcgggggtcacgttgacctcttcgaatggagacgtcctcaaatacttggtccgcctcgactttcgagcgaccaattatatggcagagtacgagggactccttgccggactcagagtggcagccggactggggatccgtcgtctcttggtgttaggcgactcccagctagtcgttaaccaagtctgtaaggagtaccggtgctctgacccgcagatggacgcttacgtacgccaagtgcggcgtatggagcgccattatgacgggatagagcttcggcatgtgcccagacgggataacatgattgccgacgaactctcacggctcgcgtcctcgcgagcccagaccccaccgggcgtctttgaagaaaggcttgcccagccgtcggcgcgacccgaccccttaggggagacggacgcgcctgatcggtccccgaggcccgtcggagcccaggcctcgggacccgaggggagcgctccaagctcccttagattgattgcttggatctctgagatccaagcatacctcacagataagactctacctgaggaccgcgaagggagtgaacgcgtccaacgcatttccaaacgctacgtgctggtagaagggatcctctatcggcgcgcggctaacggaatcctcctgaagtgcattcctcgggaacaaggcgttgagcttcttgccgatatccatgaaggcgagtgcggagcccattctgcctcgcgcaccctggttggcaaggcctttcgtcaaggattctattggccgactgccctcaatgacgcggtcgacctggttcggcgatgcagagcgtgtcagttccacgccaagcaaatccatcagccggcccaggccctgcagatcataccactttcatggccatttgctgtctgggggctcgatatcctgggaccgtttaggcgggccccgggcgggtttgagtacctgtatgtcgcgatcgacaagttcaccaagtggcccgaggcttatccggtcatcaagatcgataagcactccgcacttaaattcattaagggcatcacggcccggtttggagtgcctaaccgtattattacggataacggcacccaattcactagtgaactcttcggcgactactgcgaagacatgggcatcaagctctgcttcgcctcacctgcccaccccagaagcaatggtcaagtggagcacgccaatgcagaaatcctcaaaggccttaaaaccaagaccttcaatattctcaagaagcacggcgattcatggatcgaggagttgccagcggtgctctgggcgaaccgaaccacaccaagccgagcaaccggggaaacgcctttcttcctcgtctacggcgcagaagaggttctcccatccgagctcaccctgaggtctcctcgggccaccatgtactgcgaggttgatcaagatcagcttcgtagagatgacctcgactacttggaagaacgaaggcggcgtgcggccctccgagccgcacgctaccagcagagcctgcggcgctaccatcagcgccacgtccgggcccgatcactctgcgtcgacgacctcgtcttacgccgcgttcaaacgcgtgctggattgagcaagctctcaccaatgtgggagggtccgtatcgagtgatcggcgtcccccggccgggctccatacggctggccacgggcgacggcacagagttgcctaacccatggaacatcgagcaccttcgtcgcttctacccctgaggggggggggtcgggtgtcaggtttcgggctcgggccaaccccgcaccccccctcgggtgtgcagggttggccgggggctgccacacatgcacattctcatttctctcatttcagtatttcaataaaagcagtttcaatttcctaagggctgtatctgtgccgttttttcctttttgaagaattttgacttgaaatgaggtcgctcgtgctcaaccttgccctcgggggctcggttcggtcagctaaatcgccaaacggggcccagaaccgagccgtgccccggggcgtggtgaactccgggggggaatcggcaaaaacccacaatcgggtcacccataaccctcggtcaccacgttcccggcctggccagtctcgacatgcggatctccccaggcactagccccgacccgcgcttttcgaggactgggacttgtacacgggcccttaaatcaagctaagacacaaaaagaggaccacggcacagatcatcctcatctcatccgcatagcaaaataaaattaacacaaagaattttttcatcatttttgattgcagattataagttgatctatacaaaaaacaagcctgaaggccttagaagaaagaaaaagaaagaaattgaagattggcgggggcctgggggctcaatccgatgcgcccgggtcgccggcctcgtcttccacgtcgtctgcaccgctggcatcgccctcctcgtcggagttgggggcgaacgcaagccgaggggccgagccctcgaagctgtggacgatgtggtcggcggcatcccggacctgcgcgcgcgcgctgtcttcagtcccaggtgggaactcgtccagcgccatccacggagagaagttggggtccctggcctggtagctcgccaggacgagctccaccgctccttgggcgaggtccctcgaggatgacttgatggtcttctcgagctcctcggggagctgctggagagccccggccatcttcgagaggcgctgggcaaggcctcccaggttggcggcaggctttattgtctgccctttccagaggcccgcctgccgaccggcgcgatccagacgggagactgcatcccagagcatgccgggccctatctcgcccgccaaacggagggcctcggcttccccggcggatgagtctagcgcgcgctgcatgtcggcgacggtgtgttcggcatctgcgaggcgggcggctaagtcgctttcgcccgcagccgccccgccgatgcgcgccctcgcgtccagctccttttcccgcgcctcgaggtcggcagcccgctgctccagtgcggctctctcggcgcggacggattccaaattgcggcgggcctgctccgtcagcgctgcctcacggagggacaggctgtccgccaaccgttgcgcctcggcctcggccttttcgagagctcgctcccgctcggtaagcgcgtcctcgcggaggcggagtgcggactcctcctcggcgcaggcagactcgtgcgccgccagcgttgtctcccgggaggcgacggcggcctcgtggtccgccaggtccttctccgcgacgcaggcgcgctcctccagcgccatggcgcgcgcctcgagggcctcttcacgccgccggagcgccgcttcggtctccgtcgctcgctgctctcgggcagcggcggcatcaaggaccccctgggcggcgtcgagctttttcttcagctccgcctcccagttcccgtgctgaaggcggagggagtcctgcgcctcgttcatcacagtggtggcgatgagggcagccccccgctcctcctccacctctcgagcgatctccgccagtgccgtcttgcgggcctcaagatctgagacgtgccggcggtgtgccttgcggcccgcttccaccatggcctccaccgagtgccgcccctcctcgacacgtgcccatgcggcgtcgagctccgcacgctccgcctgcagggcctccacctgggcatttaacccatccaacactgcggtatttgcggcggctaaggcctgcagaaggggctctgcgctcagcggggcgacggaaggcgtggggaagggctgccttggagaagatgccgcgcggctcggcccgccaatagacgcgcccgcggcctcgtcgcgagccgcccccggacctgtttggtcctgggcgtcacccgaaggggtggacccaagcgaggggcccgcggcctcgtcgcgaactgcctcggaagccgccatcgcctcag

SEQ ID NO: 7228 - DNA, 13004 bp, Oryza sativa
tttgtatcccatcatcccatttccctttttaataataatttcgcttttcccttttttagatccctacaagctagtcttggttcatgtatttgttgcatctgattaccagcttaatgcttataaacgatgaaattcctatctagaaaatgagctactagaaaaacaagatctgagtggataaatgaaaaaaagatctatgttcaacacaagaaaaatcttaagtgcgaggaaaatgatttttttgtcgattcagcctacaataccatatgaaatagttgaaatatgaaacttagtaaaactttaattttcccacaggatcttatgccagaagatgaatcttttcccgtgatatttgttgtcctaacgaggcagacacgtttttcctatctttttttgcatcgtgctggttttaggtgaccaaccacatgtaagctatatttggaatgcaaccacccataacagacatgattaaagcatttatgtggtgcaagtgcctcatattgccgatacatttttgtgtttttaatgaaagaacatacagtttgttgggacaaaatattatctcagcgaacatggcaagtgctccctccatgggagacaaggagagagctcaaccttgatcgaagacctgtagggacgaggcgggagcttgaggaaggaaaatgtggtagtgtggagcggttgagaatgggtttgccccaccttttgcccatttgggggtttaggctttttttgaggtgctttgcagccatatagttttggggaattttagtcattgcacatgtacatttggtgtcatgttacacaatttatataattctaaaaatattacctaggaatgaaataatccccaacacacttaatccttgaattccatgctgcttgggccatattatattgattccttccaattagcattctccattgtcttctctgtttttattttttaaaaaatagatctcatataccgggcaaagttttttattttccggatgtaccatggatagtcaatatgccttggttacttgtgttctatcctacacattaatggttggagatgcttacattatgttgattcacaacttattttgtgtcagctaagtacccataccaatattaactggacattatcttgatgatcttataataactaaaaaaagtatggctgctaaaatcgtattatgatgatcgtaaattgtatttcaagtttgtgttaaataaaacatgcaaaataaaaatagcatggaccctttaattgtcatttaccaaaaattaatatttgtagaattcaaagttaatactatgatgccgtaattatcgtcaatttttaatttagtgttgtattaatttaatttggaaagtagaatttagcaagttatgatccagggctttcttcaatatcctttttagggcagttagtctcgtatactgagggcaaccgacgacatgattgccctgtagcttgctcaatcatctaagtgaaaatggtatctatatgaaaattcttggaaacattaacccacgtaacaagttcgaaatagcggactttttctgcatccgacacaaacatgttgtgcgagagttatctttctagatccacggataccatggatgccagttcataataacaccaggacttgggttgtcatcgtcattgagcacattttttctctaccgacattccatatttcatccgattacctagcgtggtggatctgcaacggaatggatgtatatatggcaaaacatttggtctatggttgtcattttttttcttgcttatcaagtttggcaggtcaacaatcttatgcgcttcagcgttggtagtttctattttctccaacggtttcttcaagctatttttggacataattacacttggaacaacatcctacaaatgcaagcaaagttgatctggttagataaaaagtcaacttctgtccaagaactgaaggaaatgattacggcatggaaactgccaaatgtaattcttgtgcaaattgcaagccaacttcatatgtgcttttgtgtttcctgaaaaccatgaacagatataagataaaattttacgaactagccgaggtcttcacgctatcttcgctgtaaaatagagttatactagtatatttcttacacggttgaggcagaccaatttactgcagtatagtgagaaaatctggacccatcgaacatagcggtgttaatctttcttgtttttctccaattgatgttgtggaggtggtagaatagtctaaattgatacaatctaaattctacatgatcaaagatgtaaattcttttttcccttggaatatagtactgttttgctagttctttttgctgagcattgtggctttactaaattttaataatataattgatgacttgcaacaaatatgttgagattttagaccaatggggctttaataggagcctcaaattacatagctagcttcactgttctctccactcaactgcaataaatggataaataatccaataatagtagagttgataaaaatacggtttgcgagttatctagtgttctctttcttaacaagataactatgtatgctttttaacagatgcaagctgggacagcgagcgagcatgaaggcggctcccttgttcacaagtttatgagtgatgggggaaatcatccattctgtggcagatatggcccatccgatggcagctatcgtgacaggatcaatccttggaactctttgaatgtagcgaaaatcatttctgtagttgtaaattgaattcctattgcgcatatgaaagaggattaactcaaacatatatgatgaactggggatgaacgtatctttggtgtgaactcattatcatctagcgagtaatatctattggctattgctagctcatgcctgcaaggaagtttctaaagacggacacgattaaaggttgaagatatgctcgccagctacacattaaccgatcatttttttcaggaaagcattaacttacattgattcatttgatatttttggatttgcaaaataatttctttccacatcatggcgattgttgcaatatgatctcccactataaatccaccatattcccctttctttgatttcacatcaatctaaccatctctcatcaatttacaggtgcattcttgctagaaagtggtgaactgcaaaggccatggctcgcaagaagatgaagcttctgcggatcgtcattgatgtgaagcggcgggtgacatttaggaagcatctgaagggcttgatgaagaaggttagtgagttcgcaacactgttcctcatggtgtacggtgaggttgaggtgcaagcaacgaaggtttggccgtcggtgtgggaggcgaccagagttctcgagcacttcaaggccatgccgcagctgggcagatacaagaagatgatagacctagagggcatcctcaacaagcagatcgacaagctcaaggagaagttgcacaagctgggacgcgaagctgatgaaagcgagaccaagctactcctcattgaagccatcaatggccgccacccaagcctcgatggtctcaccatcgagcagattatcagcctcggaaggatggcaaattcacgcctcaagattgtcaacgaccgcctcaagaagctccgtgagcaaggcctcatacctgcatctgtctcattgtcgagcacggaggtaccaatccagagggagggatggctgatggatgttgcaaggggcactggctcaatggggtacaatcagttcgaaggtagcagtgtaagcggcactgctggatccaatggtgacatggcttagcctttcaacagtgttgcagcattctcataggccaattaggaattttcagtcccacccaagtaatgcgagactcattatcatttgcctacttggccaacatggcaaaggtggactttttcttagatgatattttgccagagaaaccatggtcaactatcaattttggagggtgtcgctcctttatttacattccaatatatcattgctttctattttgtatcccatcatccgatttccttttttaatcatattatcccttttcccttttctagatccctacaaactagtcttggttcatgtatttgttgcatctgattaccagcttaatgctaataaacaatgaaattcctatctagaaaatgagctactagaaaaacaatatatgagtggataaattaaaaaagatctatgttcaacacaagaaaaatcttaaatgcaaggaaaattattttttttgtcaattcagcatgctgtaccatatgaaatatttgaagcaagaaacttatttaattgtcccataggttctcatgccaaaagatgaatcttttcccacaatatttgttgacctaatgaggcagacacgtttttcctatctttctttgcatcgtgctggttttaagtgaccaatcacatgtgcgctatatttggaatgcaaccacccataacggacctaattaaagcatttatgtggtacaagtgctacatattgctgatacattttgtgtttattatgaaagaacatacagtttgttgggacaaaatattttctcagcgaacatggcaagtgtccctccatgggagagaaggagagagctcaaccttgaagacctatagggaggaggcgggagcttgaggaaggaaacggtggtagtgtggagaggatgagaatgggtttgccccaccttttgcccatttgggggtttaggcttttttcgaggtggtttgcagtgatagggttttgggtcatttttgtcattgcacatgttcatttggtgtcatgttacacaatttatataattctaataataatacctaagaatgaaagaatcccccaagacacttaatccttgaattccatgcagcttgggctacattatattgattccttccgattaacattctcctttgtctgctctgtttttttttttttgaaaaaaatagatctcatataccaggcaaagttttttattttccggatgtaccatggatagtcaatatgcctttgctttttttttttctgaaatcccatagatttgaaccatcatccttggccatggtgttgtgcttccctctttactataatagcttccaggcagtaactaaaccacccatctccatttcaagacattcggttgagtgttgtcatcttgtgcatatactgcaataccaccaacataaaagtttatgttgtatttcacatagaatgcaaattattattaattgaaataatattaattctaagaaacatttccacttctatttgatttttcttgaatgtcattagcaccatgtatgaagaatgtccttatcatatcatttttataacagaacttggttcgggaggacccacagcccccatcatcatcaaatatccatggctacgcaattaatccaattatagtttttaccagaacttggtacaggagtttgtccatgttcctagggaacttctgacgaggaggatacaaaggagtgccacatcagcatcagcgtggccagattagctttccttttttttttttctctccctgccaagaattccttgccttgcaaatataaattcactgctcagtagtttttggacccattttgtctacgtcctccccttcttcttccatgggtggccagtgcttgccctctcgtaactaccaagcattagccaagctcgagctccatacaccagctaccaacgagtatttaattgacgtagaatcgtgttgctacacatgttatgtgcaacctgcggcgtggcgcctagaggcgcactgctatagggagcgggtagatactgctgaacaaacacttgggagggatcccttcaaagtgaacacacaccggtttgtcctagactcggcatgccggctaggacgtcgtctaacaccatagagatgaaagacgacaaacaattggatggtttgaggagaatagacttggcataggtaaacaaaaggagagagatataggatatagagggttgggatattaaattgattttgatgattgattggttgttgtttcaatcggtctttgctcccttatatttataggagtggtggacttgctttcccgtatatatttcatatccaattagaaatctaaaatctcatgtcttagcaagaagccccaagaaccaataaatcgaacttggaatcggactctgctagtctgactgaccacatgccgccgatcagatcagcccgatagctgtggtcagatcggcctagggtgggttctttttaaatttaactatagttttctatttcatactttaagagctaaatgtgcgtattaacatgtccaagtgctgcaaatccagcgatagcttccggagtggccgccgagctgtagacgatggagctaccgtcggtgccacaacacctttttctccacataatcatgtgtccattgtccagatccatgtttctcgtttcattagttcttccccactctctttcttttcttagcttgtgtcccaagtgcaagctccggcagctggcgaacagcaaatggtcgcatcccctacacctccaatgtatgcgccgcagcatgcatgttgtctggtaattttgatgcagaacaaacacatggttgtatatatgacagatccaggtaactgttaattgaacttagctcgtaatgttcttttagtcaaacaattgcattctaatttcaatttctttcatttgtgctcattcacgaatatatcttgattcataaatgctatttgggtctgattttgaagggaaatcggcaggaagcatcggagaacaaaaccttactgcactccccccattgttgcagcaagctagtacttttcagtggttacattactcaagaaattgtgctatttttttccaatttttgtttcgttctgtggaatgatagcctcaatttggtagcatattttggccctagagttatcttgatgatccgtggtgtatttggccctagaaagtctgttgaattcaccgtgtatatatgaggaatgtcctcttaatatcaatttttttaccggaacttagtaggggaagccccaaacctcccaccataatcatatatccatgggcacacaattaatccaataaagtctacttgggtaaacaatccaataaaagtaaagttgattcaagggtaaattgcactggtgatacacaaacttgttagatgggtgcaatatagtgcacgaatttaaaacacttgttttgaagcacaaatttgactacatgcttaatcttattgatttaggtgccaactaggatattacataagtatatatatatatcataaagatgctatttagacatacatgtgttcaatgaaaacatgagaaaaaaaaatcgaagaaatgccattaacaagcatcgagttctatgcaataccatcgtataagtaattttatctcagaagtgccattgctattagggttccgttagtagcctttcattaagtgatacaagatgaactgtgcatttgatggggtgggttggatagaaccctaacggtaatggcatttatgtgataagtcgttcgcacgatagcattttatggaactcacatttatcgatgatatttattagaatttggcgtttgttaatggcattttttagattttttttttcttcaaaagatataaatgaagcaatactgattgtacagaaagaaattaaaaaccaagctatgatgaagcaaagtagagaccatgtttgtaaatatagcatgtcctatgtgtactcactacacatgtctcatactgatcaacacaaactgtgtaaaattaaccttgccattatcgtccaagctcatatgaattaaacaaattcgtgcagcaaaaagacacgattacataaacatagattggtgctggttggaaccctgcgtaggtgccggatttcctaaccggcacctagaaggcagcatagataagagaacctttgaggtcccaagaatcaagggaaaaaaacagctcaagctgttccccttcatcccgattccatggaacatttaattcatagaattagtaggcatccaagaactcaaaaatatcaacactaacacaaaaaattcaccaccgtcgacgggcaggggagggcaccgccgccgcggagccaccactaggacaatagagagagagaagcgcacgcaggagagagagagggaggggggagcgtgaaagaatgaggaaaccggagagtccgagtcctcctctaggccttatccgtttgagactaccggtcggctcagctcggtttttacgggtgccagttttttaaaatcaattttcagatacaaatgcgtcaaacacctgactataataaacggtttttatagatagattcttaagttgattgtccaataattatagatagattcttaagttgattgtccaataaaatgagacagttgtcgtaattaagttcaccttctcttagaaattgattttcacaagtggagtacacccagtggcatccagcttgcacctgatctacagggtcgcagtgtctagttcgcgctcggctagctgccacagtatctggtgtgtcatgtgtgggtcgtatcagagacaagaccaacgccatcttcttgggcttctgggctgcgcggcccattcagcgagctgggccaccattgcagccatgtcatcgaaccatccggcccacgaacagcccgggagcactgctccgacgtcctcgtcgtcgtcgtcgtcgtcgtccccatcccggcgggagcacgacggcgacgtcgccgaccagccggcgtggcacgtcatcaccacgcctccgacgagaccgtccgggcttctgacgcagcaattctgtcgtggtttgtccaactccgggaacgttggcggccagactgtcgtcagcgggaacaccctcaccggcggctggcggtcaccgccgccgccgccgccatcgtcggcgtcggcgagtttcctctcgtagaccttcttcaccgtcctccactgcaggtgcacgtagatcacgacgccgacgttctccaagtccagcagcgcgaactcggcgttgtcgccgacggcgatcaccgcgacacggccggtccaccagccgtcgggaagccactcgatccgctcgcacgcctcgcgcacgcagaacgtgtcggccagccgccacccaactccggccgcgccgccgtcgtcctccgtggtcgtcgttttccggtgccagacgctgagccgcgtcccgtcgccgtggacgaggcagagccggccgcgagcgacgtcgtcgtcgtcggcggcggcggcggcgtgtgaccatgccatcctgaagttggcggaggacctcgccgcgtccgggagctcgacgacggtgaagcgcgtggtgcccagacgcaaacctagcgtgtagccggaggtcgtcacgacgtagacatcgccgttgatcggcggcagaacggtgtccacggcgtcgtcgcacgacggcgccgggagctccgtctccgcggtggttggcgctccccacgctccgccggagtcaagaacgtgcactcgcgcggtcactctccgctcgaccagcaacacgtacaccagcgtgataccatggtcgccgccgccgccgccgccgtcctcgggcaggaacacgcgttcgacgacgtgcttcccggcgccgcggcctggcggcggcggcagcggagggaggagttgcacggattcacgcgggtggggcggccggagcacggtgtagcggtacggcgtgttgatgccgagccgccgcggcgctctgtcgggggactcgacgaggacacggccgtcgcggcagtcggcgatggacggacggtggtagccggcgaggtggccgaacgcgccgaagaaccggtgccgcgtccggtgcgcggcggcagcggcgacgcccggatgctgcgggagtgccttgaactgcggccgccgcccagcgtcgccgccgccgccgtcgtcgacgcagaagccgaggaggcgcggcgggtggatgacacggaagcggcggaggaagagctcgccggaggcgacgcggagccagtgcttgcagacgatcgcgacggcgacgaggtggtcgtgggactcgaggcggaggaggatctcgccgaggaggtcctcgtcggagagcacggcgctcgccggcgacgacggcggtgcgagctgcggcggccagctttcactctcttcttctccttccatatttcttgggagtttcaggctttctttgcatgcatggatgagtatttcagtgcacactgccaatacatatatataccaccctcagcatgagtagcatgtgaaataattcacatttgaatggttcttttccggtataaacatttccaaattgttgtcctactcaaatgaaacatgtacaaaaccttatatattaaggcatgaattaatggttgtatcaggataatccatggttttgaacggatttttgctttggataaagccactttgtcagtgtatctattagcaaggaattggaatggtgccatgtgaatctatgttgttttctagctgtacatggatgcatatgctttaatatggcctcttctagagtgccaaactggtgccatggatattatgtatgtaaagactgtacgatgtcgatatgcagcatgttgaccgagaatattgtattagcaaaagactgatatatacactacttgctagtagtatgaagtccggttagttgtccatgtactttttattagtttactaacacaaattagcatatttgccacgttggctgatcatccctgacattctcgacggttggcatatgcaccaatgatgctactgaaattctgtccggactaccggctgacgcgtgcaacgacctagtcaaatgatgtaatcagtacagtagcaacgcaagacgacctactgcaagcagcggtagctagctggtgactgcctaatcatgtgaggaagggcttttaggattgttagattgatttcatttcaaactatactattttttttagtaaaattgctaaatacatacatctatttagttttttttaccaaaactctggtaaaaacataaaaaatcttgtcaatctcgtccaaactttgataaggttattttggctacaatctgaacatgacatttataaccttcaatgaaatgaaaacccatgaaaacatgaattaaaaaattacaaattctgaaaaaagcgtagattttaggtgaaaagtacaggctgtcactttagttccttctaaaattgaatttgattttaggcttaagattggatggaaatatatttcatggctatacagtggcggatctagaaaattgattcgttggtgtcataacgtgtctatcggtgtcatagtatactaattatggttagatcatggtgttataacttatggataagcagttttgctatacgttttgtcgaaagtcgtcggtgtcacctgacaccggccctattactatagctccgcccctgtggctataccaaactctagtgtattttttcattaatttatatataaaccttttaaatatgattttcacaaatttttacttactcgacggtgtttaccacatatatttccccccttttatacatttatacgattctttgcttgctggagaacttgattttccaaaccattggggattaattagtgaatcactttacttatttcaaccgtcctcaaaacaagagttccacgggttcagaaacctctggttgtccgaaattccccactgctgccacccgtatcatttaaggtgtcattttatcaaaggtagtcaccctagcaacagataatgccaatactttatcatcatgaacacataagaaagttcaggcaaccgttcgtatccacgtgcttagtagtacatataccagccttgatgtatgtttatgattagcagcttgcccaagctgacttgcatgaacaactagatagtttcgtatcacctttcttcatagtcaaatgactcatgcttacctgctgcgcctcgcggtatgagctacgtacgtagatgtaggtggcgagacgctttgcacaatgctcctgaactcatctcaaatctgttctttggatctccaaagctcgcagtaatgccctgcttacttgcatatttgttccctgttgcctaccaaacctaaaaataaacaaacaatcggtttgcatgtagttctgacaaatgggaaactggatgtgacccattcaacagtatttcttacacagcaatgcgatccttttctattcgatccttttctattcaaaccaaaggatattggtttgatctgaactttcttttgtacaagctggatacaacgattggcaaggccgtgtatcagatggtattggctggttgaaccgatcaccacttggttcccttttgtagccaagagttggtacatacacaacatatagatgtatacccatgtactcacatagtatatatatatatattatggctggcaggatttcttttgtttttatgatggacctgttggattcattctgtggctgagacttctcaagtcgtacatttgtgacaacgagcagatgaaaattgatgataataaataattatttttttagcaaagggcaaaatccctccatttccattaagagaaatgacagggattacaagataaagaacacagggagtacgttcttgcactccaagttcatagtataacaaaagacatcttgccgcaaaacacatctaaagagtggcagttaacaaaaaataaaaataaaaaacatccatcggctacttccaggaagaaaaggcgccattccattttcagttgccaggggagtcttctgatacttgctcgccatccatattgtgacttgaacatctcacttgtgacttgctttagcggctggattccccaccgtagtcgttcttgtttttccaccggtttctgcaaaacagcctagtcattcatccatgagcgagccctatataaaatgtcagtaggatcctgtggtagaatctgttcaaagcacaccttgt

SEQ ID NO: 7229 - DNA, 28980 bp, Oryza sativa
ccgacaggtgggccccacctgttggcgcccgggaggaaaagggaggtgggatggacttcgggaaggggagggggaagcgggctggcgcgggaagaaatgggccgggccgacggcccaagaagagaggaaaaaggaggaaagaaaaagaaaaagaagaaaggatttttcccagggatttaatattgcactttgctcattttaattggttaaaattatttccaaggctctgaaaattccactaaaaatcctgttagcgtattttgacatgtagaatccaagaaaaattccacatgtcgattccgattattatttgcatttattaatttagggtttctctcttgcctttaaacaaataatttcttccaaccatttattaaatgaatttttgctagggaaaagaacttctgggcgcgacaccacggcactccggagcacgctccaagcgccgccgcagccgacatcgtcgtcgttccgaccaccgtagaccaaaccaagccgagccgtcgcgccaacgtcttctctgttagcagtaatcttgtgtgccacggttagttagttgattagttatctgcatgtttccattttttttctgaataaacgcatgagctcacgtgttgtgtgatagccatcgtgtggagtctgttatgagggtatccgagtttagctcgttgcccgcgtcttgtgctgggagctcggatcacgtcgtgtggttgtggggatggacgcagctagagcatggcgtgagaagtggtcttggtggttagttgtttccgttgtattcgttcctttatatatggaagtaaacagaaaagcagctgagttaagcgctgcacaaaatttgctctgtttcctctgttctgcgaatttgcaggtttagccacagtacgcatgcgttgtgttcgtctggtttcctgctagcgatcgctggggaaattcctaacaattggtatcagagcacggtttaggaagtggactcgtgaccgcgcattggaaggcgtcttcatgccgcgtcgtcgctcgtcgtcaccgatcgtgcgcactcctcatgactccggcggccgcgccacgggcagcggcgggggtgaccgcgggctggtgatccaccgcgtggtgaaagaaggaggcggctcggtgaactacccgctgctgaccaagaccaactacaacgactgggcgctactgatgaagatcaagctgcaggctcgctgcctgtgggcggcgatcgagcccgacggcgtggacgtccctctgcatgaggaccggatggctcttgacgctatctgcagtgccgtgccgccggagatgattggcaccctggcgaccaaagcgtcggcccgggaagcctgggaatgcatcaagacaatgcgagtcggcaacgaccggattcgcaaggcgagtgcacagaaagtgcgcgctgagtatgaatcgcttgcgttccgcggtgacgagaccgtggaagatttcgctctacggctcacaaccatcgtcaaccagcttgcaaccctcggtgatcctgaacctgctgataaagtcgtcgaaaagtaccttcgggtagctcgtcccaggttcaatcaactcatcttgtctattgaaactcttctcgatatctctactctgtccatggaggaagttactggcagactgaaagccgctgaggattctgggcaatcctcgtcgcacaccgccggtgggaagctgtacctaactgaggaggagtgggctgaacgtcagaagaagaaggatcaagaggcaaagcggggtgactcgggcggctctggcggccgcggcaagcgccgtggcgggagagggcgcactggtggcggcgggattgcgagccccgagagcacgaactctggttcggcgcgcaagggagacaaatgccgaaattgcggcaaacttgggcactgggcgaaggactgcaggagcaagtccaagcgcgaagaacaggctcacgtcgcccaggaggatgaagaagagcacaccttgatgttgctcaccggcggctgcgttgacacggtcgacgcggcggcgccggagggcgacacgcccacaccgccccaccaagccgtggtggaactcgtggagatgaaagtatttgcagcgctcgacgacgcggctgaccatgatcccgggcgctggattatggattccggcgcgtcaaaccatatgacgggcagcaggatggcgttcgccgacctcgacacgaacatcaccgggaacgtgcgactcggcgatggatccgtggtccggatcgcaggacggggcacaattctctttgcctgcaagaatggtgagcaccgcactctgtcgaacacctattatcttccccgtcttgctgccaatattatcagcattgggcaattggatgagaccggcttcaaagtgctggcggaggatggcatcatgcgggtctgggatgagcagcggcgtctgcttgcccggatccctcgcaccccagggcgactgtacatgcttgacatcaacctggcgcgcccggtctgtttggcggcacacgccgacgaagacgcgtggcgctggcatgctcgcctcgggcacataaacttcagggcgctctgcaagatgggcaaggaggagctggtacgtggtctaccatgtttgtcgcaggttgatcaggtctgtgaggcctgtctcgccgggaaacaccggaggtcgccgttcccgcggcaggcactttgccggtctgacgtgccgctggcgctgctacatggagatctctgtggaccgatcacgccggcgacacccagtggcaaccgctatttccttctactcgtcgacgactacagccggtacatgtgggtcgccctcctctccaccaaagatgcggcgccggctgccatcaagcgtactcaggcggcggcagaaaggaagagtggacgcaagctccgcgcgttgcggacggatcgcgggggagaattcacgtctacacagttcgccgagtactgcgccgagctgggaatgcggcgcgagctcacggcgccctactctccgcaacagaacggcgttgtcgagcggcgaaaccaatccgtggtgggcacggcgcggagtatgctcaaggcgaaggggctgccaggtatgttttggggagaggcgataaatactgccgtgtatctgctcaacaggtcgtcgtccaagggtatcggcggcaagaccccgtacgcgctgtggaacggcgttccgccggccgtgcaccatctgcgcacgtttgggtgtgtggcacacgtgaagacgaccaccccgaacctgaagaaactggatgacaggagtcgtccaatgatctttgtcggctacgagccggggtccaaggcgtatcgcgcctatgatccggctactcggcgtgttcacatctcccgtgacatcgtcttcgacgaagcggcccagtgggactgggatgctgaggcggccgctgatctcgacaccgacttcgtcgttgagtacaccacggtgtaccatcctggctcgctgtcaggaacacgccaagacgcttgggagccgcctgctcgatcttcatcatcgccgcgaacgccatcagactcaccgacagccggccgaacaccttcggtgcatggcgatgcgccggcagttgaatttgtgtcgccaccaactggagcagctgctaatcttgatgcagaccacgacgacgcaccactccgtttccgcacgatggacaatgtgctggggccggccatgctgccaggtctcgctaatcgtgaggtccaggaagagctgatgatggtgagcggagaagaaccggcaacgttcgctcaagctgaacgcgacgaggattggcgtcgggcaatgctcgatgaaatctcttcgatagaggagaacaagacctggaggctcgtcgatctgccttcgggacatcggccaattgggctgaaatgggtgtataaactgaagaaagatgctcagggcgtcgtcgtcaaacacaaggcgagattggtggcaaagggctacgtgcagaggcctggaattgactttgatgaggtattcgctcctgttgctcgtcttgattctgttcgtatgttgctcgctctcgctgcgcaggaaggttggatggtgcatcatatggacgttaaatcagcgttcctcaatggggaactgattgaggaggtgtatgttgttcagccaccggggtttgagatcgatggacaggagaacaaggtttacaggcttgataaggcgctgtatggtcttcgccaagcacccagagcttggaacaccaagctagactgcacactgaagaaacttggcttcaagcagagcccgttggagcatgggctgtacgcgcgtggcgatggcagtgggcgactgctcgtcggtgtgtatgtggatgatctggtaattgtcgggggtgacagtggcatgatcaagggattcaaagagcagatgaaggctgaatttaagatgagtgatcttggtcctttgagtttttatcttgggatcgaggtacatcaagaagctggaatcatcactttaaagcaagcagcgtatgcgtcgcgtattgtggagaaggctgggctcaccggctgcaacccctgtgcaacaccgatggaaccacgtctaaagctgagcaaggaaagtgcaggatcgctagttgatgcgacagaatacagaagtctagtgggaagcttgcactatctggtgaacacccgaccagaccttgcatattcggttggttatgtcagtcgtttcatggagaaacccacggacgaacacttggcggcagtgaagcgcatcataaggtatgttgctggtaccattcatcttgggtgccgctatgtgaaggaaggtgaaggaggactgcagggttacagtgacagtgatatggctggagacattgacactcgcaagagcaccacaggagtaattttctttctcggcaaaaatcctgttagctggcagtctcaaaaacagagagttgtagcactctcctcctgtgaatctgagtatattgcagctgcaacagctgcatgccagggcatttggcttgcccggctcctcggtgacctcaggaatgcagcaactgaagtcgtcgatctcagggtggacaaccaatccgctctggccctgatgaagaaccctgtttttcacgatcgaagtaagcacattcaaacaaaatttcatttcattcgtgaagccgtggagaatggggaaatcacaccgagttacatcggcacagaagggcaacttgcagatatcctgacgaagccgctttctcgaatcaagtttcaggagctgcgggaacaaattggtatgtttcctgtataatcggcacatcaagcttagggagagttttgttagcagtaatcttgtgtgccacggttagttagttgattagttatctgcatgtttccgttttttttctgaataaacgcatgagctcacgtgttgtgtgatagccatcgtgtggagtctgttatgagggtatccgagtttagctcgttgcccgcgtcttgtgctgggagctcggatcacgtcgtgtggttgtggggatggacgcagctagagcatggcgtgagaagtggtcttggtggttagttgtttccgttgtattcgttcctttatatatggaagtaaacagaaaagcagctgagttaagcgctgcacaaaatttgctctgtttcctctgttctgcgaatttgcaggtttagccacagtacgcgtgcgttgtgttcgtctggtttcctgctagcgatcgctggggaaattcctaacattctccttgaagtcttcctcaaaaaccctaaaaaatcctaggcaatggcgcagcaagtgcggagatcggctaccgtcgtcttcacctccggtcgccgtcgccattgtcgattccgcctcctccggtgagccattgtccgattattcgcgtatacacatccctgggacctcaataaccccatgaaaacacatgcatgtcaattcgatgagtggatcgagccgttgccgtcttcccggagctctacaccgtcgccggaccatcttcttcaccgctgccgctgtccagactttcccgcgcctcgttcaaggttcggtgagcacccttgagcccataggattgcattcatgcatttcattcacatagaatcgagcaccaactcaacatgcagtagcagcctaagcacagccgccgctcggactcgccgccggcgttactccgatgtccactgaccgagaaaagtagaggaatggaatcgcaatagcatgatcttcattttgtcttttgttcgcaccctcaaacgagccaccgtttgccgctggcaagcttgagatcgagctcagccatggcttgatctgcttcagctcgaaccagggacctcctcacaagaatttaggttaatatagggtcctttctgtaaaagctcaagacacacagaacagtcataggactgcggtttgatttcctgaaaccctaggggcctttttgcatattggcctgagaccgacaggtggaccccatgagtttaaaatctaaaaatgtaaaagataatactaaaagcctttactttttaacagcaaaacacctaaacttgtaaaatccatgtaaaatcaaatataacttattttgagatgattcaaatttctataggttcacaaaactatgaactttaatgtggtaacattaagcttggcaccctcagcacaaaccttgtctctaaaatgggcctaagataaatcatacataaagcatacacaaacttataaaatgcatataaagtacatctcaactcattttaaatgcctctaaaactattacctttaaatgactagttttagataagctgaattttagaagttcatataaaattcatcttagatcctttttgagtaaacccaagttctgtaaaatcatcaaaacatatacttccaagttataaaataaaattatatacttactgtatgataaaagcctctttatgtaagtaataaccaacatagagcaaccttaaattgtaaaaattgtagaaaattcatctttagtctaaatgaagtgaaccaaatatctatagaaccagcaaacagtgggcttcaacatagtaaaataaaatatggaaccttctgtacaggttatagctctaaactttaaatttatagtataggtgctaatcacatagtatcgattaagcaatatgtatatatataaatttatatagaaatacactctagctataatgaaacccaaataaaacttgttagaccagtgaatgcatagttccatccccatccaccaaaacttaaggcacttagctcatataataatttataggttgatataataaattgctagcatggactatagctcccctagtttataaaatatgaaccatgataataaagaccataagcctatgaactaaggttagattagttaactaaaatactcattttatacatcactagctagatgaggcaagttctggacctaaacttctaaagccatgaacctatagaacactatacacctataacacgttataacttgtaaaatatataaagaattcatattaagtccaaaaattgtgaaaccaaatgtgttagtcttagaaaacactcctctacacctctgtgaagtcaaaactaataaacatcactttatagaaatattttataacactacctaggtgatactaccttatactgaggaaacttctaaaattcataactcccaaataaaaagagttaaaatagaaattatttcacctaaattcatattataccagtacatattcactgtgcacaaatcatcattttagagcattttggatttttcgcatatttcggtgtttaattgcataacgtgtactttgtatagatgattgcttaaatggtgaagaagtgatttaggtgctgacattttcctgattcaaggcaagtcccacctccctctctttgatcactttgaacctatgttttggaggttattgaaaatgtttgtaaatcttgcatgtcgattgtacactaataaattaaaatttttgttaaacttgttagacaaactcctattgtttgcattcaccttgaccccacatatatccatatccctcattcctaaccttaggaacaatatgactataccactttatatatgagttttggagtcactaggttactataatgcttagccatgcttagaatggtattccttgtcattatgggctcattacaaacatgaagattgatttttaaataatctggacagaactttaatacttgtgattttgataaataaaatgatggaaaacatgaattttaggtttgggcctcaagtggtgcacatatggtgattagttgtgtaccgatagggggagagtgtgcccaaaccggcctaaggacttcactcaatgtcagttcatttcatatacagtgcaaccacatgtgctagtatgggatagcccaagcttagtaaattatttatggtttagccttacattctggtaggccggtgtgtatgagttcgtataattcagaggagcttcctatttaccccgaagtggtagtttaggtgactaagcgtgtccaatacaacggtattgtgccacgtggtgggttcccgttgtgtccgccaccacggcgttaagtttaaggcgtgggcccgccacttaacggttctaggtcatataacgtgtatggcttagaatggagtaacacgtatcgtactagtgtaaggctaaatcatgaattttggaaaagctttgttgcgggtaataaatcgggtacttatgtatcgcgtgccatgctcttgcatgattattatttcgcatcatgtaggtaaagtgtataaactctgcagagttaaaactaatcgattagccgtgctcgcggtcatgagtggcgtgtggatatgtattgagtatagacttgtgtttattcttctaaatgttgaaatttatcttcaaattgtgatgagatttgagaatgatctccttctgccatggaaggcaatgaggtgcatatttatacatgattaatgcctaccttgatgcccaatatgtcaagtactagcttgctgaaatttatttgaaagtaaacctgatttagaaatgttttatgcaaataaaacttactttatgctaaaaagaaccatattatgccttccttgattattgtcgaaactagatttcggcaataataaaagggggtggctatcaagctagaaaagtgtatgggtttggagacaaaggatttatacaggttcaggccttcttataaaagaagtaataccctactcctgtccggggatgaatccgccgagtgtattattgattgtatgatttggggaaaatcaacatatgcccctagaggcgcccggaccccccttatatatgggaaggagtccgggttacaaaagataatctatatccctaacggaatacacagatacagatcaaatacagtcgtgaccgactaaatcttagggtgtttccttgacgtacaagttaggaaacaaacccaggatacacataagatattctatctatattcggtatcctatattcagtccaaatatcttcgccgtgtagatatgggatatccataatctccacagtagcccccgagacctttgcagtcaaccatcatagccttctcaaagataataatccgagtgcttcaaacttttcgtgccaaggcctgccgagtagcgaagacgaagactgtaaagggcgaaaagataaagaatatggtgcatcgaatagatgcacctaattaggtgtagcccccaactatgtgattagttaacaaactaaacatatagttgagaacaaagtaatagcataattgtgcatcatatgacaaaagcatacgcggcgcctaaagaggcattccagccgactgctttttagccataataaaaggaatccgagtggttaacactctaaaaggttcatgaatgaacacaactgacaggcatgcgagtataatactctaaagattacccaccaaatattataaaaattatggtaaatagtcatagcctaggctattagacttattcattaccataatgaaaacaggtatataacataccaaggaaatgactatgataaaaacaggtcattccaagttaacccagacagcttttgtagcctaaaaaagcttacaaaaacagtataacacctttctgtcgggcaccttttaatttgcatagcaataattccaaagaattatatgaccgcataaaaaggattttatcagcattgggcaacactattgtgcgcataaattgccaaagcaaaaaatgcctaagtccctaaggaacacaatgggccacgctgttaaaaatattgggctgaggtactgttcaggcctaggcccatttgcacctccgatacccttaacaagaaaacccgagatccaagcgacgcttcgtcttccccgccggaactctcgccattttccccactccttgctacagtaaagagctgcgccggcaaactagggttcaccattccactcaaatccgccttcgaaaagttcatcaaaatccttcccgcgatccaccgcctcaattcctcccctctcccaagccatccctcgaatcaaatcagcgcattcgggtagaatcaatggcggaagagaaagaaagctttgaaggccaatggacgccgtccgacataacagaagagcacctgaaggagatggtggcgcacggcgttctccctgtcaaggagatcatcgggtggcggccagcgtgcggtgagatttttccgacccccgatacacacgagattgtggtcttctctcatttcttctatggcggcttcgcttttccgacctcgaaatttttccgcggaatattaagtttctatggaatcaacttgcatcacctaaacccaaattccatagtccatatcgccaatttcgtccatgtttgtgaagccttcttgggaattaaaccccacttcgctctgttccgccgaatctttttcctcaagccccaaccaaacaaaagtaagccatgtgtagtcggaggggcaggatttcagttgaggggaactctgagccaaaaatatttctctatgcccttcaagaccttaaacaaagggtggcatgcgaactggttttatgttcagaatcctgagcctgctcttcccgagtactcttgtcttcctccaacgtaccaagatacttggaactctcttccgatcggagatgaagctgctcaagccttggaattgatggaccgcatgctaaaactcaaagaacaaggcttgcaaggagagcagattactcggcatttcatcaaatgccggctggcaccaattaaagaaagatcccgtacagcatttgagtttgacggcaaacatgatccaaaccgtgaagacccagattctctggattttaagatcatgaaggagaggatgtacaagatattctcgaacgctattgtcgtcagctactcacatcagctgccagttgtgccatataatgcattcaatccgcctccgcaggtatgcatctgaaatcttcaatctatgaccaaaacatcatctttgtcttcatgctgagttaactaactgtggagacatctcattcaggagtatgcattgatgaaatctgatcccccaatcactcagcgccggtcgcctcgtcagcacaccgttcagggaggtggagggccaaaaatcagaccagatccgcaacctcaaacctccaatccaactggacagacaggttctcgcaagagaaaactggtgctcgacaatgatgaaggcgacgacgataaatctggggacaaggactcgcctaataaactcccaaagcgtagcatgcccaagaaaaaactggctggccgtcaaatgccaaagattagaacatcttccaggtataaaccccttggtaccattttatttcggcatgcttctctcatgaaaataatattgaaggttaaaagaacacttcgcaggaaaccgtccgatatagatccaactgggaaagatccggatccggctgcgacagagccaaatttatccaaagatgctgagccaactgccgaaaaccagccgactgccgaaagccagccgactgccgaaagccggccgactggcgcccatgcttcagatgacaaggccaatccgagtgaccagccgccgactggaaaccagtcggcagctactgaaactgcaacaacccaagagcccccgactggaaaccagtcggatgcagatctaaatcaagagattcctgaagctgaagtgcagacaacttctcaaggaccagaatttggtaatgactcggtgattgggtctccggataaagagcaagaaacacctcacgctcagctaggcacatcctcaggtaactcatcttctcaagtgatgccgttctgaataactccagcttgttcgtctaatgtcttgggaatacatcaggtccactaggcggcgacgaagaagaaattctccgcataaaggcagctgacgactctcgtcctcctatcttactcaaatggtgggacgagaactctcaagtttccggcattgtcataaatcgccaaaaagaagatgaggaagtgtgccggctgaagaaagtacttggagaagctactcgcattgtgaatgtaagtcttctaggtgactgcctttgatgactttgttttcttgttagcaaaactaatccatgaaccaccgtgcagagaatccatcttcgcaatgaggccaagaccgcaaccttagaaaagctggttcctcatttgggaactcttgaagccgttaggggccagctacacgaggccaaggagcatgccaagaaaacggagaaagagttaagggaccgaatcgctcaactccaggattcaaactacgagctgagtggttcatcaaaaggtaatctctagatctgtcccatttatgctgtcataactatatcctcaaccatttggatttcaaacagcgcaagccaccagaatggctcaaatggagaaacagattgaagccttgaaaaaagacaaagcagaactaactgcagaaagggactcggccttgaaggaggtcgaaggtactgccagttgtcaatctgaacttccctctttttaatgcagcagattcttattataaatatgttttgtagaccgtaaaatcaaatctcaagctcagtttgacgtcctggttggtaagatcaagaggcttgaaggagctagagatgaagtcgccaatgtcgctacaccacttgtccaagctatgttccttaataacagtggtccgagtacacttgacgcaaccgaaatctttgacaggctgagagttgcaccagatgtatatttcaagaacatcaagaaagctggaagtatgggagctagcatggcattggcgatgaccaaatccttgtacccgagaattgaaatcgacaccattgatggatttgcagacgggacaagcgaagaagctgctcttgatcttatcagcaatgctcaaaatgcggctgacaaaattgcaagtgacgttgtagagcaattccgcaacaacgaccttcagccgaacaacaacaactctgatgatgaaaggactgactctgactgagtatgaatgtaacaaatggaggctcaatttgtacaatactggtgtatttatgctgtgcttgatagttctagccaaatctttgatttcttaaaagcttttatcaagctttgttgagcctaaaacccaaagaagctattaaaaactttcagtcctcgcagactaagtagaaaaatcgaacaaggcaatgataaaccaagtaagcaaattgaattgataaaaaatcacaccccaatattatgataatagcccccgactgacaacttcaagaagaaaacttgacgttgacagtcaagatagggaagtacaatgataaacttaagcgtagaaacgacgaagatgttcaatgttccaagagttgtcgacgagagtaccgtcttcgcgcttgagtcgataagagcctggccgggtgacttcagagatgataaatggcccctcccataaaggagataacttgtgccgatcccgtgtagtttgaattttccgcaaaaccaggtcgccgactaaaaaggcacgggatcgaacattgcgattatgataacgccgcaacccttgtaagtatcgagccgagcgaatcaaagctgcttcgcggacttcttccaatcgatgcaagtcatccactcggtcctcttcgtaacgttcttcacggaaatttcgaaagcgcaaagattcgaattcaacttcactcggcaacattgcttctgccccatagacaaggaaaaaaggtgattggcctgtggcccgactgggtgtagttcgcaaagaccaaagcaccgatggcagctgttgcacccatttgccagcatagggttttagccggtcaaagacacgcgctttaatcccttgaagtatcatgccattggctcgctccacctgtccattgctcatggggtgtgctactgaagcatagcaaatcttaattccaaagtcctcgcaaaagtctttaaaaactccgccagtgaattgtgtgccattatcagtgatgatccgattgggcactccaaatctgtgcacaatgttgatgaagaagtctcgagcgttatccgccgtgattgtgacaaccggtttagcttcaatccacttggagaatttgtcaatggccacaaagagatgcgtgtaaccgccgactgcctttttaaacgggccaaccatgtcgagcccccaaaccgcaaacggccaagacagcggaatagtttgcaactcttgagctggtaaatgaatttgtctggcaaaaaattggcaaccttcgcacgtgcgcacaattttgtcggcgtcggacactgcagtaggccagaaaaaaccctgccggtaagctttgccgacaatggtgcgtgcagcagcgtggtttccgcatatcccagaatgtatgtctttcagcaattgtctcccttcctctaaagatacgcagcgttgcagaattcctgaagggcttttcttgtataactcagcttcatgcataacataaagtttgctccgccttgaaatccgctcggcttcatctttgtcttgagggagttcttgagaagtcaaaaatcgtatgaggggctctcgccagtcggcttcaaccatagccacgtcatgagtgcccgcaacttgagtagtatctttgtgaggtactgtcggcgcataaaggtgttcgacgaaaacatcagagggcgccatctcgcgcttggatccaaaattggcaagtctgtcggcggcttcattgttgtgtcgaagaacgtgactgagctcgagtccatcgaacttgtcttccaatttgcgtacctcttgtcgatatgccatcatattgtcgtcaaggcaggaccactctttcataacctggttgacaaccagctgtgaatcgccacgaactattagacgctttatccctagggaaattgcaatccgcagtccatgaaggagggcctcatactcggcgacgttgtgggacgccgaaaaatgtatccaaagcacatagcttaatctttctccagttggagaaatcaaaaccactcctgctccagtgcctgaaagtcgctttgatccgtcaaaatgcatggtccagtgctccatcttctctgcgggggtatcctcctggcactcggtccattcagcgacaaaatcagctaacgcttgggacttgattgaaattcggggcttgaatgatatgtccaaagacatcaactccaaagcccacttagcaatccgtccatttgcttcgcgattgtgcagtatatcaccgagtggaaacgatgtgaccaccgtcaccgagtgaccttgaaagtagtgagatagcttcctggtagtaattagaataccatacaacagcttctgaacctgagggtacctcgttttggagtcggctaggacctcgctgacaaagtaaattggtcgctggactttctggacatggccttcttcctcgcgctcaacgaccaaaactgtgctcacaacctgggaggtggctgatacatacaacaacaacggctcctgcgggtgtggtcaggctaagactggtggctcggtgaggaatttcttgaaatcttcgaaggccttctgtgcttcgggtccccactggaaatcatctgttttcttcagtagcttaaagaagggcatcccccgctcgccaagtcttgaaacaaatcggctgagcgccgccatgcatccagtcagcttctgaacatctttctgggtacttggcggtttcatgttaaggatagcggtaactttctccgggttggcttggatgcccctatgagacaccataaaaccaagcagcttccctgacggtactccgaaggtgcacttttcagggtttaatttcatcctgaaagcacggatgctcgcgaaggtttcttctagatccgagatcaaatcatccttttgcttggtcttgacgactacatcatccacataggcttcaacgttgcggccaatctgtgttgagaagcatctctggatcatgcgttgataagttgctcctgcgtttttcagtccgaacggcatggtgacgtagcagtatgccccaaagggcgtgatgaatgaagtcttcaagcagtcggattctttcagtcggatctgatgataccccgagtagcaatccaaaaaactgagaagctcacagccggcggtcgagtcgactacctggtcaatgcgaggcaacccaaaaggatctttagggcaggatttgttgaggtcggtataatcaacacacatgcgccattgccctgttttcttccgaactagaactgggtttgccagccagtcgggatgaaggacttctttgatgaagcctgctgctaacagcttggttaattcctccttgatcgcgtctttcctgtcttgtgcaaatcggcggagtcgttgtttgataggcttggcatcttctttgacatgtaaggaatgctcaatcacctctctaggaataccgggcatatcagatggtttccacgcaaagatatctttattgttctgaagaaaggtgatgagcgcgctttcctatttacaatctaactcggcgcctattacagcagttttagtaggatcagaggaatctaggtgaatcttcttagtcttggcttcgctttctccactttttgaagtcttggtagcaggtatttctccttcgctcgccgtggctgcagccagtcggatatcctctcgggcagacgccatctcgcggatttgggccatgtcgcaactctccttgtcgcatgtgacggcttgcttgatgtcgctccgtagggataggactcctcggggaccaggcatcttcatcatcatgtaagtgtagtgcgggacggccatgaacttggctaacgccgggcgtccgagtatggcatggtatgctgtctcgaaatcagcgacttcaaagctgatgttctctgtgcggaaattttcccgagtgccaaaagtgaccgggagggtgatctggccgagtggagttgcggataatcctggaattactccgtgaaaaggcgcattgcttggttttagctcggagcgaggaatctgcatatcatccagggtcttggcgaagaggatgttgagtgcactgccaccgtcgatgagggttctgcgaagcttgacattacggaccactgggtctagtaccagggggtaccgccccgggtggaccactcggtcaggatgatccaagcggtcaaacttgattgcgatctctgaccatcgaagatattggggcgtgtcgggctgaacagcattgatctcccgttcggtcaacttttgcttccttttagactcataagccagagggccgccgaagatatggttgagctccgtgcggtggtcttgaaatcctgccggggcgtcgccgtcgtctttcttcttcgacgtgctttgttcttcgtcggagttcttccgtgtagtcttggtgtattgatccgcaaattgcttgtagatgaaacaatctttggccacgtggttggagttaggatggtgcgggcattgggagttcatgatcttgtcgaacgtgttgacgcgcgaacgctgtcgagaagagtgactggcggttgcaacaagttctgcaggcttacgcttgcggtccttatgattgttacttccacctcctcccgtagccggcgtatccttttttggcttccaactgggaccagactgctttgatgcgatgacggcgtcttcagctttggcgtactcgttggctttttcaaacatgagcttgactgtcctgggaggcttacgcccgaacttgccgaccaattcttcgtggcgaatccctttggtgaatgcggcgatgatgacgtcgtcggtgatgtcggagatcttgttacgttgttcagaaaatcgccggatgtaatctcgaagggattccccggacttctgaatgacgttgtagaggtcgtattgtgtgccgggacgctcgaaggtgccttggaagttggcgatgaagtggtcgcgtaactcggcccaagatccaatcgtaccacggggcaatccatggagccaagatcgggcggaatcctctaaagccactggtaaatagttcgccatagccttactgtctcctcctactgcgcggattgcgagaccatagacggtaagccacgattctgggttagtggtaccatcgtacttctctattccagtcggcttgaagccggctggccaatccactcgacgcaggtcgtcggtgaaggctgctactccatcaaggtcgtcgtcgtggcggtccggcgagtgatgatagcctcgagctgctcggcgctgtatgattgtgtcgcgaagatcgaaggggtggcgacgaggtggtgagcggggccgttccactcggcgctccctatgatgatcgggaggtgagtgaacggaccgctcgtcgtgtcccctgctcctgcgattggatcctgtgccggtgatgctgaggcttggatgacggtagtcatgagatcggaagtgggggactcggctgccagtcggcgtgtggacgctctcggagttaactgggaccgaagctgcaatcatggtcttcgtctggttcaagatgttgacgacgtgatcagattgattgagctcgttttccctgagtagggtgtcgaggagggtgatcgcggcaaccgcattctgttgaggggtgcgaaaaaccggcgtcccttcaacatcttgctggccgatgagatcacgcgcccggcgccctgcttccaaagctcgctgccgtcggtcctcagcctccttcgcggtccgctcactctcctgctgctcacgccgtaaccgttcttgttcttgtgcttgatgctcctcctccagtcggcggcgctcttcggtctcccgggcttggcgttgctcctccgtctcgttattggccatgaagacgccaaagtagagaggggtgtaattgtcatctaggcttccgtcgaagtcgtcgagatccgcgtagttgtagcgagagctaaactcgtcgtactccacgatgtcagtgggacgcgagtcgacggtggaagagctgttgtagtcatccagctgatccgtcgaaaccgagccgagtggttggaggatgacgccaacttctctgaagctaggcgaaatcggtgttgaagccgacttccgcctaggcctacgggaaggagacgctgtcgtgatggagacggccgccaaatcgtcggggagtttcatcagtatcggtgggtaagccccatcatcttgatctggtgatgttggagaagatgcgatctcagccgagtggtttgaagccgactcgattgagatggtcttgaagtagctttcagccgcgtttgggaatccaaacgggactgagatccggttctctcccgactggtccgattccgagtcaaggagagaaatcttgccgaagttgttggtgacgaagtcgaggctgccgaaccgaaacgcctgcccgggtgggaagacggggtcgtcgatgccggagacgggacccattgcactaatcggcgaaaagcttgacgcaacccctacctggcgcgccaactgtcaaaactagatttcggcaataataaaagggggtggctatcaagctagaaaagtgtatgggtttggagacaaaggatttatacaggttcaggccttcttataaaagaagtaataccctactcctgtccggggatgaatccgccgagtgtattattgattgtatgatttggggaaaatcaacatatgcccctagaggcgcccggaccccccttatatatgggaaggagtccgggttacaaaagataatctatatccctaacagaatacacagatacagatcaaatacagtcgtgaccgactaaatcttagggtgtttccttgacgtacaagttaggaaacaaacccaggatacacataagatattctatctatattcggtatcctatattcagtccaaatatcttcgccgtgtagatatgggatatccataatctccacaattatatgccttgcaaatagggtgttaggcttgtcttggtgcttgccatgtattgactcttgctattgaattaatcttttgcttgcaggttttagacttagtctttgagtgatgcgggtaatcaactgcttcttctaggacttgaacttaatggggtaaacccctagtctgtgtgcttgtggattgggtagacaagcttccgctgttctatatatttatttggccggtcggccaatgtaactaaagtagatgtagtttataatcgctttcatcttatttgtgtttgctatgtataatcatgcttgagatgaaagtgtgaatctagtgcacatcctgggaactagattcacatgagtatgagttaagaatatttgagatgatgtagatctttagccatttttgtcaagtctcctgaatgtgtaacacatgtggtcaccgccttcgagtggtttgacgggcacatctcaggctgaagttgactggcaggctaaaggcctagcaatgtctccaatattcttctctcgaggcgttggatgtttcattatgtttgtttgatgacttgaattattcacttcatccctcaaatataatataatgtaaggtctagaaagcctacgacaatactgccatttgagaccatctatgattatgattttttataattgatctacgttttcatatactatcacataccaacttaaattgggtcaacgtgccacatggtcactgctcaaaaagcctttttaacgtctatttgaacagtcacgtgcaaattttaggaacctgacgtgcaagtctcagctccacggttctaaccacctaatgctatacgtacactcacaaaatttgagacgtatttcctctctcctaaaaatactcaattgaggtggtgtttaaaattcatatagataaagataaaaattaagtgttttacgtaaaatgaggtgatattaatgtataattaattgagttttaataattacaaacttgaaaattatatttatttgatatttgatagtttgaaaagcatactatgaatatctaaattttcattcaactttttgttggagaaaagaatctgaacggtcatatttccttttacgttgagttttttctggacggaggaagtaactaaatggtgacattaatcatgagcaccacaaaatgttccttttttttttatgattgaaacacaggaaactctctaagaataatttcgtttctacaggaaactaaagctatctagatgacacgtcttaacatatataaaatctagaaaaatattaccgtcgcttctttaggtgagctgtgaattttttcttcattagtatgtcacgcatacacagtcggaaacaaccgtgacacggtgatggatagggtgttaataaatacttcgtcctaatatataacaacctagtataggatagttgctatatattgggaccgagggagtatgacgttaaccgcttgattattgttattataatcgagcccgtacaaattaagaaaccactcgataaaccggctatatagaaaaatcaaactgaaatttattttttttcataaaattgtccaaatttaattgtttgttgggcaactgagcggtaatcataattatcgacaaaaccgctagagagcagagtgactcggactgaacaatttttctcgagcgcgcaaaaggattgcacgtcaatatattaggagaatagaatatttgttaaatgacgcaatcagtcagactcggactgaacaattgtaaactagacaccattaacagggaaatttaccttttctattttaaaaaaactgtccaaatttaattggttttaaccgaacaaaaatcatgattatggacaaaaccactcgggagcaaggtgacttcctctttaacgattttgtaaaccttgtacactattgacagtttgacactgatgtgacgctccgtaaaaatggtttactacttttaaaacgatttttacatggctattttcaaagtaggactaaatgttttttttttaaaaaaaatggagaaaacacaatgagatgactgaattcacactgctaccgatcactgtcatcgtcgccgtggacatccctgtcagtttgtcactgcactcatcatacttaatcgccattacccccaagcaattccaacctaatcacaaagcaaccaaaccaatcatctcatctcatgatctcatatgcactataaataatcgctcaattcaacggagccaaacccacacaagaaatctcacccaaaaaaaaaaaaccaaccaatcaaaaaccaaaccatggcgcgccaccgccaccgcctcgccgccgccgcggcgctcctcctcctcctcctctcctccgccgccgcgctgtcgtcatcggcggcggagggggaggaggacccgctcatcgagcaggtggtcggcggcggggaggaggaggacgcgcagctggacgcggaggcgcacttcgcgagcttcgagcggcggttcgggcggacgtaccgggacgccggcgagcgcgcgtaccggatgtccgtgttcgccgccaacctccgccgcgcgcggcggcaccagcggctggaccccaccgcgacgcacggcgtcaccaagttctccgacctcaccccgggcgagttccgcgaccgcttcctcggcctccgccgcccatccctggagggcctcgtcggcggggagccgcacgaggcccccatcctccccaccgacggcctccccgacgacttcgactggcgcgagcacggcgccgtcggccccgtcaaggaccaggttaggatcggatcacaccatcggattaatttgggatggattgaaaatttgaaatcgttggagttgtttgatgatgattggttggtggatttggggggtgggggtgtagggttcgtgcggatcgtgctggtcgttcagcacgtcgggggcgctggagggggcgcacttcctcgccacggggaagctggaggtgctcagcgagcagcagatggtcgactgcgaccacgaggtatgtccctctccttcgtcttcgtcttcctcctcgcatatcatcatcaagctcttaagtttcttcttcttcttctcgaattgctagctctcgttgactatgagttaatggaactcggtttgattttaattttgattcgagtagatagaatagaaggaatgacgcagagggatattcccgtgggttgctttgttgtgaccagggttaaacctaacggtttagccgatttgatcggtgcccactgaaatgctgaaatttttcggtccgaaattttcgaaattttgaacaaaatttaattgaatttgaacaaatattattaaaattcatgaaaatatttgaaaatttcgaccgaaataatatcgtatcggagggggtccgaaatgaccgaaatttccaaccctggttatgacttactagctgttgtgttgtccttatcttggtttattctgtcctggttggtgagcgacagaaactgtagagtgaaagcaagttggagactcagttctttctcacttgaagcaagttttttggtgctttggatgagaagtaattattttatttaaccaaatttatcccaaataaattcgattgcgtcttacacattttgtagtagacttcacattttaaggttgtattcttacctcttaggttcccaacctccactctctcatttaccgcacgcatgcttcctgaattattaaacatttttgcaaaaattcctatagaaaaattgttgtaaaaaaaccatattaatttattttcaagttttttagctaatacttaattaattatatactaataagcaatcctgttttccttgcccaaaggagagtcccatcatctccttccgaacacagccttatccacatgttatctttaccatttttaatttcatcaaaaggtgcagctaatatatatgctatgctcttgtaaaatttgcagtgtgatgcatcagaatcgcgcgcatgcgactcaggatgcaacggtggcttgatgaccacagccttcagctacctcatgaaatccggtggcctacagagcgagaaagattacccgtacgctggacgagaaaacacctgcaagttcgacaagtccaaaatcgttgcccaagtaaagaacttcagtgtgatctccgtcaacgaagatcaaattgctgccaacctcgtcaaacatggccctcttgcaagtaaaggattcaaacatttgcaaaaatttgaacaaattgctgtcatccgtttgtctattgctgatgtttttgttttttgcagttgcaatcaatgcggcctacatgcagacatacatcggcggcgtgtcgtgccccttcatctgtgggaggcaccttgaccatggtgtcctccttgttggctacggatcggcaggatacgcaccgatccgcttcaaggagaagccgtactggatcatcaagaactcgtggggcgagaactggggggagaaggggtactacaagatctgcaggggacctcatgacaagaacaagtgcggtgttgattccatggtctcctcagtgactgccatccatacctccaaaaaggaggagtaggataggattagtctcctctttgtctttgcataccacacactttgtaatttgctcttttgtggttgaaactgttagtggttaggaccattctgtggtgttgctcgattgctatttatgatcagcaaaaactgtgaaaacttcctttacttgatgtaatagtacatatttgttcggatcattacatagtgtttggacacatggaaatggctgtaactgtgacaatgcatattagtatatataatctggtgaagcattcaacatttgctgagaagtatggtattgatcaactatgtgttcttctgccaagtaccctattttcttctgccaagtcttcagaatagtttctactgctactgaaagtaaaaataggatctagttttcctgttacaaaggaggaactcaattctagtggatgcagaattacgaagttaaccctacatccccagatgtcgtttaaaaacgtgtaattcgtttaaagcagataggattgcaaacaacaaacaaatctaccttttatgtacatgtacatcaataacaaaccaaaattatgtaaccaaaagaacaaacaaaccttaaccatgccacgaaatcaacagaccaaaaatcaaaacaaacatgtacaccatcaaccgtgtcaccgttgatgccaaaatatgcctgtcctgcaaaaatatagcacaagtcaagtacagaatcttgcaaatttggaatttcatgcgtgaacttcgaaagaccacaagtggaagaacagaaagtagctctggtggcttcacactgtgtgggggcaatgaacttgttatattgcttacaaacatttctttaaccaaactatatcatgcttaagatctgtaccacccaaactgaacatgttttatcctatctaaagctacccatgaccttttgttcataggttatttttttttagtttgttcagtaagaattttgtcttattgtatttggactccatagacacgtctgcccagaataaactcgaggacaaagcttaagtaattcaagagcagatttgcatccagacattcccaggccacaattgctgtttttggtttagacaaatggagcttactgatggggctcaagcgtttttctgataagtaatgctttaattcaacaaaattgatttgtttcaggtgcttcaatacatgagtatgtacaaagaacacaaaaaagaaatgataaggaagtacagatgaattagggcagtaggaggctgttgaaaacccatgcagcttggcctaattaggcacgtattatatggaattgtacaagaaactgttgtgtatagtaccaagggagacatcactaaatagtttgtgctttttgtgtaaattgaacccagtgtaaactggcctctttggtccagtgtgagtgaatactaatcgtcaaaataaatctgagctatgagaatccttattgtcggctgagcgaatgtagatttattcaaatagctcctggggattgtctaaccttattcaaagagtttatatttcattttacaaatctattgcttttggtactacagttttgcatccgcatacattttaagtctattttattcttatagttattttttgcgacctttttccatcacatacagttagagaaatatctataaaactctattctcattgttttatgtttagacagcacattctcattcaattaaatataatatttcttaaaacataaacatatgcccatatccgatgcactacactcaagggactatatatacacacagatgtgtgcaagtgctaattcttattttctttctttcacggtacacaactatctaatagttaacacattgtgtggaaaaatgggtaccaaaaaggaacgatttcacaaggcaatttgttccagcagttgtttatgtggttaaatttcattctccaattttatcattaattttcagacatcatttatttattggaagatggaaggcatgcatgtctcttaattcattgtccaccaaattaagatctaatgtggaaatgagcaagcatgcatgagtgatgggttactactatttgcaacacaccaatattatcttaccaaacactacatgcaagggactatactaattactctcttatcccagacatgaatgcatacgtccatgcatgagtgagttatgtttgtgttgggctcaccaagatatgaaatgtgattacacattccactcacattaattccttgctcggattagcctttgatagaatgcatgttccacaaaatcaaagcatgaagattttccttttaaacaatccaagctatttgttacatcttttaggtagattggatgctcacgatgttttccttttcattgattaacatgggaatttccatatattttattttctgattaatgtgcaaatttatagtttttaaacctcctaagagttaagctggggggacttataatgtaggccccatgatcctgtgcttctttggcaatatgtcattttaaatctgaagtaagatacatctgttacaaaagaggaaaaaaaatcgaagtacgtaacaggaaaactataattagcactgacctagcttttcttcaaatttctaggggaagcacaatgcagctgtcgccctgcttctgcagcaaccttgatttcctgaagttggttagctatgtcctctaagagttgcagctgtaatgattgctttctttcacttgctgcatgctttatcttgtcttgtgcacctttaatggcattcagacttttcccaaggagatcatctgcagcaactctgttttgtaacttctctgcttgcattgttgcatctgagaaacttcggcaaatcaggcctttaactgtatacaaaggactggtttcagtgctagtgaccaggtggcatggtaaataaagtaccgaatttctcatcaaataacaggaaacatttatccaaactaagcaaagaaaggtttaaataaacctatcatgtaccaatagtaattcgtaaatactgcatgccatctatgaagagtgaagacatcccaaaaatgaatttaacaggtttacgattccacaagccatatacttgatataagaatcaaccaattgagatttatttatccacaatctcataccttcagttgggaagcatatatcatcaaccacatgcacatcatagatattcgcatcattctcacttcccgtagaatcaccaccaatcttgtctacacctccacactcctcctgaaactcatgaggcagttgctctggagcttttgtatcaactgcagcaacaacttcaccataaccaacctgatctaagcttcgagcagatagtggaaggatttcaatcgtctccacgcgatcatccttggagctatcaacctctggtttcaatccaaccatgggaattttctcagatggcccagcagacagcttatcctcattgatccctttgatatgacccactttaataggtgacagtagttcttggggcgaaaacggcgtcttcaagctgaacccatagtcattccccaattgcggcatcgcgccatttctactatccttatacacagatctggacgtgcttggctcgccctccaccatggtgctaggaggcgtcatcatatcatcctcatcgtcgtcgtcgtcgccgtcctcggcggcgaggccgaggaggcggcggtaggcgtccacctccttctgcagcgcgcgggactcgcgctcccgcacgagcacgatgtcccggagctcctccacctcgtcctcgtagaaggcgcagcgctcgtcggcggtgcggcgctgctggcgcgcctcgatctcgagcgccgacttctccttctgcaggcgcaggatcatggccatcgcctcctcggccgccgacgccgcggcgctccgctccttctccagctcccgctgcagcgcggcgcgcgcgtcccgctcctcctccaccaccaccgcctcccgcctcacctcgccgtcgtcggccgg

SEQ ID NO: 7230 - DNA, 6588 bp, Oryza sativa
ctggccgcgccggaggcggccgccgcgacccagaggcaggcccagacgagcgcgacgtcgaggacggcgcccgccagcgcccgcgccgtccaccgctccgccacgcccgccgcgccggggcaccgcgccatcaccgcataaccgaggaggaggaggaggaggcgtgaggggaatttggtctcgttttcgttgcgggcggcggcggcgtgggggaatggggtcggggtggggggatcggtggaaatttggtggtgttcggggtggtggattgcggatggggcggcagcgcgcggcggctggcgtgggtgttcggttgggggattgtcttgtgcggagggaagacgagacgacggggattggcagtttggcaggttgtacacgctagggggcacggctattttctgctccgaccgtagttattttatctttctcaaagcttttcttttcttttcttttccttttttttaaaaaaattttaaacacggtacaacacacgctcacagttaacgcacactcactcatgtaaacacacaagcatcttcaaaagactgatatattttgagattaacaaggcaacacggacacctcgctatatctaaagtagtactccctccatttataaatgatcggcatatatggtttatggctttatggttgatatcaatatactctcacatgccacttaaatttacattgattaacatgcaacaccgtttcttatttcttgcatacttcctctgtcctaaaataaatcaacctagaaggagatgtgactcctcctaggataatgtatgtggatataggggtgtccacatacatcaatttaggaggggtcacattattcttctcgagacagagggagtaagcatcaagggcaattggcaccaatgatctagggagtaagcatcaagggcaattggcaccaatgatcttgtttatatgcatgcacgcaccacaaattacaagtagttgaatagtacattgaacaatgaatgcaaatgaccatttaataacgcacctaaaaacgaaaagtcatatataggagtatcaaatatgctaatcattttttaataacattgaaaaagttatatgatgaccatttgtgaatggagggagtactacatatagcataatattttcatttcatattgtaaaacggtttgatttttcttcttatcaaatttatcaagttcttaaaggaatataacaatattttcaacacaaaataaccatactatcaaaatatattcaatattaaatttaaataaactgattttgtgttgtagatgttactaatattttctataaatttaaccaaacttaattaagttacttatataaaaaagttaaacggatggatcatcattttttgttttacgttgaaaatatagtaccttagtactttctcaatgaaccgttcaattctcttcctctgaacaatttcgctacttctaaatccaattacgtacttaagttcttcatggttatgctatcgaagaggtatacaagacagtatcacacaatgttttgaattcgtgccaatgtcctactaattctctgctagcttaaatagtaaattcgatggtttggtttgaatcaaaatagttggtaatccctcattcttcattaattacaatctcttcattgtaatataaagcttggcttcccattagtaacaaaggaaacatggacaacataactctagcaaaagaattggtagggtagaaagccaaaacagccctttctatttcagtactatactccatacatgttcccatcacaaaagataaatctaaaaagatagaaatgctatgtttctcagatacaccaaaatttccaaggataaacaaagatgtgtgaacgtgaattcttccttgcaagcttgtctgccctggagcaactccactccaaattgctgtgttttgttcttcatggctgtatctgttgcgttgtttccttatccctcttgtgtttcttcaaattctgccgtcccgttcaaaaaccatcatactttgcaaattccttaccgtgtgtaactttatttcctccaggctctcatggccctaccttatgtgttttcttagtataaacgcatgcaccaactcttttaaaaagaatgacccttttttaatggttagtgacaactaaaactatgccggaaaggtccataactgtgtgctcgattaaaaaaacatttcttaaacataaaggatgtacttagaatctgcactcaatattttcccaaagagtaaagagatttgtttgggaagctttagattccacaaagcagtcatgcactccttcagctcctgctgcagcaccacacacacgcatcccgctcctcccccacctcccaccacaactcgccatcgtcgatgggatcactataaaaaaagcacatatagattggtgttataggtgtcggaatagttaaaaccggcacctatattatttttcccaccttcacatgttgaaaaaaaaatcaacacctttaaatgattgtatgtgttgtttctcgaggaaaatagatacctatactataggtacctttttgaaaaaaaaacaacatatttactatattataggtgtcggttaattaaaaacccggttttatattgagcgaagtgatcgggctcgctagttgaaacagacccctgtctttcttccaaactctttcttgggctgagctggctgtgctggctaagctggagccattagcgggcatggagctaagctgcggttgtgttgcctagcactgttgttgtggctgccactactaccggcgtggaaattgcctgagtagtaaggacggtgctgacggacaatcatggtggaaggtccaccctgctgctgctgttcccctggtgtgccctgaactaagctactttccttttgcggtccatcttattgcgttgatcttcctgatggatcaccttgtcaactagcttctcaaaattagcctaatctccaaagatcagctggttggtcggttcatcatcaagtccagatagaaacttctcctgcctctcggcattgctgtgcacgttctgcagggcgtagagcgcgaggcggatgaagtttctgtctttgtgttcaccatttgtaggggataggcaaaaaaggatggaaaacaaggaaaacaaactgctcagaaactaagctttattttattataattaaagtgcaattgttctgatctaaattaaaacaactgaaaaaacaagcaacatccttattaaggcagccataccaacacatgatatagaatgccaactagcccacaagcgacaagcctaaacacggaaactaacaaggaaacaaactaagcaaagcggtaaaaagtaaaggtggcggccctaatgctcagaacagctcctggagtcactcaagtaggtgtcataactgtcaggctcgaagctagagctaccgctgctattgctggacgtggcgaacagccaaccaccgctaccattagacactgaagctgacactggagcgaaggttagtgctggagttggagagggagctggagctggcgttggtgaaggtagaggtggagttggaggtgagggtggcacaaagcggggaagcggctctagagctggaggtggtggagacgggttcctgtgcaccaactggatgcacatgggtgttgtggtagacttcctaggcatgctgcggatcctgagcccacctggtgctagacgcttccgcagaatggcgttcttcttcttgaggcgagccacctcatcctgcaagctggctatcttcgcaagcttattgtcgttgagagccttggatgccttgtgaagatcggagtgcatcttatccaagccctttgacggagcgcggtgctcctcaccgggagaccgcacaggcccccctttgccggttcggccgggggctcagggtgagatctcaagctctccgtgtatgtgggaagatcgcggcctctcaaaagagcatgaaacacaagcgatgtatacaggttcaggccgctgagaagcgtaataccctactcctgtgttttggtggatctgcgtatgaaggagctacaaagtgtgagccaacctctccctcgttctaggttctgaatctggaaaagatcatcccctttctctatgggccaggtcctccttttatacttcaaggggataccacatgcacccctccctttccaaactggacttttcttctcttcataaatggacggagatttgcacggtcgtcctccgaacatcctcctgacgggacggcacacacctacctccacttctgcctgaggcgggcacgtcgtgggaaggtggctgtgtgctgacgacatgagcagtgtcagaccggtcacaaatcggtcattcttgtccaccacgcgtcggcttagcaacgtgcatgtttgcccttcttcaaacaacatcttgcttgtaatggttaggatgaagcctggcatatatcgatcggggctaacgtgtcatctctgggatgtaacacgctagttccagccggggacgagtgcctagaagctctcgtcttgacgggatggggcgaagcgggcgtcagaccgcctgtcgccacctaacccgcgatttgaccggtctgtgactggtcacagaccggataatcgagtgcactgcactgcacttcgtgcggcgtgacacgcttaaccgaggcgcaataaatgcggttaggtgagccccgctgtgctcacctaacccatacacgtggagtaaaaacccaaggggtcggggcgcctcggccctcgggggcgaggcaggagtggtccgaccccccccctcggggagaccaagaggtgggcgcacacatcaccctcgggcccgacgtcccccgagggtgccaggccacgtgggcgatggcgtctgcctcaagcctctagtcatgatactcccggtcccatgtcaccgacagtagcccccggcgttatgccagggcgatcgcccttcttatgggaagcggccgggcgtgacgccactcctaaagcctggtgacaggtgggaccggtctccatggttgggcagaaacccaacggtctcaaaccatgtacaccggttatggtaatttagctgtcaataatgggcggtctcttcaagactgccacatcacctgagcggcgaacgaatctgggcgagccgatttgcttcgcctggagatacggtaatgtcgcttcggtcggcgagcgtaattaacgcgcgcacgatacgatctatctcgactgccgcaaccgcatatccacttcacgcgccgcaagcgggcgaatgggatcagtggaagcgtgggcgcgagaaacgagggggcgaaataatgggcgcgagaaacgaggagccgggcacagcgttggcaagggtataaaggcactgaggataggatttgtttccttcctttcgccatcattccccttgccttcgccgcttgcgccctaactccttcttccctgcgcccttctttcgccacacacgctcgctctccatcttctcttcgtccggcgccatggcacggggctccgcactgcttgatggtagcgtgctgccgccttcccgcatcgtgagcgagaagcaggctgggttgccgcgccgctttatgccggaatctgccaccggccgtgatatagtcacgctgggcgagggacgcccggcgccagactacccggggaggtccgtcttctttctcccctttgcaatggcagggctggttccgccattttcttctttcttcatggatgtcctggagttctacgatctccagatggcgcaccttacccccaacgcagtgatgacattgggcatcttcgcacacctgtgcgagatgttcattggggtgtgcccatctcttcggctgttccggtggttcttcaccgtgcagtcggtatcgccaccgtcggtggtcggcggctgctatttcctgccgcgggggccggtgttgaaccgctacatcccctgcgtcctccgcaaaaagtgggatgactggaagagcgactggttctacacccccctcgccgacgaagcgcgcctccgacttccgagccagcccccggcgcaggcctccagctggcgggcgccggtagatctgggggatggctatgacgccgtcctcgaccgcctcgcgggcctgcgatcccaggggctcaccggggccatggtgtacggcgactacctccgtcgtcggattgcgccgctccagcggcgcgctcggggcgcctgggagtacaccgggtccgaagactacatgcggacccaccagggagtcagatgggattgggctcccgaggacttcaagatactggtccaacgtgtgctaaatctcaactccgtggaggcgtccctcatcccccacggtatcctccccctctgcagcgatccagatcgcgcctccatcttgaccattatgacggcggtcggggcctcagaggagcaggctcctaagggccatgacggcgcaggcgggagccgccgaggggatcaatctacccccggagggggtcgtgcttctgggccccgcgtcgggggctcggggagcagccgccctaccgacgcccgggggaagaggaagctgggaggaacacctcccccatctcct

SEQ ID NO: 7231 - DNA, 14072 bp, Oryza sativa
tcatctattaaaaaacggagggagtaaggtgtaactgaaagcctggttgagcactctttgcttgtgaggtagtctttacctaagctatgtgccaccttgttcgtagaccgatagacccgaacaactttaacttcctggaaagcactgcacttgtttatgatcacctggataattgacccatacaccgacttgttataattgtgatccctcatcatattagccacctctagacaatcgatcatgataattagtatagaaaactcaaagatatagtcgtattggctttgctagcttagagagcatgtacaatctgaaagaggctaagtttctaatattaacaatgcaagtagaaattgattcttaaaaacttatgagatatttagcccatcagagatagacacatctcatatcaagaaaacaataaacaatacttgttttcatgataagctaatgttcctctaaaagttaatatggtggtttctaagtgttggccgcattggtagcaaacgttataaacaagttattatattatcaatataatatagccaaaagagtactgaacagacatcaaatcatacatgttgttgagaatagaaataaaaagtacattccaaagcctccgatgccttactaattaaagaactgtataatatataaccaagttgagatattaacaagtggcattttctgaaggccaaacttttgcactgttataataacaaacgattcttaatttcattgaaatacatactaaaagaaatcgaggccatgtatatatataaatgctcacaaacgggattcccttcattcacggttcatgaacttctctctgacccttttgaagcatctaccaaaggtttactacgaacgatacgaagtacgtacagtagtttaccaagggatttgctttaattctcttctagcaggatcacttgtacacaggatcactcctagcagtgcagtggttggcctgtagacgtgcgcatctcaaactagttttcttccagcaacaacccgcgatgttgttgggaatagtccaacattgctaatctagggggagttgaaccaacttaaaagtaaaagtgggggaagcccttcacctcttgagctagcttttggggtgtagcgaggctttctaccagttggttttgggccaacaaaagatagtgttgttgtggagaaattgtttagtgcagttcccgacaagtttcttcacattgttggcaccatcgagcaatggggtgatgtgtcgaagatgtccgtggcggaggcaatcgggcgcttgagggcgttcgaggaatccttgaagggtcggcgccgcgaaccggaggttgagtatttgttgctcacacgtgcacaatgggagaatctctatatcaaggagaagaaaggagaagacggcagcgactccaacagtagcgagcgcaaggttgataggaagaaggtaaagtgctacaactatggcatacatggtcattatgctaacgaatgtcgcaaaccgaagaaagaagaagcgctgctcgctaccgcggacgacgagccaacgctcctgtgaagattgtttactaggtattccaaaataaagacaacaagattaggggggcaattgttagcactaatcttgttgcatatgattcttttattgttcgtcaccaagtaatcacgtctaacacatgacgtgatcactctagacaaaactaattaacaataaaagaatcatatgcaacaagattagtgctaacagatgtagcaccagaaatcctgacacctcccaatccaaagcgattagttttatagtgttgcatagataaacggtgtatataattcactaataattcagtatgcctcaacaacatgtagatgaagttcttccaactgctgtgccatgtatatatataacatgtagatgaaggcacatgctagtgtttaagaactagtatatatatgcatgatgctctgtatgctactattatacaaatttgcacatgcctgcagattgctggttttttatattttagcccttttcaaaaacttattcggtagatagacccatataaaagcttattactggaatatacccttttctggatgctaaggttcatggcgcctacgtccaatgtctcggtgccaataccctcgacactgtagcagccaatatgtggaggagtcgacaaccaaggaccaatttgtaaaagtaattctaaaaagggttgaaatgtaaatatcttttcatacaaataggtcctcaacacatgctggtgtcaagggcctatttgatagaaagcatttacgtttgacctttttaagaaattaatttacaattatgttatctacgccagtctctttaataatgaccccgttacaccagtgcctaagctataaacatgggcaagggctgtcaacgttagtatcgttggctctgagacattgaacctttgtgccaataacttggctctgagaaaaaaaaaggttcattcttataatatatttgtaaataaatgtttaaaactaactaaaatgtaaaaatttcagctgcagattgcatgtctgtttgtagacttaaggttgtaaaacactgaacttttggtaaacagaatacgcacatgagtctagacgaccgtctccttttttgctcatcaccaatggttgactgattttgaaatggaaaattggtttagatgtcagaaaaacacaatgtactacgctgtacaagctataaaaaacactatatacaatgttaataatagtattctctgcaccataaaccactataataaaacaaattttacagacacccccaattcgatcacggatgagcgtaaagaacatccatttgtaaaaaatatatttggatggtgtttagtacagatccactaacgcaaatcaattttcgcacgcggatctcttaataagcttaccctcctctccttatcccctcaactcctccgcttcacatcctcatcctctttcccatttactccctctccctctctcttccagtctcatttattcactttcctctctcttactctctcatgcgctcctcatcccctttacttctctctcacttgtaggccggtagaggtgcatgaggaggttggtgcactgcggcgacggttagtctagcggcgctcgaggaggctagcagaggaggctcgcgttgacgctggtaacagcatcacctcctcaggagctgccagccacctcgcagatccggcgatgctggccttctccctcgcagacccgatggcaacggccttcttccatgcaaaccagcacagccagccttctccctcgcagatctggtggcggcggcctcaggagcggtggatccaccgccactggcctctcttgtagatctggctatgacaatgatgggtggccctggccctaggaggggcggattcacatgcgttagcgtcaagtgtggcagtggcgttgacgacgatggcggcaagcttagcagtggtggatctagtggccacagccccgggaaaggcggattcgccgttgttggccttgggtgcggccagtggcggagccacgttgagtttgggtggtgcacaggaaccccctaaacttacaatgtctcacttaaaaacactagaatatgcagctttgcatcgaaatttttatagattttcaatggttagtgcaccacccttactttgatgttagctctgcccgtgggagtggcggggtctcaacaaagatgatagtggtagcggactgcatagacgatggtggcggcaagggcggatttgagctagggttttgcctatttgaatttttatttttgttgtgattttcgttcttgcaaacggatggcataactgaccttatgtgaaaattaccatctgcatggggttttgctactcgtatgggaaaatgttgatttttacatttttatagataaactcggggggcaagcgcttgcattgcccgcttgcaaaaatccgttgtagccttttgcagaaatgtaggctgtagcatcatttggtttaggcaaagaaagtacaaggaatagaactctataacttttcccaaggatcctccatctgaatttctttccctgcttgggtaccccaggaggcgcaggcagccctttcaaaaaaatcaaagaggccaagccggctcggcaatcatgtggacagtgttgcagttatggtctaccgtgatcggccataacgtcgatagaatttgcaaaactaaacttgaaccagttcctggcacctccgattcccaaaactcatcatcaactgatggctggtaggagatgaaagttgagagctgaaccaatagaagttggagccttccactgtttctatccaagataaccgactcagagttggaacaaacagaggttgagcaagtatttatataggcatccatgtacgtatatagctttgacatgtctgtataagttgatatcttctgcaacaatttgggatacatatagtacggtacggtacagcaacatcagtatatattaatttatatgcaaacataaataagagttgcgtacatcaatttatatgcaaacatagatataagttgcgtattactgcttattgggcatagtgtaggtctggcatgaagtgaattaagtgatatatggtgaggtacgaagtaaattaagtggcactttattcagggtgttagaatatacaccaacagaccaaatttggtttgctgcagaccgggatacagctaccttgtttgaggcttagagcctatttatgaggcccaattcaagaggagaacttgtgggccaatggccttaattttcatgaaattgatttaactagcaattttggagaataaccccaaaaaagattgggctccctagagattgaaaaactattcgcagtttctgctattgataatgcattaatatttctttcttgatgtgtttatagcctttaattcgtcaaaactccagatcccttcttttcaggacacggtgaccattgtgaagctcgtagcgctaagaaatcatcttgatactagcacatatcagctcaccacagctagcttcgcccatttcgagctgtgtccacttcgatacagggacatggttatttgaatctaccctacgggatcatctctagatgatcaccctaataaggtattactactctttgatcagtgcttgctgttaacctgtaaacatgcccatctcgaactaacgagtgctacaggagagcaagaaatcgtatcactacaactcctgagtcctcccaagccaaaaccgtaaggctatggatatatgcagtgcaggacacaccggcctaaaaaactatatatagaagttcatctatcagttgtgtctcctagcatgaatggacaaaacagcagctctgattgctattttatgctatagcaacgacatttgttatgatcctccatgggatggtatatgtaaacaatagtgtgtagtagtcatgccagcttgtaatttcctcctcctgtccacaaataccaaataatattgtttgtcttttattgagatatatagtgaggatatatgaccgtaattttaaatattaaacgaggagtggttagggagtgcaagcgtggtcgttgaaattaagattacgtaaaactaaattacagatggttgctgggagatctatactctcttttatttaagtatacgacgttggttaaaaatggagggagtagtactttggaagtaaccactgtagttttggtacagcattgttcaagttgatttccgttatgatatttattttatatagtcggaccatataaaaaaatatcttcataattatgctcaaaatattaaagaaagttttctacgaattttaaaattttcgccattctaaaagaaggaaggcaaagaaacttttccacatacagacttctaaaaaaccgcatacacttttacaatgaactaggaagatagcccgcacatttgcgggggcatgcgcattagtatgtttcaaaaatagttctaacaaaacaaattaaaattaaagtaacttattttcaattttgaattgagtgttctttatatctctctttcgtgaagaaatctcaacaaactttcattggtttttttaccatcctgcaagccctctctttaattacttctcatatatgtgcaattagttatgcatgtgaatcaatatagatagaaacaatattttaaaaaatatttattgtagtacttataattattgggttcacctatttgaaggaaaacgaatggtttgtttttttatcataatttttaggatttttaatttatttgagcgctatatagcatctaggagtgtttgtagcacaccacgcatacgacaggttgagagtgtttgtagggagttatttgatttttactatataatagatagttaatatagcattgcttattgtttatgtactgagttgctagctagaaaatttggatataaaagtgagccggtgagataataggagataaaatgatgggtccaccatattaagtgaaaatcaatgatatgatgttttccttttttttctcagaattttttagatttctctaatttattagagggccacgtgacggcttagtagtgtttgtaggagttacgtggcggtttaatagcgtttctagaaagtttagagtaattttatatataatatggtttttttggctttatcctttaggagttacgtacgttacgttcgtacaaaggtaacatgtaatttttttttgttttttaggtagtacatacgaacattgctctccatccatatgcatagcataggaaggatctttttggtttttttttctgtttacgaatagtcattgtaccttcctctccatccatattagaaggaatgattttaatagatttaatctaatagcctgaaatatcaggatcactaatttaagtaaaaatcaagagctagatgttttgctttttctcagaatttgtaggattttctctaatttattagagtgccacgtagcggcttgagagcgtttttaggaagctaagtggctgcttgagagcttttgtaggatgattaatggacttttaatatataatatatttttttagagaaccgcttcactaattcctagattagaacaagtttaatatgtaaattacatgaaaaactgcttgtacgtagattaattttgtataatccctatcgagaagatcgagatttttactcgcgaaggattgattgcctttgaaatggaaaaaacatccggtttggacgatacacaatgttttactatgtgctgccacatggtaggattcccagcaccataaacagcttaattagtagtaaagcctggagcagcatttgctctaggcaagtatgtaaaccatgaatggaactccatcctttccaagaggccaaagcggcttaactggcaatcatgtggacactgttgctcttatgatctaccgcgatcgcgctccacctagatagagtttgcgaaactaaactcgcagctgttcctggtgcctcccattcctagaactcgtcatcaagtgaaggcttgtattggagatgaattaaatttgagagctgacccaatagtacgtagttggagtcttccactgtttctctccacatatatggcctagacttcgaacaaacagaggtttttgtgctagtatttatacagagctttgctttctactgtccatgtcaaaacaagttcactattctacacttatgctgtatatagcacgtcacgtgtctgcacaagttgatcttttctgcaacaagatagctggtacggcacagtacaacaacataagtacattagtttatatgcaaaggtaaatagatgttgtgcattgcttattggacttagtgtatgacaggcacggagtaaattaagtggtatatgttcaggcacaaagtaaaattaagtggtacattattctggtgttcgatagtgtcaaatagacacaatacaatttccgatgcttcccacccaaaacatgacttgctgaggtgagaatatataatgaagggcttctggacatatagactatgagcgtgatccggccatccattgctccctaagttaattatatggtctgagctggtatagaagcacatgcaagagcatgtactgcaggtgaaaactactgtaagaaacatcaaattgcaacctaattaactatgctatcacctgcagcacaagccaaaataaacgactgtacatgatttcagagtgtatgttcgagttcatcacgtgtaaaaatgaatgtcaagacatcatgaaagtaagattgagatttttacgaaggcaacgaaactgtgtgaaggcacctcacacaggttgattatttgtcaacgagatggtagagaatttgttgcgcgtgtcgaccttaaggtgacatgagatggcgtagaatttctcaatgagcttggctggctttcggtcagggaaaaaagcaggaaattcatcaattatatccaagattatgtgaagggttttacaaggatttgcaatttccccgatcaagtgtcggggagttcaccccatagggtgtcggaggtggggacatggttatagacccacgtggttaggagatatggtaaccacttaaaatatactccaattacaagtatcactcggtggaggcaattacacatcaatatataaactaatcctagtccgcagccccacagcaatatgtcgacgcacacacgatatgacagccggtgctcatcgatgctgcatgtactgctcctccttgtcggcgtatccttgtcagccccaatagccacgacgctgcatgttgcattgccccactagctatgccgatgaagctggaatcccttaccatagttggcctcggagaacttgctcgggtgacggagtccaagaagcgcaagagctggagactggttcagccccgttcttcacacaggggcctggaccgggttaacacgcaagatagcaggagtgagcagtttcgttcctgtccgcactgcacccttgcaaaccctagattttacaaacattgtttttttcttggtgtatgtggagctaggacaaatactgcacaacaagcgtactagtattcctaaagcttcccactcctgaatggcggtgagaaatctaaggtgactacagtgcatgatatggcctcttgtcttgggagcttcacattttctttttgcgtgctgcagcaaaaactgaaacaggactgcctttttatagtgatcatgtatgcatgaggtatataattatactgtaagtaaagcagggctgccttttttttatagttatgtatatctcatctttttatttataactaattattataagtaaaacatcttattaatgacaaaaaataatttaatagaaaataatttgcatgtaaaacttttatatgtgtgtcctttagtaatttttttaaaaaaatatgggaaaacaaactacaacgatgaaaacctgaaatcaactccaaaattatgtttcaaaactcgaattatcacttatccttataagctgaaggctaagtgaagaaaacctgaaatcaactctaaaaattatgttttaaaactcgaattttcagttatccttataagctgaaggttacacgttgcgagccgcatatgaaaactacactgtacagatttcactgttgcaactttaagctacgacacaagataaaataaaaccattgtggctacacatatgcaaggacttgccgttagtaaagtcttgaagggaaaacccttatgtgggagctgatgatctttggtatgaatggcaacgaaaactgatgcccacaatgttcacaatcatatgctccgtatgccggaatgtttgttagttgaaatacaaatttgttcattgttataaggagatgtgtcacattcatcatacgagcaatcctataaaataaatcatttccataactaatatttagcatatattcctccaaaatacagaccaggcataatcattagcctttccaaaacttgttttctcgcttttcactagaagtctagaaacttttatacaccaaaatgtctacgaatagaattctgtgcaataaatttggacttgtaaacaaaccttcaatgctccacacatgccatgcgtacaagaaaaacgggtgatgcaagtctttcagttatcaaaaaaccaaactatccaggatgcaacagttgatacattgttataatgaatcataatgaacggactaactcacaggcccttggagagtagaacacagctcgttctacagaaaactatcctacatacaagaatcgtaaagaagcaaacatcataagttgtgattcacagtcacagcatgcacagacgaacagattagctaagagttggcttgcttttttttttcagggtaagagttagcttgctaactcagggcctgtttagatccatttgaaatggcaaatggcaaatggcaaaagttttggtggcaaaagttttggtattgaaaaagtactagttggtgtttagatgcatcctaaacttttgccattctagcactaaagtgagagagagaaagagagagggagtggtcccaaagcactttttggcacaatttgctactatggactagcaaatgtcaaatgccaaattgccaaattttgctactagtgtttagatccaaaatggcaaaaagtgcttcagaatgacaaaacttttgccattttggaggatctaaacagggcctcagactacattgtaaacaatcgtaacaactaacgctaccctaatcgcccatgttatagtctccaccagctaaaccagcaaaatcgcttgtgtcccatagcggaataaactattcggtatctctaagattcccaatgtctcccaatcctgaacagaatctagtgcaattatctataagtatcacgaagtatttctttccccattcattttgcacatatcgaaatgaataagttctagcgttgccaaatttcttgcctcaaatgtgttgtgagccttgcgacattgtttcgtttgaacacaagcatgacacttaaaacctttgatgaaagtgaatttcgacataaaacttatgtcagctaagcgcatcgtacaaccaaaattcaccactctctcatcccaaagacccgaaatggcatggctatcctcctgtcttaatttcagccccgaggtgttgcggtttggctaaacctataacaacattttgaaactaaactcattgcagttcctagtgcctcaaattcccgaaattcttgaaattacatatagcgtaatcaacgatagttgaggtcatattttatctccatatgctgatcgactcagagaaaccaaaatgtaggggtaattctactacaaagatttgtatttatagcagtttgctatactcgggagtagtttcgacatatctcaagttcagttatagctctctactacataaatggggtcttttgtctggccactccccctctcattttccatacgtgaaaacctctcccaacttataaaaaccgtccaactaaaaaaacaatttcccaaaaaaaaaatctacgactgtatagagtaaaccaaataacctacttcgcccaaatctttcgcatccacgaaactacagaattaaaaaaaaagaaaaaaataaatccttcccgtctataaaaatactgttgcaatacacgggtcaataactatttaaaaataaaaatataagttatttagtgctaattgggattaaacggtaaggtaacaaaatcaaacccttgtaccacattactttacactgggaagcaacacctcggaatccatttggggagccaaatctcccacgcaacacttctataaaaacgatttcgcaggtcgtgaaagatctattggagttcttgaaaagctcttaaatgaaatgaaagtgcactgaggaccatggatatggcccataggatgatgaacaggcgtttcctgcaattacataaacatgcaatggaaattagaacaaccggacaatccggtaccactgcagacagtccaacaacacacagaagcggacaacccggcagctactggacaatccgatcaacacagagaaaaacatgaactcgcctagtggaaatataggctcgtactgtccacctcggtgctggacagtccgacaacactaagtgtttgacactctaacaatgataggacaatccgaccctgcatagaaaaaataaaacctatagatagagtactttgcacactacttatatactagagctagaaggtgatcaacaagatataagcatgtacaaatagatcaccaagttactcaatatgacagcatcaatgcaaagtacaaaaagcaagagaggaggcactgatttagagcgctaaatatgaaatttgtagttaatgacgtttttatttgatgtcatttagagcaccaaatatgtatgtagagatgaagtcaaaagaatagcatgcgtgccaaagtaatgaagtatttcatagataagatgccaagaagaccacgcatggagtaacaatattagggtcccaatcctatataccgcttgcatacatatttcgcatgacttgtgattatcagaaacaaattaacactggaattcattttgacaagtatttccttaagagagatgtctgtgaaaatgtgattgtcacatgcggttccttctaaacgcataagaaaattgttgattaatttttacaggcctaggtcacaggtggttcactaaagacgtctataaattggtaatcatcagtctacaaaattatagtaatgtattaaaaaaccattgctgctatcatagtaatttgtcatatgttctgtgcatgacaaggttgcctctgttgtttgagtgtatcgccctcaactattttacacaggctgttgtatatatgatcaacaaaatgaagtaaatacacttttcagaccgagtccagtaacattagtatatagatgcctcagtacgcgttgggataattcaaagccagagatggttggtggttctcccacatatataacattgtggtatttgaaatgggaatttttgcatgtcaaatgaaaatatataaggaagagtattcatatataaccgttaattacaggtcctttgcgtcacaaatttcagaaaaaaaaatgagaatatatagttgaaggtggcaaattaatactcaagtgaatataaaaaaagctttaaaattttaacacatacctacaaaataaaaaaatggaaataaaaataaggcaaaagtaagaattacgattccaatcaagtttaatacatgccttgatgttagtttatggtcatgattagaagctgatagcctcagctggctagaataactagtttcatcatgctcatgtctcttttagcagatcatcacctttcttcatattcttacatagggatctcgggctcccactcctgcctcatagagatgatactgatctagatggggccgtcgatatgccctatctcattctaggtggcagattttgaagagtgctactaagttcaccccaaatctgtactatgcatctctagagctcgcaataatcctctgctatcttacatttctgcttcctgcgtagcgagcagatgttcctgatgcctatcaaacctatgataaataataaaaccttatatatatatatatatatatatacacacacagacacacacatattatgtacagcagagctaccattttctattcaataactcagacaagtctgaccaaatggtggcaagggtggcatattcaagttttctgggacagcagagctaccgttttctattgaattggaagaaaaaatattggtactgtaactgttgaagtatagtctgaatattttaatttgttcaacctagctagacagaacgctggaactcacccctgcagatcgatgtgttggactggtggtatatatactggtataaggctttgatatgctagacatgtgtcagatgttggtattgggtactgcaaccgactacaactatcggtatatgcaccaatgtagtcacactcacacatattcattgtcatgctatttagtgttgtatactccctctttccacaaatataacggattttcatttctttt

SEQ ID NO: 7232 - DNA, 30205 bp, Oryza sativa
ataggcacaattatttataaaagtatatttgggttttatatatgggaaattcttttaagcagtcgggtgaacatccatccgtttattacatgtcaatgaaatggttagaaaaagattcaaaaaaattgagaaaatatattaatatgtaagatatcaatgcacaaacatgtaagttcaaatcaacttctacaagttgtaacaaaaataaaaaaaaaaattgttacaacttgtagaagtcgattttgaactttgcatatttgtggagtaatatattatatattaatttatcttgtcaatttttttaaatgttaactatttacttcacatgtaagaaacgggtggatgtaatatattatatggtctggatttcatatttaagtcttaagtactatttctgtagatataattgtatgttatatacaactatatcaatcaatttataccgttataatccggacccatcataatctgatggtaaatatttttttatggttaatatgagaatttctagccttcgtagtgaatgtgatgtggttcctttcaaagctatttttaataactagggaggaagcccgcgcagatgcacgggtaatttatttattcttcattaaaagaatgttaaaagatgttatattaccatattttatttaaaaaccatacattatcttatctttaccctaaaattgaccatagactttgatacactaaattaaattacaagaatgtctctcatattaaaaataaatcaccatgtcctggttatatataaactcccttatcacaactactttattattgttctcttgaaagagctaggtgcctttttaatagatagaattacttattaaaaaacaaacttaatatatcattaatacaataaaaaaggcatctccatttcataccgaagtgcacatgtctcacttgtgtctaaatgtataaatatttttaaatgccacttctaccaattaataagatacaaccattaaaattagatataaatacccatcaaatgtgttaagttggccatagctgctaaggctttattctccaatgccttgaaatatggtcccgcatcgatgtagccatgcccctcaagactaacgttaatcacaattttaacacctagctcactgtctacacacttaaaaaaatgtattagtaagtaggctagttgagttctactaccaaaagtgaaaggagtcatagaggactcgatggactgatcatatataggtaggtacaaacataataaagttttagttttaaatttaaggattaggatggaaagattaatattttttaatcatacgtgcgtacctatgtttttccaggttttttttggatgaatagtacttatttttccatggtacgtgtacgggagattaatatggagggattactttaatacatctaatctaatgtttaaaaatattaggtcatgtgacggcttagcagcgtttgtatgatgttcaatggtattttagtatataataatattcttgtctcaatgattggtggatagcagtacatatatagaattgatataaaagtttaagtgtaacatagaattgacacataaggcaagacatgtatgagtcaagtacactgggccttatatactatatactcagattaacttaagcttaaactccaaagattcaagaggaaaagatcaacatatacacctcctataaaaattaattaagacatatcagtctggttcatttaatcaaatttagtcctttaaacattaaagatataattatatcaaaatatttatctggacatatctagatttacattattatcataattcatattttaaaatggagataatatttttagtgctaatcataattagagtattatagtttgggatattgtagattggtttaaatattaaacttatgatgatatcagaagattttcatgaaatatttaagtaacattactttgttttgtgaaaaataatattattttaacatatcaatattttagaatgatggttttttttggagtgctaatcagaacttattgttatattttattttgtgatattaccgagctaatgtaattatgcatgattgtgaaatgatatatgatgatatgatctacattatctatgttctacacaatatttttttattattgggatggcatgcgaaaggttcagatatgatttaaaataatagatgaatttttttttggaatgttactcatgatttgagtgtttttattttttcatatgtatcatatttattttatttatatgttttatatagtgatacatgatcatataatatacattgtcgttttttctatttttttaacagcttcaattgcatcctaaggttaggatatgataaaaaataaatatttcttatgagttaattaattaagcaccatgaatacggtaatgaagaatgataaaatagacttatgtggaatttaaaggttatgattatttctttttacggaaattattcaaaattattatttttaattgtaacaaacttaaaagaaataaagagatgagaaaattggataggagggggagggattcgtacgtacgtacatagggaggagggtgggctggtgggggagaggggaaggaggtggattatgggatttttttttctaaaaataaatctcatagataaaaatagtgggtttctaaaagtaaatctaatagataaaaatagtgggtctaccgatttattagagagccacgtggcagcttagaaacgtttgtaggagtcctacgtggtggcttgccgatttatcaaagagccacatggcagcttaggagcgtttgtaggagccccacgtggtggcttaagagcgtatgtaggaagtttaatagatttttagtactccatctgtcccataatataagagatttttagttttttgtttgcaacgtttgacctctcgtcttattcaatttttttaaaattattatttattttatttgtgacttttattatctatagtactttaaacacaactttttattttttatatttgcaaaaaaaaatttaaataagacgagtggtcaaacgttataatcaaaaacttaaaatcttttatattgtgggacggaggagggagtatataatagatatgataaatagatgtcaattgtcctgcatacctcgtagatgtactagaggactaaaggtccattcagcatgccccggccgatctggttctctagctcgcaccacacactacattgcctaacctcgatgacaggcttcgtagctagcacaaggagtgccacatactccctccatcccaacaaaaacaaaccctagtttccgtgtccaatgtttgaccatccgtcttatttaaaaaaattataaaaaaattaaaaagataagtcacgcataaagtattcatcatgttttatcatctaacaacaatgaaaatactaattataaaaaattttcatataagacggagagtcaaatgttggcacgcaaacccgtggtttacctttttttttggatggagggagtaaatgatagtgtaaatcatcatataattaagtacaccccctctcatctttcccttaattaatttctatcctaatctcgtttgcggacacctgaggcaacgtttatgtatgctaagtcaacgttgacatagagttaatcagcgatcgatcactggttgcagatgctagcggcaatatggcaatactgttaggctgcgttcgggagttatagttccctaatcttttccctcatttttcgcgtgtacgcttttcaaatggctagacggcgtgttttttcaataaggaagttgctttaaaaaattatattaatctattttttttaaaaaaataacaaatacttaattaatcatacaataatagatgcttcattttgcgtgctgggacaatccctctggaacacagccttagttatatgcagcacagggcagggccacgggacatctatatatgtatatgctcaaaaacatgagttttatgtccaaacaagaaggaaatatttgcattgacaaacacaagacccccgaagaaattaggatgactcccacacgggagtggattctaatccctcaaggggatatcccctcgtatatctttttttttcaaattcgatgtaaatagttgtgaaaaattctaaaaacaattgacaatgtagagtataatgatacctattagtccaccaaaattcatgttcaaattcgatctacacatcgagaaacaaaaaagacaaatttagatataaacagtgcactactattcatacgctgaatttgtcctttttatatctcgacatgtgagttgagtttgaacttaagattttgtgaagttgtatatatgtgttgtatgaatgttgtcaaattttttcagaatttttgataaccgtttagatggttttagagcaaacgaggaaacatcccctcgagggattagaatggtttcccctcccacacccacgatgcaacatgctgctgcgagtgtcctgatgctacttgcaatgactatctacaactgtgactcggcaaatctgaggctgcagctctcgcatgtggacgccggccgtggactcacccactgggagcttctgcgccgcatggcgcagcgcagcaaggcccgggccactcatctactctctgctcaagctcaatcggccggccgtggccgctcggcgagcgcccccgtgaacccgggagcctacgacgatggcttccccaccacggaatacctggtgcacctggccgccggcacgccgcggcaggaggtgcagctgacgctcgacacgggcagcgacatcgcctggacccagtgcaagcgctgcccggcctccgcttgcttcaaccagacccttcctctcttcgacccctccgcttcgtcgtccttcgcctagcgagagcgagactactcctccctgcggcggcggcggcaacgacgctactagctgggcctgcaactacagcatatcctacggcgacggctcggtgacacgaggcgagctcggccgcgaggtcttcacgttcgcgtccggcgccggcgagggatcatcggctgcagtgcctggcctggtattcggctgtgggcacgcgaacagaggggtcttcacctcaaacgagaccggcatcgctggcttcggccgcgggagcttgtccctgccgtcgcagctcaaggtggggaacttctcccactgcttcaccaccataaccggatcgaaaacgagcgctgtcctgctcggcttgcctgccaatctctacagcaacggccgtgggcgtggcgccgccgtcgtccagaccacccctctaacccacaactctcgccatccaaccttataatacctgtcgctcaagggcatcaccgttgggtcgtcgaagaggcagctaccggtgccggagcacgccgcgatcatcgaactccggcacgtccatcacttcgctgccgccgcgcacctaccgggccgtccgcgaagagttcgccgcgcaggtgaagcttcccgtggtgcccggcaacgccacggatcccttcacctgcttctccgcgccgctgcgggggccgaagccggacgtgccgacgatggcgctgcactttgagggcgcgacgatgcgcctgccccaggagaactacgtgttcgaggttgtcgacgacgacgacgcgggtaatagtagccgcatcatctgccttgctgttattgaaggcggcgagatcatattaggcaacttccagcagcagaacatgcacgtactctacgatctgcagaacagcaagctgtccttcgtccctgctcagtgcgaccaactttagactcgcatcatcgccctagccacgatcgagcccacgacatccgtacatcgtccgtgctcaatgcgataaactttatagtcgcgtcagtcatcaccccctagtgtggccacgatgtgtttgccatctatgttttgtttcacttactaatctacgtgttaacttgttatatatagctgaataatttggtgccatacttagtttacaccgtgtaaaatccttctcttttaccttgaggacggtcaggacccaaggtcatataacacgaggcaattagcagttcaatctatatatgcacgtatcgtgctgctatctgtatcaaattcattgccgcggaggctgcaaattttcctttgcgaagaatattcagggaatcagctatgccaagtggcgaagccaggatttgaggttgaaagagtgttaggggataagtcgtaagacctaaccgtagcaaaggaggctaaatattcactgtcgataacaatcaatgcttaactagtcctttaaaaaaacttaaaatttagctctttaacaataataatcactactagaaaaataatttttcatgacgtcacactataattttcactggcggttatatgctaaaactactagcaaaaacataagcagaggttgggggtataggaccaccagcgaaaaccgattttctctggcgcccacgttaagacgtccgccataaaaaatactctatttttcgatgcggacctcttaagtgtccgccaacgaaaaccaacattttcactggcgattactaaacagttcgaccagcgaaaaaacagagcccgctaaaaaaatgacgtcatttaaaatcacgcgcatgctgagatattttccctcacccacccacccactgcctctctctcctctcctcctctccacccacccacccacccacccacctccctctcctcctcctcccccacctctctcccctcctcctttcctgcgcccccaacctcctcctcctgggaggggcgcggcactgacgacggcgaccacgacgggcgggagggcgcggcacggatgtgcacggtgactggcgacggcgacgacggcgaccacgacggaagcggcaacgacggcgaccacgaaggaagaggcggcaccgcgccctcccatcgtctcctctcccctccgccatatctgtccgaggggaggaggctgccgtcggggaggacggacgcggggaggaaggatccgcccggcggcgcgcacggggagcacggatccaccccggcagcggcgcagggagcacggccacggggcctcgggcggtggagcgcgaccgtcggcctcgaccttgtcacgactgacgccgccgggccgcgggcagtggtgctcggatttctgtggatttgtgtgcatttgtgtggatttatgtggattgtgaatggaaaatatctgttgatttgtgtggatttgtgtggaatgtgaatgaaaaattttgattgcctttattgtaaattgttgatgtaaatttttgtgaatttgtgaatcgaggagtggatttgggaataatttgaatcggtgttgatggaggcgaatggagcggtgttgccccatcattttttttaacctggtcactactttcgcttgcgactggtataacgcaactgccagcgaaaatcgtttttcgctgacggccggtataacacaaccgccagcgaccgaaaattgattttcgctggtggccgatctgctagtgtacaccttgccaactatgtacagcacattttggccacgagtagtgtgcagtccatcatatgaatacacatgtggcagtcattactgtcagtgacgtggcgtaggctatcatgacctatccaggtcaacccgtcacacatcgagctcaatattcttctccgtcacatcaacccatataactcccaactcccagagtcttacgcaacgatcctagagacttgttatcgggtgtgatccatgaaaattattctatattattgaacattatctctgacatcacttgtttgaatacgtagtccggcctacactactaaaaaaaccctcatagggaccggccttataggtgccggttcatttataaccggcacctatgagacttttcccatatccgcacgttgaaaaaatatacaaccgacacctttaaggattataggtgccggttcattaggaaaagctggcaccaatattataggtaccggttttaagaagaaccggcacctataatataatatattataggtgccggttaattaaaaaaccaacaccaataatatattacaggtgccggttaattaagaaatcggcacccataccaaaccgagccgaactgggcaagccaagccggcctcatctccgaacttatccgcgcgtaggtcttgcttctcttccttatccgcgcgcgagagaagtctcgactcctcgcgctcctctccaccgccctcccctcctcctcctcccgctcccgcccacgccttctcctccgccgccctcccctttccctccccctccagcacctgccgagtccccctctccctccgctttctctctctccagccggccgctccccccctccgtccccatctcgcagcgacgcatggatcggcggcccgtgacgaggaagagcagatccggtcgcctcttcctctccctctccgttggcttcatcgaaggcggccagatctggggagggggaggtcggggtggtgggttggtggcggcgatgtccggcggcggtggtacggtggccaaggtaggtggtgggcggcctccccataggtgaccaggcgcagatccggtctccctcctcctctccctctctggttggggcggtgacgtgcggtggcggcatgcggcgacagccgtggccaagggaaatggaggtggcagcggcggtggccaagggaccctggctgcgattggcagtggcgcattgacaacaacggagtgagttcgtgtatttgcttgttttgttgatctgtgatttgtgattgattggattgttgttcactcgggacttgtgattgttgttgttgatctatgaagaattttgttgttgttgttgttgaccggatggaattgcatatgtaattgttgttgttaaccggggaattgcatctgtgatttgtgatggaatgcatcggctcggctcggcttggagccggcttcttcttttttttgatctgggagagcacaaaggtgccggttctacaaccggcaccagtgacatagggtcattggtgctgaccaaaaggtgtcggccaggaaaccggcacctattgccggtttccaaccggcacctataagagtttttttactagtgctatcaaccataagccagtaaaatcatattgagtctacttcaccatattcctaaccagatccacaacttggatcctaagctaacacaattcaaaaaactagtcctattggtgtgaactgttttcatcttttaagtttattttttccactctcaattatcattgtgggactaaaccaaatagttatagtgtaaaagctataatatattcattctagaaaacgaagaaaatgggacgaaaaaacaatcactgtccatataagtacgcaagtacacaaaagattttcctggacgctggtcccatttggtcgagcttaaacaaattaaaacccctatacgcttcaatttaaactgtgatgctagctagggacactgttacgtactgatatataacagcgttccatcatctggcttatgttcttcatgtatcattcagatcgaatgactatatgaaattacgtcgataattccacatattatgggtagtgtaggagacatcctattttcccttggagtcttaattaccactacttagcttttaatttgcctatgagcatcaaattaaatgtgaataacctatccttctctctctttgaaacaaggggcgcttccggttctgtgcaagcttctaacaattttgtttgctccatattaccatatctctagagtcaataattttctatgaggaactactgaactcaatcaggttgagtgttattttgtcatgcctaggaccagcgtatgaagcagaggataatggagaagaaggtagaaggcagcaatggaaaaaaaaaaatcttccttcttcttctccatctttttcctccgagcaagtcgtcctctacggcgaccccaagctcgtcggcaaaccgaggacacgatcgatttccatgtgaactggccgctcttatttaccagactttggaaatgatcacatgaatatattttgagataatctattctattttgtacaagttcaacgattttacatcgacattgtctctttctataatttaccggcgactttatcgaaaatacgtcattgggttgggtattcttttcaaaaatacccaaaataccctcatggacatacaaggttaacaattgatttatcatattagaactttcaaataatatgaaaacttttatgtggccttctttacacaacatgaaaatttagtatatttaatatctttacaaaactaaattttcataaaactaaatagacctttttagaccttttgatttgggataaatcaattgttaaccttgaaaattttgtaaatttttttggtatatttacaaaactaaatataccaaaaacaaattccataaaacttccacgttgtgtaaggaggccacataaaaattttcttatttttttgaaacttctaacgggataaatcaattgttaatcttatatgtctctaaggctgagttcggatgggggagatgggaacccaacttctgcgtacggaaaacggagcagtccattaacgcgtgattaattaagtattagctttttttttcaaaaagggattaatttgatttttttaaacaacttttgtatagaaactttttacaaaaaatgcaccgtttagcagtttgaaaagcgtgcacgcggaaaacgaagggaaggggatgggaaaaggtgcatgcgaacacagcctaagggtattttgggtatttttgaaaagaaggtctgacccaatggcgtattgtagaacaattgataaagtcgccggtatattatagaaagagacaatgtctatggtaaatcgttgaactcaaataaactcagtggtatagaatagattctcttgaaaattagagaccccaacactagtacagttcctcttatttgtacagacccctactctagtacaaaccccatacatgcttgcgttttgtgggacgtcacaacgaagtcatctcaaacagggcaaaaagatgcctactcgcacaaacatgttagatgtgcatagagcccgtcacggatgacacctattagtgacgggacccaacttgaggcctgatatagagaaccaatgatatctttgtgggccttaacagaagcccatcaccgatgtccatcattcgtgacgggctccaacttgaggcccgattgagataactattaggtctgtcaccgatgtccatcatccgtgacaggctccatcttgaggccggattgagataactattagacccgtcaccgatgagtcaccgtgacgggctctagactaagcccgattgagataatgcttgatcatatttagattagggttcactctcgctcagatctagatcgaaaatttttctaagtcccgccactctctgaaccctagcaccaccgccctatgggagcctgccgccactgcgcctccgtttgggagtgcgacgccattgtccactgagcccggctgcatcctcgagcctgcgttagccaccgttgacctcctccacgtcatcccccgccgtccttgcgccgccgcattgacgtcccctgctgtccccgagcccgccgtcctctaccgacctcctccacgcagtccccgagtaggacaccgtcctccaccgacctcctccacgccatcccccgctgtcctagagcacgcctcgagcacacccaccgccgacaaccttccccgagcacgctcgcttcctcgacctcctcctccgccggttagaaatttttgtgaattagtaggatattttttttgtaacactaatgtatatatttatgcatatatttgttatgtttatgtatatactcacaatgctaaatataaatttgttctaatttacaactcggttttgcaggttttgatgcttagcatttgaagatgttattgtgaaatatgcgaataatggatgtgtgaaatatgtgaataatggatgtgtatgtgaatggatgtgttaaatatgtgaatggcatatgtgtatgtgaatgattgtatatgaacggggatgatgggatattgtgaaatatatttgtttctgtcattttgcagcgggcatagctagcaaaggactgaggctagccaaaaaaacagaataaattttctttcgggggaaatactcatcagtgacgggctttaacttaagaccaatgggaatgacctcatccgtgacgggtttaagttaaagcccgattgggttgagtcatctatgacgggctttagtttaggtccgattgggattgtattcatccgtacatgacgggcactaattgtggcccgattaagattaggtcatcggtgatgggctcttgtttgactagtcatctgggtcaaacctatcggtgacgggcttcagtttaggtccgacaaagataagttcatccttgacggccttatgcctgatagagatgacttcccaatcagtgacctttacaccgtgatgggtgccatatctgacaccgatgaggtttgccgcccgattgagatgtgggtgaccgttgtagtgcaaaatattaattatgtgtttgaatttaagctactactttcgatatatttaggatctatagattcctttttttttcagttttcactcttccaagttcactgaatcggctaaaccaagttgtttccttctcaactctgacagatggttgatggtaattataactacatctgagaagtgtatttcgtgacgataatatgaacatgtgttctagacgataggaattcatttttctatttagtaagagaaaattgaattgttgtaacagttcttcttctacttagcagaaacgctactacacatatactcctatgtaggtggatgagattctttgatatagctctaattgtcgttggttgtgaatgaatatctgcttgtttgctaggagaatctagatgaaaaaaaagaagtgtatcagattaatgccagcattcctaacgtggttgaaaggcaatgaagatcaagaaaaaaaaaacagtggtataagagacccgtcctaattttcaggaatgctgcgtggtcgcacagcttgtgcgtccgtacggacgggcctagttcccgatgcttgccaagcccaagatatctcttgctcgagacatatgggatgctaaccataagcatgaatccgagaccggacaaaaataaaatgctggtggtagaggcgctttatgtactccggtttgggctctagaccacttatagctcaaggaagaccatatctactactacttaaaaaataagaggtgcttccatcgtccgtcaaaaaaaccgggtgaaaaaaaaccggaacgaatccgattcatcaacgcggtaaaagaatatgtccgattccacaaaaataggaaacaaactcccatctgttttcgtttgagctgattaggactttgtttctgtttgggcgaataggacttggtttgaattataccaagttctattcggttagcatcaccaggagaacaagtgcatatatacatacatagtataaaaaatcatagcacataacaaagaatcacatgcagccttatagcactttgcaaaaaaacaaaaaattagatcgaagggggtcgccgccagcacacatatatccaaataaaaacaaaaaattagatcgaagggggtcgccgccgctgccgccgtcgccgtcgccgtcgttgccgaaccgccgccgtcgccgtcgctgtggatccggtggaggggagagcaccgccgccgccgcctcccctcccgctagatccgccggcggcggcggcagagggcactctccggtggtgggggagagcgccgccgccaccgtcggtggtgggggaggactccaccgccgccgccgctcgcgggaggaggggcgccgtcgccgccgctcgcggggcgcctccccacccgctagatccgccgccggtggtgggggagggtgctgccgccgccgctcgcgggaggaggggcgccgtcgccgtcgccgccgctcgcggggcgcctcccctcccgctagatccgccgccggtggtgggggaggatgccgccgacgccgccgtgggtggtgggggtgccgccgccgccgccatcggtggtgggggaggggcgccgtcgtcgccgccgccgctcgggggcgcggaggagagggcggcgaagtgagataggagggggggaaatgggctagggttccgcggctgagagggagtgggttttgtttccccactattgacgctcggtcgtccgatcaaaaccctagagatcggacggctggtgtcgtccgggccgaaatcggcccaagagggatcgagagtgaggcctcttttccggcccaagcccaggttgcggcctgggggaggaaaagtgcgcccgcgcatgcgcaaaaggccgtgggccgaccggcataggtcggaaataagtctattgttggtccctcgagccgaaaaaaagagaataagtacatttttagtgctcattttttcagaagcattacaattatagttctattgaatatgtttatttcgaagcaaacctataagaaagtattttctttctttttccaattaaataattgttaaatgatgtttgtattaataaaattagcaattaagctctgaaaattccaataaaattccaaagagcgtaactaattatggagaatttaataaaattaaatttaaccatgtcattttatttaaccatggagaatggagaattttacttgtaaatttatttaattatacacatacctacttaaaaataccaaatatttcagcgaatttgtattttaattaattgcatatttttctgatctgtaaacttcccggtgcaacgcacgggcacttttgctaaaccaaacaacacttttggtcaatatacacactctgtaatcacccggtgcaacgcacgggcacttttgctagtatataatataatatatatgccatatctcattgtcccgtgtaagaaaatcctatagcgtatatgcgatattaattacagtaaaggactaaattattattattctttttagaaaaatgactaaattattttttattgcatggaaaatgctgctgtcgagtaccatgatttgtgtgggcattcagattttaacaattggtagggggttgagtcatgtacccatatagctcaaccatcacactagctagcttcccctttcattattaatttgatcctgcaataattcatcacatcgaaatggtttcacttacacatgtaacctgaaggcccaacgggatatgtatgtaagaaccgaagatcctttattttgtacttccgtatttggcataattactttaattttttcatcacaaatataacaaaaatcgtgtgtcaccaaatttgatgaagttagtccagttatgcatgatataaaaaccgaaaaacaaagaaaaatgaagctagaataatatattatcagtgctacccaaatagagattttatcagtgctaccacaaattcagtctttcacttcggataaaaccgttaacataaacacccgtatttagcgttgctcagtattaccaattatacacaaatgcagtatctgtaatgatgcataatatgacttgactgcaggcagaatgtgagcatagacatgcaatggatgcgtttggaatttcaggaatgcgagagtgcagtgctgtgagccgatgatggtcatagctctgattgtgcagtccccttggaaggtatgacgtaccgtagggttctaaaacataactttccttttttctttagagtgtacagcatgacccatcatgagtggccgagtgggccacctaggtcacatttgttgacaaatcaatgcggtgatgatatacgcttgtcacaaattactgcacatggtcacattgtacaacttcaaagatgcaaaaagctctatatataaatactggtacctattattaattttttttggccgaactgtgtagcagcatatatggagagaaagagtgaaactatgaaggacctcaactatcacaagctcagtgaaaattcatatcctaaaagcctccatacatgatgatgagtcttgggaattggaggctctaggaactgaacagcaacgtgaggtcgaattctatccattttgcgtgcaaccacagtagcagaccacgcatgcaatagtcttaattaggaggatctccaagtcactttggcatcttgggaaggcagagcatggaaagaaatgaatttgatgagccatcgagaaccattcgaaaatgtagagctcaattcgtcgtagtgcaaatgatgctacagccctccttgatcgatctagctgttcatggcttcatgctgatgggagtagtagtaacatggatccataggacatagggccagccggccggtcctgccagttgtggacagtacattgtcttgtccaacatttttgttgcatttcaagaccagccaaaccaaatgttggagcaatgaaatgtcgtgcaacatctcctcttgatagggattaaacaaatatgcatgcacctacctagaagcaatttctaagtaaatttcaatggaacacgttaaattgtgcatgtgcaaaattctatatacatactattgacaccgaaaattggttccatgccaatacacattggagcacctttcattctttcaacctgtggtggcacccggagattcatcgccatataggggcagacgccgttgaacgatcacttgggagaaaccccattagtgtgaaaccggtttatcctaggatcgatataggggatgtcctaaaatatcatagagacgagagacgagggagtttgggggatttgagggttaatagataggcaaaatttatcataggatacttaatgtttaatgtttgttgtctttactgctagacatccaaaaaatatgatacggctcgtggatattctaaaaacttgataatttgctagaggacaacgataccattattttattatttccgaaacaaatggagagagaaacagcattaaaaagaaaagttagcccctcctcctacatggaactctggaagttgatcagaacctacccatcgtgtccgtgcatgagaaaatttacatttgaaatgaggctatttctcagcaaatcgaagagaaattattacagaacagagcattctgtaatctaaggacattgcttctcatttgggtttttccaatgatcagtgactttctcatatacttggattatcaaagtcgaagaattgcatgatgttaatttttttagataatggaaatgggttacatctccagcctctgcccgtaggcacacatccaaaaagtccagaagtgaatagaaaagaggttaaaaaaggcgagatgggacaacccccaacttctgccgataatatgatctactaaaatcatgttttttaaaatcatgtagattctatcatgaaattctgtaagtactacgccatgcaaactggaataaaagttccttggctaccaattccaagcgtgtagcaccattgcgcatagtatcctgttgttcctgtaaaagcatcatacatcaagagtggagccaattgaaacacatgaagataacctgcatgatgttaggcatttttttatgattaaaaacatatcattacggcaacgccaaattgaccaacatagagcactagctccaaataaaatcattttttttgtgggtctaggcactccccttagctagttaccaaaaatatcttttgcattgtggggagggggaatattgaaggcaaagaagacacatcgccaagcaaaacgtgcaacatgacagtcaaagaaaatatgttggatggtctcttgtgtattacaaaaacaacattgcttgtttcccctccattttctctttatgaggttatctttcgccaagattactttttttgaagaaaccacataaatactttgatttttagtggtacctttacctcccataagatcctcttgtggattcttacattggaattgatgatcgcattatacatggatttgaccgaaaaattgccatttttatgtagcgaccaaataaagcaatccttttcatttgacaaggttatgttagctagtcgagaaatcaaatcattccactcaactaactttggtcctataattgatcgtcggaatgaaacattcaacggtgttgtgctcataacctctgccaaagtagaatgtctgtttcgaaccacattgtacagagaaggatattgatatttgagtggttgcaagcccaaccatgtgtctttccaaaatcttatttccatcccattaccaggtttaaaagatccatactgaaaaatttgatcttttactttcattaggccagcccaaaattaggatgttcctggtttgtgtgacatgtgggagaggggtttaccttttaagtacttgttgcgcaaaaggtcttgccataggccatcaccattaagaagcttgaatagccatttgctcaacaaacatctattcatgatatcaagatttaggacacccagtccaccttgatcttttggccggcatatataatcccattttgttaacctatatttcttttactggctatcactgctccagaaaaagctcgatcggcagtaatccagtctctgaagtacacctcgaggtattgcacgatgttaatgaacatcaagtttttgtcctgaagcaccgtaagcttcctaaatcaacatcttattctcacctcttctgaattagctacatgggaccctgcctaattatgcatgaatgcattcatatgcttcattaggagtttaggactatacattggtctatgtatatgtcgatgtgtccatttcgtcaaaagaaaagagatcccaatacattgatcatgatgtttggaaagctggagctaattaagcaatgcatgtgacactagaattccccatactttccatgcctaaactcaaaccaaaatcaacatgaatttatcgaactttcaatacatataggaagttaagcgattaatccaataaaaacttcacactctcttgttatatatactagaactttaggcgcgcttcgcggcgccctacccgtttgttattggtaaaaagtatcacaagtcaggatatgtatgcacttatattggtaaatgttgagtacgaaaggacttcattctagcacaggctgtgatataacttgaattccgatgttacatgatgatttgaaatagaccctgaatactgtcagataaaaaatacctaataagttcagaaaccacaattatttataatacccaaaagagcaagaaaaggtataataatgtattgaaaaacagtttaatcattcatcctcttttaaaagaggttaattcagttccattacggggcatgaatcacaactaagttgtaatgtaaaggactatgtttgcaatcacttaagaaaataaatattcttcaatcgcacatggagactcagaatttgtatgcaccaggtttctggttttcattgcccgtaaaattaagttcctagcaatcctggaaggtgagtagacactttactggtgtgcacgcgcgcatgtttaatgtgacatggagattattacaggcagcacactgtggaaatggcagagttaggtataatggtaaatcactttttaccccttttcactggaaataatggtgttcactcatgagggagaggcaccctcaaatttccttactaaacagttataggtgtaaagaatgttcctacttcctgtcctgctaccaaatagatagcccagttctttcgtgaactctgaaaagacaatgaaatgcttttgcacttgcacatagtggaaaaattggtaaacaaaaaaaagactgccagccctggtttcttcctcttatcccttatattaatttaaaaggaaaagattgacatcatgttcacaaatttccaaagatttgggtataaaatgatacatcttaaactgcaatgcaactgcttagcatagtataacatgagaaagcacagccacaaggttgcttgatagttaaaaatctacttcacatattaggaagaaacatgcccctacagttttgacataccttagcatcatatatggtggcaactaatcctttttacatgaataagaaaaaggagtcatcggatttgacatttataataggattgcacttattactctctaaaaaggtctgacttatctgcgtgcataacaatacctttcgaaaaaatacatcatatcagatgaagagctatagaaatacaatgcacaattaagctgaaaggagcatatagaacaaaaacacattaacaatgtacagcacctactaaacctatttgattacatcaatccactgaattatcagctaaaatccacttctagatgctccctcaatcataccagcttacaaagaacatttttcggactaatctctgcttcaatatctggtatttggtacataggcccaagaaaaaaaaaatcagagagaattttccatgttctgatttgtgattctaacttatgcagttattaaacataatccaaacaaaaagagaatattttctatgttctataatttgagtcttaattcagattagattgacctgaaatctaaagatgtcatgaatcttcagattttgcatttgattctgtgacattatatcaaacagctagatgacaccttaaaaaacacaatgaagcaaaaccatcaaccatccaaaccctgtcctgactcctgaccatctccttaaaatatgtaatggagcagagcgaaccacagtggtttcatgaaaataatcagttgacactttcagcatgctgtcagctggttataacacacctactgggagcagttatgccagagctgttgcctcggctgaaaaccattggagtgaacatctaagctttggttgttggaactatatacaaacacaaccaaagaaaaagatatgcagtacaaatcagaaatactgtagcattcctgattaaaaaaaaaggtagactatcatttgtaagggaataatggtgtatgaaaaagcaaagctagcgagggaactggaggcaggaaatggaagatacatgccaagcatacataagtgagtgtagaaaggaacgggttgtggcttaactcaccaaaagtgaccatgagaagcaaactacaaatggaccctgggcaaggcgacaacacatggttccaatatcaccagatctggaatcgttaaacagtggtggtgccgcacggccgacagagcatcaagctaaccagcacccacagtattgacaaacttgagcaccttctatggcagcaaccaatcctttttatacagataagacaaaatcaattatcatatttgatattcatatttataattagattgcattttttctcttttttgaaaaaagattccacttatctattgaccaacacttcaaagtatcacctagagtagaaggcaaactgaagagaaaaacatagattttaacaatctttcaccttcttgtacatagaaacacaactgtaatgtacattaatctgctttttcattagccgatgaggacggtaattttaacagagctaggaagatgcaaaataaatggctcagcaaaaaagagtaagttgtgtctcctaggcaagaagttttttggatttaaatcaacagcaactatgaaattgtaagtcccttaaatataattgcatgaaagcacataaaccatttcttgcatacttaattaaactcctactcttaaacccaatccagtctagagcatacattttcatttaataaagttttcccgaataagtaacttgagttatgtcacaaataatgttttcactattttcaagtcagggttatgtttgccaggcaaagtcaatagggacccccaacatccaaagcaacattataccagctcggaaaaaaatctgagcatgtcaggttttattggctgatgtgcactgagtaacataagaaaacttaattcaccatcatttcacataataaacatctactgaatatgccagtattttacacggcaaatataagaatgctagaaaaagaaaaataatttgattcaccatgcaactttctccgcttgaacttttacagccatggttactcaagctgtcgatccacccccaagaagggtcatcatgctggaacaaaagtagtccatgcataacaataacttttcagagaataaatcatttcataggatgaaccatagaaacacaaagcacattcaacctaaaaagagcaggtgtgtaggtgctcgacggcatggcacacaatgacgcaacctcaaactggcctaaattataaagtggttatgaacattcagattttgcatttgattctgtagagaactacaacaaatagatagatggcacctaaaaatcggatttaaatatgcaaatataaccagcttattcactacttagaatcccatgttatagctgaatctaatagttacagaggttcgcaggcagtgatcaagaaatatatgggggtatcaattttaattaaaaaacatttgcagttctacaggaaaagatttgccatctatatatgtaccaagatttcaagttctaccaagaaaaatgcagagtccctaagcagcgcatgtaggtgtatgaatcttggtagatatttgcacgggccataccattaatctctgacctccaaccattatatatatatagatatatagatggcaagcggctaagattgtggcaataagtcaaaagcagctcatgaccatggacaagcaagaatagaggaaaggtttgcactcatctgagaaaaaacatggctggcaggtggtagacacagaacgggaagcagatcagtcatgcatagatccaacatgaaggggatttcttcttctttttttcccttgcacacatcagaacgacttccccaatgggtcaaggggtgaggcaacagattgacctccttactatcgaactccatcaccgtgccgcggatctagtgccacgccgtccgctccctctgcttgctgggaggagagcggtgggggagtgccaggagatgggggagaacaggggagagctcgagggggaggctgtcgtcggcgaaactccatcaccgcacccaaatccaatcctgcaccatcgagtcccccagtccccttgctccactgggaggagagtgatggagggagcaccaggagaaggggaggataggggagagcgcgaggagcaagttgtcgttggcgaggagaagccggggagggaaggcaaggcggcggcggcgcaagagcggggaaaggaagagaaggggtgggtgaacagtggtggctagggtttgaggggaatggaggggatagggatgttctgttttgcagaaaacacccttactttccttttttcagagcgcggtcctatatttggaatttcgtctccttcacgtaggatataccaagacattgagggcttttacaaaagaatacaaaatacagaaacatacagtgagggacttaagaatgattatcaagttaatcaaggacttttttgcaagattgccagctccagcgcccagcgtggacatcacgggaagcgaacacgccagccgaaaaaccgcagaatcgctgtggtgcgagcattctatggtcctctttaatatctccgatatactgcactcttgtatattcccactggaaagagctgaaatttatatggctaatatttatgagaaattttcttctattctgctgtttctatatgtacaaaagtactatgattttattatattaattaagtattttagcacaaacagcgtcttggagtgcagatccatatcaatttatgcgattatattgtaaactgacataacatttcttattaaaaagacacaacctcataacatcaccatactgtttaagacttgagtctaaaagcatgtaacttcacttaattgcatcaaccggttttcccaggggttggagagctgctccccatgctcgaaatatatttgcatgctagcaatttacagaatatgaaataagatatgaccaggtcagaaatcaacctaagcaagcacaagacgccactagcacataggggtgaaaacggtacggaaactttccggattccggacttatttccaaaacggaatctgttggttggaattttttcggaaatggaaacgaattcggaaatattttctcagaaacagaatcgaaaatgataagggcagttttgtcggaacgtggaatcagtcggaaactttctggaaattttctcggaataccctggattttttttagcactgaatagtgaataccatggtgtttggcttttttatttaaaaaaaaatatttgttatgcaaatctaccacggtgtttggcttttatttttttaaaaaaaatatttgttatgcaaatttgaagttacataagaatatattttttctgcattgggatttatcaacaacattactctcttaaatatagataatttattccatagatttgtgttttgtgatgtactgttgagacttaacaattggacttatatgattgtgttttataataaattgttgaccgttgagacttgagaattgaatttatcagtttgatgggtttttgtattctaataaattttcgttaccgtattcgcgccggttcgttttcactctgttttcggtttcgataatattcgattccgtttttgtatccagcgtttccgattccgaaaaaaaattgaaacgaaaacgataaagatggtttccgtaccgttttcacccctactagcacacatgttgcacaatggaaccaactcctaaatccaataaagcggcggttgggttcctaatatacttgagggcaacaccttggtctccatgtgcaggaaactttttttcatgaaatggttttcccaatccgatgttataaaactgtaagagcgaataaatagtaatatattgccgccttgatatagtttctatccttgaagcccaaacatatatatcattggtagcactatgcttttgtagggttgcatttcatggtatcctctgaaagaaataaatgagacaactataattgagtagttaatacaaatatatgtatgcagttatttcatattgctactatctatagagcataacggagtaataataatttacgttaatcaatttaagctaatgcacaacaagaaaaaaaaagtttccaattgtacagcattcactattttacggggtgtacgacattgcatcctgttgagcctaatgttcaactcacaaagactagggtgacaaggtatcatgggtaatcaaaagttatcaaggtaggatataatgaaaattaggttacgctacccatcattagttcgtaaataaaataatgcatgtattcaaaacaaaacaattgataaaaatgggatcaatatgttcaaagagtgcacttgcgttgatcccagtcttgcacgacatcttctgaaacaaactgctcttctgctccaatgtctatacgatcgcaaacgaaaaacaaataaacaaaagaaaaatctaactaaagaacataaaatgaaacaacaaattaaaccaggacgtagagctcgattttagaggacttaaggtggaagaatggattgaatcagagttcgaatggaaaatttatagccttcagaagtttgaattcagagaaaatctgagggtaaaagaaaaaagtaatattccgggaatattctttggatacttaatttcggggattgaattttttctgacaagaaaatatgtgtggggcccactgacagtgttatggagtatggtggactcggtgtatgtggactcagctgatgcgtatggacatgaggtgatacagggcaatgatgtggcgctgacagggatggatctagggttaaatagatccaatggttgagattgaatcaagggtttggatggctgtgattatttggggattttttgtcgcgggacccacagatcagctacacaacggaggaggaagagcagccatggctccatgggcacgctccggcacaacggcattgacaacatcgttctgtggcgacggcgcaccgaggcactggctagctgcggtgtcggtaggaggaggcagaggcgaagtcggtggcacggcgacagtggaaatagcaggaaaaaaggggaggaaaaggggcgacgaccggcggtatctatagagggagaggttagtgttagggcgatgcataacaccaatttaaggaaggacgacaccggttctccttgcgcggcttgtggaagttcagcggcggctatgcctcagcgtagggcgtgggctgagtcggtccccatcgacggcagcgtgggccagcgacgcggatgaaaggagaggccaggctgagggtgactcgtgggctccgggattggcttcctgggcctgtgtaacgccctgaaaatcgctctaagtttaaattgtgctttaatgcatttctagaaatttaaaaagcctaaaagagcctccaacaattaaaattcaccaagatttatgtcaagttggctagtgggtatttttaataagttccccatgcttcaaaatgtgtaaccaatttttacttgaattttcagagcatcctaaataattttaaggcaacaaaaacaattaaaggaattttataaaaaggaaaagctaaaagaaaaccccttcctcctcttgggctgcttccagcccatctctccctctcttggcccagcccaaggtgaacttattcccccctccccctccctctccttgggccagcccagctcattccttctccctcggactaagtccatcattcctccttcgcgcgcccagtcagagacaggtgtgctccctctcgatgacaggtgggtcccacccgtcatccctaacctccagccatcctctctctctccggccgaattcctaccgacggcaacctcagattcgcctcctccactcgccgtttcatcaaattaattgaggggaattaatttccacctcatcctgtccaattcccccataatttcacactcgatcccgcattatttgcggtggattttgatggtgttcatcaatggtgagctccaccatggccggcgtcgatctccctccccggcacccttatccctcccctctggcctataaaagggaccctcgactccctcctccctccccacacaccgccgctctgtccctcctctcttcgcggccgccgcgccgctctcttcttgtgccgccgccgtcacagctccggtcgcccctcgccggtggtccggacctcgtcggagcccggcgtcgccaccatccgcttcttcgcttcctcctcttccccgtccacccctccgtcgagcacgaggaccgcgggaacgacgacgacgccgacaacccgaagttcctcgtcgtttctccctcgccgccagcaacaccgtcgacctctcgccgccgtgtctgctcggtgagaaccgtcacctcctcctcttttcgtttttccctttcctgtagtccgtcgcaccgccgccgcgccgttggccgtcgccggcgagccgcctggctcggttgctgtcgtgcctgtgcgtcggtgtgccgtgagccgccctcggtgtgctcggctcacggtggatcgagcggctggcaagtgggacccgctcgtggaccggtccgcgtgcgctctctctcaataattcaagttttcctttagaaaaataattcacaaaattgtaaatttccatttaaataacaactaaacttcaaatggccatatcttgaccgtttgaactcagaatcgacccgttcaaatctctagtttccccttaaaaatgagtagaacccatttatgtgctttgtcgcttctgttcatgtggtttttattagcctttttatatttcttcgtgttggtcgtgtagatcccgctgttccggaagatcagctcttcatcgccgttgacgccgaagactttgtgagcgaaggcaagtcatatctaccttgaacatgttgaatcccatattgtgaaaattatgtggttttacttatattgcattgctttatagattataccgttcattattaatattgttttattagttattcctatgctctttgttatggccatgatgttgatttgatatccatgatcattgtgaaccctagtaaaattataacttgactagtctagtatcctacatgatggactaactagttgttttaggtaaatgcttagtcatgcttagttccaacctactccctccgtttcacaatgtatgtctttctagcattgcccacatacatatagatgttaatgaatctacacacatacatatgtctaaattcattaacatctaaataaacgtgggcaatgctagaaagtcttacattgtgaaacggaggaagtagaacttttggataaactagactatggtggttaacaactaaaactggattagttatggactattgactggtttgtcaatagatgggtgataaaatgctttgtacaactaaaacatatttttgggctgggcttggggtgcaagcaggttattttggtagtcacaccccggctaatataaggaccggtcttcgggcctctgttgcaaggcatcttcgtgcaaccacaagtctagtgggtaaggcctgactagaagtttagatcttctcaaaacaaagaccattggttggaagcgtgtggggcctggattaaggccaattttcactcggtgcaaggggggacctgtctcgtcctgggggatccggcatcctttaccttgtcggggaccggcgggcggcgaaacctcagcgggttctcctgttttgggtagacctagatggatagtcttgtcacgacctctattcgagtactgtgatagtacccggtgcgtggtaacgtgtgttgaggttgtgtcttgtgggtaaagttgtacacctctgatcagagttaaaaattattcgaatagccgcgccctcggttatgggcaagctgagcaatgtacccaaagttagttttgttttataaaaccttgggagggtgaaatcatgatggtgtagtcatgtggagattagcctgggttaagacaggttcgcaggctcatgcgaccttgatgatatgaaaatattggcttagaacaggatcgtgttttagaatgagctttaacctgattaaaatgtttaaactatggctttatgcaaaataaaccctattaggccatttccttgtttaccctatgcattattgttgcatttccggtgtgacttgctgagtacggtggtggtactcagtcttgctcacaaaaataatccagaggatggacctgaggaagatgaaggcttggatctctagttcgctccgccatcaagtgcctgttctgtagtcttccgctgttttatttgtttatctttgagtgtgagggcctaagtcgcccatgtaataaagtacttgctttacatttccgcaagtgtggcttgtaataatcaacaatgtctatgtgtacctcgccttctgggacgaggattaatgcactgagcgtttggaaatggtgtatatttccgggcgtgacaagttggtatcagagccaccttgaccgtaggatgagcaagtggtctaagccttaggatgatattttttttttagaaaatagttctttaattgtggaaactttttttattctatcttcaccctctcttgctttgcaaaattgtttactaattctttgttctgtttttttgaaaaatagatgaccagccttggcccctacaatggcgtctcacttaaggggttagttctgcagcttcgccacttgatcgttgagctgggctacaccgaagaagtccagtttgttggtaccactgtgccagacgaaggagaaaaagagttggcatccccccgatggtcagtcaaggccaccttgctctccaccaaccctagcttggaatcattggagctaacgggagggactgacaccttcatcgacgcatgccaagaagtggtgcttctgggcattggcaggctgcttcaacgacactggacacgtctgcaacacactccattccgctatcatcctactcgcagtttggcggaggactatgccaccttcagggatgccgagcacgagaacgacaccacgatcgatcacctggccaagatggtgcaggcgtatgatgatgctcgtgtcgactactacaagatggcgaagagaggttttat

SEQ ID NO: 7233 - DNA, 57498 bp, Oryza sativa
gcgcgggtcggggctagtgcctggggagatccgcatgtcgagactggccaggccgggaacgtggtgaccgagggttatgggtgacccgattgtgggtttttgccgattcccccccggagttcaccacgccccggggcacggctcggttctgggccccgtttggcgatttatctgaccgaaccgagcccccgagggcaaggttgaggcacgagcgacctcatttcaagtcaaaattcttcaaaaaggaaaaagcggcccagatacagcccttaggaaattgaacctgctttattgaaatactgaaatgagagaaatgagaatgtgcatgtgtggcagcccccggccaaccctgcacacccgagggggggtgcggggttggcccgagcccgaaacctgacacccgacccccccccctcaggggtagaagcgacgaaggtgctcgatgttccatgggttaggcaactctgtgccgtcgcccgtggccagccgtatggagcccggccgggggacgccgatcactcgatacggaccctcccacattggtgagagcttgctcaatccagcacgcgtttgaacgcggcgtaagacgaggtcgtcgacgcagagtgatcgggcccggacgtggcgctgatggtagcgccgcaggctctgctggtagcgtgcggctcggagggccgcacgccgccttcgttcttccaagtagtcgaggtcatctctacgaagctgatcttgatcaacctcgcagtacatggtggcccgaggagacctcagggtgagctcggatgggagaacctcttctgcgccgtagacgaggaagaaaggcgtttccccggttgctcggcttggtgtggttcggttcgcccagagcaccgctggcaactcctcgatccatgaatcgccgtgcttcttgagaatattgaaggtcttggttttaaggcctttgaggatttctgcattggcgtgctccacttgaccattgcttctggggtgggcaggtgaggcgaaccaaagcttgatgcccatgtcttcgcagtagtcgccgaagagttcactagtgaattgggtgccgttatccgtaataatacggttaggcactccaaaccgggccgtgatgcccttaatgaatttaagtgcggagtgcttatcgatcttgatgaccggataagcctcgggccacttggtgaacttgtcgatcgcgacatacaggtactcaaacccgcccggggcccgcctaaacggtcccaggatatcgagcccccagacagcaaatggccatgaaagtggtatgatctgcagggcctgggccggctgatggatttgcttggcgtggaactgacacgctctgcatcgccgaaccaggtcgaccgcgtcattgagggcagtcggccaatagaatccttgacgaaaggccttgccaaccagggtgcgcgaggcagaatgggctccgcactcgccttcatggatatcggcaagaagctcaacgccttgttcccgaggaatgcacttcaggaggattccgttagccgcgcgccgatagaggatcccttctaccagcacgtagcgtttggaaatgcgttggacgcgttcactcccttcgcggtcctcaggtagagtcttatctgtgaggtatgcttggatctcagagatccaagcaatcaatctaagggagcttggagcgctcccctcgggtcccgaggcctgggctccgacgggcctcggggaccgatcaggcgcgtccgtctcccctaaggggtcgggtcgcgccgacggctgggcaagcctttcttcaaagacgcccggtggggtctgggctcgcgaggacgcgagccgtgagagttcgtcggcaatcatgttatcccgtctgggcacatgccgaagctctatcccgtcataatggcgctccatacgccgcacttggcgtacgtaagcgtccatctgcgggtcagagcaccggtactccttacagacttggttaacgactagctgggagtcgcctaacaccaagagacgacggatccccagtccggctgccactctgagtccggcaaggagtccctcgtactctgccatataattggtcgctcgaaagtcgaggcggaccaagtatttgaggacgtctccattcgaagaggtcaacgtgacccccgcgccggcgccctgaagagacaaggagccgtcgaactgcatcacccagtgggcggcgtgaggcagctgcgaggggtccgagctagcttcagagactgaaacggtctctggagccggggtccactctgccacaaaatcggcgagggcctggctcttgatagcgtggcgtggttcaaagtgtaaatcgaactcagaaagctcgattgcccattttaccacctgtcctgtaccctcccgattatgcaagatttgaccgagggggtaagacgtaaccacagtgacccgatgcgcctggaaataatggcgcagtttcctcgaggccatcagaatagcgtaaagcatcttctgggcctgagggtatcgggtcttggcgtcccggagggcctcgctaacaaagtagacaggccgctgcacccttcggtggggccgatccccttcgctaagggccatatccccggggcgctcctcgtccaagtggcccctcggggcgcactcgtcttctgtgccgatgacctcggggtcggaggacgataggggcggccttcccacagtggccttggggccgttctgggggtcgggggctcctggcgtcgtcggacaagcgggcaaagggccaactctggtcgtcaggggccttaggccaccgttcggctcgggggcctcttctccctgctccctcccgggtcgaatcggtacagggttagcctcggggtcagagggcgatagatgcagccttcccgcagtggcctcggggccttcctgagggtcgggggtgcccagcaccatctgacgagcgggcagagggccgactccggtcgtcaggggccttaggccaccgttcggctcgggggcctcttctccctgctccctcccgggccaagtcagcacagggtgggggtgcgcggaatgaggattgtcctcatcgcgctccacaaccaacgctgcactaactacttgggggggcgccgctaagtagagtagcaggggctcatttggctccggggcgactagaaccggaggagagctgagatatgctttcaactgagtgagggcgcgttcagcttccttcgtccaagtaaacggcccaaagcgcttgaggagcttaaataagggtagcgccttctctcccagcctcgatatgaaccgacttagggcggccatgcaaccggtgacacattgcacatccctaagtttactgggggggcgcatccgctctatagctcgtatcttctcggggttggcctcgatgcctcgggcagagaccaagaacccgagaagcttgcccgcaggtacaccaaacacacacttatcggggttcagttttatgcgggcggagcggaggctctcaaaagtttccgctaaatctgaaagtaacgtttcctggttgcgcgtctttacaaccaagtcatcgacataagcctcaacattacgtcctaattggctacccaaagaaattcgagtagtacgttgaaaagtaggacctgcattctttaacccgaagggcattgtcgtataacaataagttcctatgggagtaatgaacgcagttttttcctcatcctccctagccatgcgaatctgatggtaaccagagtatgcatctagaaaacacaaaaggtcgcaccccgcggtggagtcgacaatctgatctatgcgaggcagggggtaaggatccttaggacatgccttgttaaggtcggtgtagtcgatgcacatccgaagcttgccgttcgccttgggaacgaccaccgggttcgccagccactccggatggatgacctcacggataaatccggcctccagaagtctcgccacctcctcgcggatgaaggcttgacgttccggggcctggcgccgcactttctgccggaccggccttgcgcccggccgtacggcgagacggtgctcaatcacctccctggggaccccgggcatatccgccggtctccatgcgaaaacgtcagcgtttgcccgcaggaaggagacgagcgcgtcttcctatttgccgtccagaagaccaccgatccgtgtggtcttggacgggccgtcgcccagtgcaacctccttgaccgggacctcatcggacgtgactatccgctgcctcggggcggcgggggcggatgcgccaagcctctcgtcgccaccctcgggcttggacacgacggcgaggcggtccgcacgctgctccatacaagcgagcgcgactttgaggtcgccatggacagagatggggccgtcggggcccggcatcttcatctggaggtaggcgtagtggaccgccgccatgaacttcaccaacgcgggcctccccaggaccgcgttgtagggcagactgaggtccgccacatcgaagttcacccgctccgtgcggaaattggcgggtccaccgaaggtgaccgggaggtcgatatgacctagcggccaagtgtgccccggcgtcacgccgatgattggctgggacggccggagcatcatccccggggccttgatggcatcaaaggctgcggggaaaggatgttgagggctgctcctccatcaatgaggacacgccccaacttcacgttgcaaacggtgggagaaaccaccatcgcaatctgccctccccaggcaacgcacggcgggtggtcggtctggtcaaaagtgagggcaacttccgaccaccgcgcccggcgcgtcgcctcatgagtaggggccgcagccagaagctctcgcttcatagccttgaggctccggcgagaaacgtgagcacacgctcctccatcgacagtggcaatggtggccccaggttcttggaaacctaggtcatcatcgccatcatcgatgtcctcggcgggggccttctgcctggcctcacttcgccgacggccggaaggaaccgccggggacttgccttcccggcgctcctgcctcctctcctcctcccacttccttgtccgctctgccaagcttttgactgcgcgacagtccgcaaggtcatggagggaggtgttgtggacggtgcaccacttgccggtagggcgctccctgctgggaacgctggcctccttctttttgtcgctcgcaggcctcccctttcgggtggcccgcgaagcgccctcgacggcgaggacatgaccctcgccgtcggaacggactgacctctttttcctcctcctgtctcgccgccctgcctgagcggcggatccgggggcggccgaagctgccacaccggaaccggaggggttccaagtccaggcctcctccttgcgagccactcggtccgcgagctgaaaaagctctgcggtagtctggggctctttggaggcgatcttttcgagcatgcggttgtgccgcacgccccccctgaacgcgtagattaccgcgtgtgcagggatgcatggtatggtattgcggacctgacagaaccgctgaatgtacgatcgaagcgactcatcgtcccttcgctgtacggcgtgcaagtccgcttcctcaccggggcgcggatacgtgccttggaagttcatggtgaactactggcacaaatcctcccaggagtggacagacgcgggtggcaagttcattagccaaccccgcgcttgccccttcagggccatgggaaagaaattcgccatgaccctgtcgtcacccccggcggcctcaatcccggtcgtgtagacctggagaaactcggcgggattgacgctgccatcatatttttcggcgatggtgggccggaaccttgggggccaacggacattccgaagactcgccacaaaggctctacagccgacaccaccaaccgggggcacggagggctgattcccacgtccgtgtcgaggtgacactctggacgaggaagcgccctccgttgcgtgggcagcacttcggtcattacgccggcgctcgatgctggcgcgggcgtcctgctccccatgcagatcttcccgggtcgaaggagtcgacgaaggagtggcagccgaacggcgaacagcggctgccgctcgtcgtgccctccgtcttgacgacgcggagccggtggtagcagcaccagaggccttggtggcggaggaccggccaccagcatctaggcgccgccgtgccgtcatgaccaatttggccacatcgtccagccatcgttgggctggagactccgggtcagggacgacaggcgggtggcgtaagagcgcgcccgcagcttggagcgcgccctggggcgtgctgccgtcgccgtagacgaggaggcgacggtccccatctcgccgttctcctccatcgcccgcgatcggtgaagccgcggatctttcgaccctttcgagcgcctccccctgcttaggactttggcgtggagggggcggtggagtacgagctcgacgacgtgggttcggctccccgtcgtcgccactcacactgggagagaggtcgggcgcctttgcttgctcagccatgaggctgatcaagaaaaacttgacgcacacggaaaagcgcgagagctcagaaaacacacgctgagccccctacctggcgcgccagatgacggagcgcggtgctcctcaccgggagaccgcacaggcccccctttgccggttcggccgggggctcagggtgagatctcaagctctccgtgtatgtgggaagatcgcggcctctcaaaagagcatgaaacacaagcgatgtatacaggttcaggccgctgagaagcgtaataccctactcctgtgttttggtggatctgcgtatgaaggagctacaaagtgtgagccaacctctccctcgttctaggttctgaatctggaaaagatcatcccctttctctatgggccaggtcctccttttatacttcaaggggataccacatgcacccctccctttccaaactggacttttcttctcttcataaatggacggagatttgcacggtcgtcctccgaacatcctcctgacgggacggcacacacctacctccacttctgcctgaggcgggcacgtcgtgggaaggtggctgtgtgctgacgacatgagcagtgtcagaccggtcacaaatcggtcattcttgtccaccacgcgtcggcttagcaacgtgcatgtttgcccttcttcaaacaacatcttgcttgtaatggttaggatgaagcctggcatatatcgatcggggctaacgtgtcatctctgggatgtaacacgctagttccagccggggacgagtgcctagaagctctcgtcttgacgggatggggcgaagcgggcgtcagaccgcctgtcgccacctaacccgcgatttgaccggtctgtgactggtcacagaccggataatcgagtgcactgcactgcacttcgtgcggcgtgacacgcttaaccgaggcgcaataaatgcggttaggtgagccccgctgtgctcacctaacccatacacgtggagtagaaacgcgaggggtcggggcgcctcggccctcgggggcgaggcaggagtggtccgaccccccccctcggggagaccaagaggtgggcgcacacatcaccctcgggcccgacgtcccccgagggtgccaggccacgtgggcgatggcgtctgcctcaagcctctagtcatgatactcccggtcccatgtcaccgacacccttcatcacagcgcacatgcgtccaaaggtggtgtcattctcccctgacgctgacctgaaggtactaatgttggcgtcactgctacggcgagggtgatagcggtaagcagtgttgcggaggtcgtggtcgtgtagctccctcatcctggccatcatccttaaagcagcctcctggcaagcatgctcaaaggtgcctcctgtagcagtaactaccatgttgggcaagacagtgggaatgtcgtgcacctccaagcggacttggtgcgggaactcgccattgaggaggcgaagctgtgtgtactccgggttatgagggtagcccactgcgatcgccatacgacccagctctgccacgaagccatccatgccctgaccgtgtgtagggggaaggtttgacatctatagaagacaaagggtaggaatctatgcatgctcaaatccaaattaaataaagcaataaatgactcaagtaaataagcaagcaagagcaactttttatgcacagaacattttacatgaaccaaataaacatactaatgacactgattaaacaataaagtaatgcgtaaaataaatagataatagtaataagcataaagattgcatcccatcgaaccaagacatgacttaatgcatacctcccattaaataaattctcgactaactatcaaatgaaattccaattgaccccaaatctatttacccaaagttactaataccctagactgacctaaattttaaatatctcattcgaataagcgatcaagatttttccctgtaaaccaaggaagaaaattctcaaattttccctgaaacaaatccaaatgcaaaagaacatatgcgtatgaaagagtttcagtgagctcttaaggtttccagttggcttgtcctatggtcaaggtcagctctaataccaacttgtcacgccaagaaatttacgaaacaaaattccgagctgcatgtgcattaaatgacataggcgtgtctatcaaaaccatgcgccaatagcccaccattaagcatattttagttgtttgaataccctggtggtacacgtccaatatcatcatcattaaaccaagatttaagttacatgtgagatcccccatatagtaagctagttgatctaagcatggctaagtatgtttcctagttgatctagtcatattaatacccattttatcaatgggttaaggtaaacaatctatggacaagtataggtaaccatcccacatgacattgtaaaatggcaaaatttgctacaactcaaaaaatatgtaattagttgcgagacataacaaaaatatgaatttgcctgagaacactcagtgtggtaatttgctgtaggataccgaacacattaaaatataatatccacccaattgatgagagggaacccatacaaaatgaccgttttgcccttcttcttctcccaatcctccatcgattccccaatccatcgcagaccggccgacccaaatccccatcaccccatcaccccatcgatggacgatggctgatgtggagcctagagccggcgccgcacacgagagggcaggcggaggctaggaggggtgtggtcgccgggttcgtgggcagtggcacggtaggtggcgagcaggcactggcaagctgggcaggaggcgcatggcgcaatagcagtgcaggtgcagcagcaactcagcaagcagcaagccaagcaaaagtagccatcattccaccagcagaaaatggataattcctaaatgtgaatctttgctatttgtcaatccatcactccagtaccccaccatgccggggatggctgcgaggagcttcctattacgcttgctctcagcggccacgttcctaagcttgtgcagcgtgtcaaggagaccagcagagcttgtggcgcgcacgatcagctggggacttggggggtagggatgaggccgatgacagtggcaagccattggagctcgttgcaagtgagcgttggaaaaagaccgaaagaagggagaagaagggcaaatatgtcattttgtatggtttctctctcatcaattgggtggatattatattttaatgcgttcggtgtcctgcagcaaattaccatacttttggagtgttctcgggcaaattcacgtttttgtgatgtcacacagctaattacataccttttgagtgtcctaatgcaatatttaatagaaaatgagacgtttgcgaaataggtacaatatgattaattaacatgtatcacttgccttgcccccggtgctgcaggaacttctgggaccacttcaaagtaaagtagagcttcggattcaccggaatctaagcgaagcacacatacaaaacaggctataagtctatcgagacataaacaaaactatttttaatggattttaagtttatttatgaatttactgtaatttgagtgggctcaaacggagctcggatgaattttttatgaattttaaaagattgaccgtgcttttagaaaagcccttaaataaaatattacgcattaaagccaacggctgacgtcactgagggagggggccggggctgacatgtgggccccatcggtcagcggcgcaagtgtccgatccaccgtggacaagtccacgaagacggagacgggggcaccaagtcacgtgggcggtcgaacgaacggccctgatctgccgcgtggcagatcaggcagctgagatgcggcggtgagctggcacgggctcagccgagcggcgtcgcgcggtcaccggcggcgacgcggggagtggcggcgcgcggcgcgggagacggcggttcgcacagggaacggcggcgcacccaaaggggcagcggcgcgcacgggaaggagagggcaagggagggggttcctcaccggccggcgcggaaggggacgacggcggcggtgaggaaggcgacaacctggcggcagagggcgcggacgggcagctgcgggacctaagagagagaacgagaggggtttgaggggaaaagagggttcacggcaagcggcactgtcggccgggaggcagcggaaaaggaggtgctcaccggcgactgaggcgagacgtgttccggtggcgaggagcaggcgggctcggtgagcgcggcggtggcgacggcgcggctaggcagcagccctagcagtggccggagatggtggaaggcggcggcgctagcttcgcacggcacgagagggaacgagcgagcggggaagcagcggtggttgcggaaagaaatggaggagagctcgcgagggggttttatagagccgtgggccggatggacctctctcccgtggtaggcggcaacggcggcggtgaggggcgatgtcggggcgtgaagccgggaggaactggggccgcgtgcggccgttgcgggcgcgggatgcgtggagtggggcgcgcacacgtgggcgaggcgcggacagtggggttactggggcgccgggcacgggcggatgttgttctccccctccgatttcaccggcgagaggaagggacgggcctgacaggtgtgccccacccatcggcgacccgtggaggagtgggcgctcgcggggcccagcttgctgagccttcggccggcctagcggcagcgagggcagttgtgcgcgcgctcgggctagagcaggccggcggcgggaaattgggccggaaacagcctatcggctgaaaaagaaaagaaaatggttttgaagttaataattccgataatttgttttcaattattaaaattacttcctttgtttatatacatgtagaaagaaattaattatattgctagcaagtcattagatgtctaattaataagaattaatgttgacatcaatttacaattttttagagtagctcttacagaacaatgactcgtatgaaaaaaaaaatactacttagggtttacgacaactgaaattgatgaattatctaatttatacgattgctatctgagggtataaacgaataaattaacttttaaaaagttaaaattttattttagaaaagtattccaagattttttttttcaaaaaagcaccatttagaaacttggaatgcatgaaaataaaaattgaaagtatagaatcaggaaaaaaataggcccttaaactcgcttataacacttacgtcctactaagagttctattgatattggttcatattatgctcacatttataacataatgatttctttcacctcatgaacaaataataaaaaatctaaatacgatataacacaatctatctatctatacctatattaattggacactttttatgagctctcacgttaataagaaaagtctaaccattgaatataattaattaatttaatcagaatcatagatgcaatagtgatttaacgccataggcctgtctaccgtcaactttatgggctctttccatagcccatatgttcttatctctagtcaattgtatccgggagaggcagggggcgacacgcgccagctggcagcctggcaccctctcctaagcatgatttttttcgttttctttttttcgcggtttttttttttcatttttcattttgcgctttttctaatttttttaatcttcagcacacatgttttcaaatgtttgagttaaaagtttttaaattttaatttgaaagtttttaaatctcaacgtaaaaattttcaaatatggacttaaaaattttcaaatctcgagttgaaatttcttaaatctccagttggaagtttctaatctgagtcgaaagttttcaaatctgagttgaaagtttttaaaatttgttttacaaatttgaatttcaagttgaaaattttcaatgtttgagttgaaagttttcaaaatttgacttcaaagtttaaatcttaagtcgaaagttttgaaatctaacttgaaagttcaaatttcgagttgaaaaaaattaaaaaattgagttttgagtgtcaaattttgagttgaaagtttaaaatttcacgtggaagtttctttcacatatagatttcttttcaatatgttagtaaaaaaatcttcaaaaaaaggaaaatctttccttaattaccgtcattatcctaaactaactcgaaactaactcggttagttacgttgattcctctggaatcgccggcgcgcgttagcttttctgcacaactatatctgatggagagagctaggtaacagtctagcagatggaagcatgaggccacgagcagaaccgtgagcataatacgagagacttcaccttgccggggtgtccattaacacgattgaaaacttcagcaaaggagtcgctccagccgccaattcgaacagcatatatgcatggacggatcgacctgctgttgagattgcatatcccgcatgcatgtgcaccaacctgcgcaaatggaaagaagatcgaagtagataagttcaattatattttgatgaatcggcggcggcgggggaatcagtctcattgtgagtagagcacagcaagttcatttggatctttaaacggcagaagaaaacgcatcagatatgcatcaactgatctgtacgttgtcctaacatatccaatcctttttcccgttgcagatctactattagttttgtaatacaatggccaacaatattcatgcctggattagggtcgaatatcatctgcacaaatacagttcattaattgttgaccaaattaatacttattctccttggccagcatacataatcacattatatttctatatcatgattgtgggtgtttgcacgcaagtttcatacctatgcttattgctcgctttattgtagtgaataaatcaaaatcacctatctaggtggtatcatcaaattaggagtgaaataaaagaagagtcaagacacatcatcgcaggttcctaattcttaaatttagattaataaagaattgaaatactaaaaatcagagccctaagaggaggacaatctagtattttcaatttaaattttcggtattatcaaactaaaaaaatttcgtatttattaactatgagtccacattagatatggctcgctaatatttttttttattttgagaactattaaattagcaaaaaaaactaaatcgaaactatagacaagcacaaagaacgcatttgatactcgagtactttgcattgagctattctacaatttaaaactatttaaaaaaattaaaattaagacaacagtaaaactttatgacgtgaaaaaactatgaacaaacaaaatagaattaataaatttgtattattaattcatattttttatcagtaaaactatgaattaataaaaaaatttactattaatcttaatctttagaaatatgaataaaataatagataatgtaatgtaaagtaaatactagaaaaagcgatgtgagttttttttcctaagaggatatggccctcggagccaaatatggccacctacgaaaatttaaactggggtggagcttgtcgttcgcctgcgaagatcagttcttttatgcggatcacttaagaggtccgcctacgaaaatacctttattttcatagacgggcctcttaaggcgtccgcttggaaaaaaatgatttttgcaggcagaaccttatgttgtccgtctgcaaaaattatgcctgcagaaaaaatatctaagtcccatcattatcttctccttcaccatccttaccctgttggccactcatttcccttccccttctctctttctctctcatttccttcccattagacggcaggtcacgtgatggcctccctctcctggtgatggtggtggctcagtgacgaggaggggaggcgttggccgcaacgaggaggagaggggaggttggcggttcaactcctccctctcccggcaacagcggcggctcagcgatgaagaggtcgtgacgacaacaacgattcctcctggatctgccaccggctcgccctgggcgcgcagatccatcgccagccggccatgagtacgccgatccatcgctggcaggtcttagggaggggaggtggtggcgatgaggaggtgaggggacgggaggggatgcagcgactcggctcctccctctcccggcgacggcagcggctcagcaacatggaggtcacgacgacgatgatgatgcctcctggatccgccgccatctcagcctaagcatgaggatccacccctggccggccgtggcgagcagatccgccaccgaccagtctcagggaggggaggggaggtggtggcgacgaggaggtgaggggaggggatgcagcggctcggctcctccctctcccggcgatggcagcggcttagcgacgaggaggtggcgacgacgacttctagatgtgccgctggctcgcaccgggtgcgtggatccaccactggccggccaccggcacgcggagccgccgtcggctggtctcgttgaggggagtggaggtggtggcgatgaggaggtcagggaaggggaggggatgcggcggctcggctcctccctctcccggcgacggcagcggctcagcgatgaggaggtcgcaacgacgacatgacgcctcttggatccgctgctggctcgccccgggagtgcggatccaccgccggctggccgcgggcgcgcggatccgctaccggccggtctcggggaggggaggggaggtggtggcgatgagaaagtgagggggagggaatgggatacggcggcttggctcctccctctctcggcaacgacggtggctgaacgacgaggaggggaggcattggccgcgacgaggaggtgaggcggtggctcagctcctccctctaccagcccggcgacgaggagggccagcagcggcttggcgacgaggagaggaggtggcggcgggggtaggggtggtggcagcaaatttgtttttgttcactgaaattatttttgtatgagggtggagatgctgcctgcgaaaataattttcgtaggcctttgtttactggcggccctttccccgcctgaaaaaactacttttggccgtctgcgaaaatgattcctagtagtgattgttttctaaagcgatttcgtattgttgacatttttgagtttgaggggacgatgcctaggccacgatgcatgagtccagtgtatcttgctgtgcaacattggatgacaaaggcgagcgtcagtatggagtaagattttgtatatattgttattgtcaaaatccacaattattttcaataggaaaagtaaattacttggtttttactaatctatttatctattaaaaaaatataattctacatttaaatcgatttataaattttatatctatggaaataaaatgtaacaattatgtcggaaaatcaagattcttctaaaatccagatccacacaaagttgtaggggggaatccactaattgcctttaagagatattttgaaaaataaataactgataattcagcatatgattaaaattgtaatacttatttataaaaacaataattagcctgtgcaaagcacgggttgacggctagtacattataattattttgtattcaactctttatttcagcttacacagagctaattgttggaaaaactcaacccacgatgcttaattcttctctccctgcctcatacctttaatttgttttaatgttattaacaaaattaattgttaaccatatatgatttgatatgtggcaaagggatagcgctgcagcggtcgtgatcaacttagctgcctcagatatgatgtttcatcatgcgtgcggaaggcaaagctacagacgtgcattgtgcttctacagcgggccaaaaagaaaacttcggatgctttatttattaacaatagatagatccgatgattcaaataatagatgtaattaaattagttaatatagattttaaattgttaatttaatgagtacacagtataatgatgtaaactttattttaaaacagtttcattgtttaaaattaatagtccaaagtaagtaataaaagatagatctgatcatttaaataacaagtccgccggtttaagtgcaaatataaattagttaatatagatcttaaattataatttgataggtacacaatataataatggtgtaaactttattttaaaatagtgcattatttaaaaataatagtacaaagtaatgagtataccgatttaagtggaaattatctcacattattaatttaacgggtaaatatataatggttcaaatttattttcaaacattatagagctaatttagttacctctatgatggtatattctttcttcgtaaaattatgattatttaaaatttttacggaggaataagtgttttacagaggaagtgccgaagataagtacatctgataaaaacaaatctagcagctctttacactacaaagctagctgtaggagcttggacagagggaatcttgaaatgtaaagtaccgttttcttgtttgaagataggaaaagacataatagaatcccttatatgccagccagttctcttacacatgccaatttaaattggcttctcctttatataccactggttaagttttttcacattttataccacccttagcactgtagcattagttgattgttagtcacatgttattttttttaaatgaccaatatgccttctcaactaaaaaatgtgtaaactttaaaaaatcataactattttattttaaatccgttttgagtgaacaaaattttgtcataaccaatgaaaaatgctctttgtattaaaaatattgttggaaaactgtatgtttcatacttatattgaaaatttatttgtgatggtgatggctaaaattgcatataatgcaaaaaaagaatcaattttcatatgttgtatccagtagctatattagtattaaaatacctatgattggttgtataccaactctcaagagcaaatacgtctttttactctgaagttaacggtcaactgatggtggagtgacggcaatggcataaaagggataacatacttgaaccggtggcatcgcagagagaagccaatttgaaatggcataaggaaaccggttaatttgaagtggcatataagagattctctaattattagaaccagatcggaccgggttccgaccgaagaaaactggaacattggccggtccggtccagcctaaaaaagatgggtgtgaaataatcagactggcggaaaccattgaacggccagtttttttcatagaaaccggttaaaaccggattactagaccgctgattgggccgatgcagctcagcacgtgggagggaagagagttgctatgtccatgtggcagggagggaaagtatcccatagactcacgtctatatatcatatactcgctccattttaaaatatttgataccgttgactttttagcacatgtttaaccgttcgtcttattaaaaaaatttgtgaaatatgtaaaactatatgtgtacatgaaagtatatttaataataaatcaaatgatataaaaagaattaataattacttaaattttttgaataagacgaacggtcaaacacgtactaaaaattcaactaaaaatttaacggtgtcaaacattttgaaacggagggagtacatcaactaacaaatactactaaaatatctaaaaaaattattgaaagtattatatctagctaggataaaatcttaacatcaaatacattatattttagtcgtaaaaaaaatccgacagttttaaggttgtaattctgttagaattttatctttttttactctctatgtagaatgaatttaaaaattcgactttgtgcgtatatgtaatactattagaagtatatgtatgaatttttgtaaaattatttataatattttttagttggtgtatatggtgtgtacacgtgaggtcatatatagatacgctcccgtggcagggaagccggtgcctgctttcacccccaagtaattgcctattcttaaatctttgctgcaatattggttagggttgttgcaatgtgacggaagactcttgcattgcattcaagcctcaatcttgctctatcagtctagttttttttatcaacattttagatacaataatgtagagtttaggtggcgatcccatgcatggttattcgtgtaacacaactaaaaaacgatttttttacgcggactcatataggttgcaggtggaccgtagctgatcacgtcggcaaaaatcgacctatattttcgcatacgactcattatgaggccctcatataaagatctattttcacagacgaggctcttaaggatcacctacaaaaataagcctaatttcgcatgcgagcctcttaaatggtccgcatgcaaaaatacctcctcttctccacaattttatttcttcctttctctctctttccctcctcatcacttcaaaaaattttctcctcctatcctctctcgccctttttctctcctggtattattttttctctcctctctctcttcctctcctctcctctcatatgagcgggagctggtggcagtgggcggctgtgctgccgctcgacaaggaggcagccgggaaagggtggcgccgccgccaacgacgaggaggcggctaggagtggtgtcattctcatccccacccggtgccgccacagccgatgaagaggaggaggcggccaggagcggcaccgccgccgatgacaaggaagcgactaggagcaggcgactaaatcccgatccctgcctgacgtcgctgtcgtcgccgatgaggaagaggcggccagtcgcgatggccggatcagccaccgctggcgccacaatagcctgatccgccatcgctggcccagcgacggccggatctgccggtgccggcgccacgacggccggacctgcgctgtcggcgcaatcgagagctagggtttcgctttctcttttttctgagttttttattatattttggctttttattttttaaatttggtcgacataagtactaattttcgtatgcgggcgtgccacccgtacgcagacctttccgtaccgacgagcaccccaaccgtatgaaaaaataggtttttgccatggctgtccatgagggcgcgcggccggagcaccctcacaggaccccagtcttcgagggcccctagacttaaaactctaacactagatatatagcccaactagtcctgaaaatctattattttctttttcacgttgtttcaatttcggtcatgcatccttgccaagggactatctaaaatactgccacaagttctttaaggaaaaaactttcaaatctaactatagtataaatataataaaattccactataactttattataactataatataacttatatataagtactaaaataatatatgtaactttatatctaatttatatagagactacaatgtagttacagtgcagttacactgtatttacaatgtactccctttctttcagggtataagacgttttgactttggttaaaatcaaactgtttctttcaagtttaactaagtttttagaaaaaaataataacatttgcaacccaagacaaatttactataaaaatatattcaattattaattcaatgaagctaatttggtattataaatattactataatataaattttgatcaaagttaaaacgtgaaacggaacggagggagtagttagaatgtaacaatagtggtgtaactacattagagttacacttcaactatacttacatttgaaagttttttaccaaaaaaaaaattgtgacagttttttagcaattccgatcgcgaattgtgccgcttcggctctcgagcaatcgcgccgcctgcgcctgacgccgtcgctgcccggccgagagagaatctcctgagtccctgatgaagtgacgagtgacacatcgacgcctgctggctgccggccttgccgcgtccctgaccggccagccgtggtgccgcgcagcgcgtgcccaccgcggccgccggactgcatgtccgcttcactgcttggtgcttggttgcttgcagatgattgccttacttcctggtaatttttaatccggtaaccctcgtgtcgcttttcaagtgaatattattgtatatcattttagaccattttacattgctatgaaacgtattacggagtataaattattgtaatattatattattattaattatgtttttatctttcgttacgactttttgcacatgcccctgaatttgatgggacagccctggttttggccgtatagaaaaatatttttttaagtactagtgtaaagacgctctcatgctcatggcttcatggggcacgtgcattcaccacagttccaccccctttcttgagtatccaatgagaatccatgtgctcactcgcttgcttctggcagacaaaaaaagtagcatagcatatgcatgcgacattctgtcttcttacactactagaaaagcattatcacaagcggccgaaaagagacttcgcaggcggggcgaccgtccgcctgtaagccaacgactgtgaagatcgccgatctttgcaggcggggcggccgtccgcctgcgaagataatttttgcaggaagacgttggctagtccggtctgcctgcgaaaataggaatcggccgcttgcaaaaaaaaaaaaaacttccgcctgcgaagataggtagaaaatattgaaatttaataataatttgcccgtaaattacttttaaattatttagtagaaattcttgcaggtagattattatgtacatatattggaagattatcaagcatttggtactgagaaatctacatatattgcataactcaaaagtgttgccaatatatatatatattacaatatttttttacattgtcacttcaaataacgtcatctagttacattatggcatagcagtgttccactcccgaagatccttgaattcgtcacttgccgctagggcaccctctgggccgaagaaatctcctttcacatgacaacactcatggcggatgaagtgacacagatcacgctggacatttgtgatacctgtatcgtcaaagcttgttcgacattctaatcttagcaactacatgcattgaaattaatcaatatattagtatcataaatatgtggagctgtctagtacatagtatagagacttatatcctccgcgttagtcctgtaccgtccattaaccctaaggaattcgcacgcataatacccgcaaaggaccgttcctcgcggttacttgtgacacttcaggacatatcatagaaaaaagtagttaaaatttttaattagtgaaacaattggaatacattaagtgagtggagtattaccagccaataggtacgtactagcagcttcaaccgtgttcgggtctgttctccacccttgaacttgtagtattggtatgcactgtatggatgtcgtaccatttcacagtaaggaggatatttatttataatacattcatatacaaatgcaagagtcataataacttactactgtaagattgttagaaattctttgtattgcttgtgactgtaatcgagagggtccaagactaccacggttccgtctttagggtggatgagtaaacagatataatgatcgctacatattaacaacaatatagttagttagtaccagctaaaataagagatatgtgtacaagataaatataccggacttacttaaaattataagcggccatgacgactttcttattttgaaagtgcaagaaggctcatccaatgtactgtgcgacagcaatcaatttttccttgtgcatgcccttcttgtattctgctatctcttttggattcttgcccttcagctggtcagaccctggtgctagcctcacggtatgctgtgtttggcagatctgagttggatccaagaagtcgatgggttcttttttattcttagcatccatgtattgcatcgtacagaagaagtttgttagtaacaatcacatggatttgtattgtacatatttttcatctaattatttaaaactcatactcacatgcaccaaacaccaacgtagttgacgtccatcttatcccgacgatatatggcgtggagatctgagaaatctagccatacgtaaccttcttcgccgaagcaatctgccggtgatcgagctgttatattgcccaagcctttcttgctggccttcatgtagaagttatgtaaccttctcatctcccatggtccttctttcagtgcccattccggcaagagtggtttcccatgttcgtactttttcgggcaatcatcagttgcgaagtatgttggcccggtgttaacaaccaaatttggtaacatcagcgtcggagagaagattagatcgaagcaaagtcggaagcgaagatcgagttcggaaatagagcaggaatcggctggggttcgtatcggctacggttaggatcggctgagtctgagtcgagctaaataagccgatatagccgattccgacaatatgacttgtacgcgacatcgggttcaagttaatgtacttcaagatgattgccacgcatggatagagtcctgggaaggcaattgtatctattaattaggatattttatgtaaattccttatagataagtgtgggcaaaagtctgccgcaaagacttattagatcttagagtttgttagagataatggtcgtgtccggtatgggcatatcttgtaatcctcgggtataaatagaccctgagccctatgtaatttttaacacacgttcaatacaatctcggcgcatcaccatccttttgctttagttttgtttcgacgagttcttgctttcgggttgagctgcatcgatttcgaacttcaacaagaggtaacattcgttatgacagattgcgttcttaggattagtgcttccatcttcatgatactctaatcttgtttatgtaattcgtcaagttatcatatatcttacataatctctagcaatatcgccatctgaactactatcggccaatatctgtatgcagaaggcagccgattaggttagatcttgacgttgatctggattatataagatatctaccattctatgaaacttctagcggcttgattgtctagatgttgctcttcttttcatacttaatgctgcatcagttgagtttgatctattaagtcgtgtttagaatatcaatctctagcctgccttccagttgccgattagaatagcatcggagtttcagccgatcgtatctgatttagccatatttattctacatgtctcattgatatgctaaatctgccctttatatcaagatattgctgcatctaaatatgttagggttttgtttgatatgttatatctgctttaatatcctgatatagagtggtatcgaagtattagccgatacacgctagatctatttgatcggctacgctataaacatatacagtcctgttattgacatatatttcgatctaagtgatttatactgtctcggcatgatgaccgatctatcccagtcacttgatttaagtatatatcgatataaggagtatatatcgttaatatctatagccgatcgagtagatttagttcttccttacttattcatgactgccgatcgatacatcgatgacatcggcccaaagataaatgatatgtcatcggcatttagccgatcggctatcatttatagatttaaccacggtttctttgcttctatttcttgttgattataggatcaaatcaactggcacgttaatacatccgaaggcgagttttggacatgcactggagttaagcagatctctcaggccacgtgttttctgtcaacacccggctagttcagcagccttctgggggtcgtcatctctgaacttagcatgttccttaccccctctgaagacggttaccatgaacttctccttgttctcatctttggagttggagtcgtggctcctaagcactcgtggcacctcagaactggtagtggccttctcagggaccgtggtctcttgcacctcggggtctttcgcaggagaagggtcttcaaatatttctggctctgtaccgtcccattccaatcctggtacttcttctatttctgacccgactgatgccacaaattgcacctctggttctgccactgtaatctccatgggcacatccggcactggaatctccatggctgcctccggcggtgcaatctccatagctgcctctggcaatgcaatctccggtggcacttccggcactggattttccttttgcatctcgggttcctccgccttatcaatcaccttcctcttaggaggtctcggaggttttcccaaccccggtttaggcaccacaggtttttgcgtggcgtcggtgcccaatccaaaggatatatcattcttgtgccaaagaattacaagatcaaccgcatccccaagtacggatacaccatatgcagtcaggaagtcaatgtcgtaggactcaaacccttcgtggaccacttgcggctgcaccttggcatacgcatcgggtatgaactcttcattgtatgttctcccagggatagcactggctgtagcggcctcaagagttttcccggagcatccaatgggaacgtgcaatctgtagggtgtattctccttgaggtcatcgaaggggtaatctggctcaggttctttggtttcggggcaaggcaaaagcatgtgcttgatgcagaaatccatcatttgcctttcaaactccgcagccccttcgtctctaagtttatccttgtacgcttcacgcttcttgtgggggtcatttttgaacccttccttccaactcatcttgctcgacacacctcgaacccttcccccatgctcaggagtacctagcgccgtacttagcacatctttctcccttttaggcttgaaagatcatttcttttgtgaactagataaattttctattttatcggcaacgctttacagctccggattttcaaaagatacttttccttcatccgtgatcttcggagttctagctcttacctagttccttgatctttgtgtccactcctccattggtaccggttgccccttcttcctcatttcctcctcctcttttgtccactgctccacctttggtgcatatcccgcggagcctaagtgatgaggaaatttgttcttcttggccaactctgcaaacatttggctcctttgaatttcttctgggaagttcttcaaggtcagaaagtcgtcccactgattgggggttatgttggcatacgtcgaaaatggtgtgcatcctgtcttcacaaatttcttgttcaaggtggttttccaaccacgccaagacttggccattgtttgcaatgcacaattcctcactgctgcctccgatccatctgagaactggaagattttcttcaactttttccataggacttccttatccccattcgatacatgatcccagtccttgaccgtgatggggatcttttcccttacaattatgccacactgtgaactgaatttcgcatgtgccgtcttaggggtgagcggctctcctttaggcgaaacatgggtaacaacatggaacccttcatcctttctattcacgcttctctcgcccttcattttcttcgcctttgctgaccgttcgcttttctttgtgccgtttgtgttagctggtacgtcgtcgtctttcgacggaacttttttcttcggctgccgttttgatcgccgtggcgccgtttcctatgagaaggtatacatggaagtttcgaattagctcgggctaatagttatcacggtgaacattttacatattaagtttacttaccccttctttagggggaatgtagtccttgtcgccttcttcaccgtcgccctttttccttctcttcgggcttgggcttggacaaggatcgcttggcgacgagtactcctcgtctttgtcagctacgtcgctgtcggaactaccttccggtgggactgttggttccggagcaaccacaacagcaagggactgctcttgctcccctaaacccttctcttcagtccctttagtactatcggtcatcgtttcaaacctctaatataaaaaaaaagagttatcagccacattttaaattactcaaattagtacaaacaactttgtacaaaaataaactgtatattaacaatatatcgtatgaacaaatttaaattctctgatattcccaaatttaactattatacaaaattaattagtacaaacaaatttaaattgcaaaatattattaattagtacttactattatgctaaattaattaatacaaacaaatttaaattgtgaaactaatgactacttactattatcaagtagtgcactaattgacagttatatttcatcgacatgttgattataaaaaattgaaaaggcaaacatatcctccacatttttttaaaaaaatgttaacataccctccaacatgttatttaaaaaatttgacaaattcacatatcctgcaaaattgaacataccctcccaatttcattcacatatcacccacattcccaaattcacattcacaatcaacatataacccctcattcaaatatcacccacccctcatgcccattcacacccacatgcacacacatatataccccctcacacccacatgcacacacatataaaaagaaacacccacatgcacacacgtccgtgttcgacgaacagccgatgacgagcttcggtcgtggacgacgaaggaagggccggcgacgaggtttggccgtggacgacgaccggccgaagacgtcgttcggccgaggacgtcttcgctcgtggacgacgatcggccgatgaagccgttcggtcgcgagcgagatagagagagaggtggcggccggcggcggtggaggggcggctgacggcgcggtgaaggggccggcggtggttgaggggccagcagcagccgcgtgcgtggtggaggggccggtggtggtggaggagccggcggtggtggagcgggcgcgcggtggaggggtccgcggcggcggcggcagagtggtggagctcgcgcgcggtggagcggcggctaggggcggcggtctcggtaacagcgcgtggacgacgacggtcggcggcgatggaggacgacggtcggagagtgaaggtcgcaggtgggcggcggcggaggacggcggaggtgtgcggcggcgaaaaaattcagtagcctgatggcgccaaaatttctagggttcccgcctggatttagaaattttggcgccgcgggcttgcccttatatagggcaacgatcttcgcaggcgggcggtctgcctgcgaagatcatcttcgcacgcgggccgtctgactgcgaagatgtaaaccctactctatataacaattttcgcaggcggaccgcccgcctgcgaaaattggtacagagttgaatatatttattccaaaatatacaaaccttaatattattacaaaatatacaaaccttagtattattacttttcaaatgtataaatggtaattgcacataaacatattactaatttaaattttttaacaaattttttacactacaaatggtaaaaatggtaattgcacataaaaataattacacttttcaaatattactaatttaaattttttaacaaattttttacactacaaatggtaattacacataaaaattagtacaaactaattaatatgcaaaatgttgagtacaattgttcgtcaatttgcgatatgatcacacatcaccttacataccatcattacataactactaacttcttagattcttacatgccactcaacaatcattaccctttaacatttttgcccacaccgttcgtgcgcatgtaaggcttcacggtcttctgagtagatgtctcgacattcttaatcttctgtacaaactgacatataaagtggcatactatcgtattggttgtaatcttcgacatcttcaaccccatccactcccaatatcttttgtttccctggtagcactatatcttcaaatttgaagggtctttcacataaaacacttgtgccacgcaattggcgagtacccaagggtcatccttgtgacccacactcgtcaggtcaacaacagtaagaccgaatttatcaacattgaccccgttcgggtattttacccattggcacttaaatatggggaattgcattgtgtgcccatagtcgatttcccatatttcttcaataaacccgaaatatgattgtttctccccggcttcatcaattgcctccacacggacaccgctgttttgcgtacaagtcttattatctcgggctcttgtgctaaactagtatccattaatgtcatatccctgccaagaatttactgtagttgatggaccacaagccaactgcttcatagttatttcattggtagtttgtccctcaggtaagtctaggtctcgcaaccaatctatgaagagacgcttgtgttctttcattatccactcggtggtgcgacctttattgttagcttgtattagttcgatatgttgatcgatgtacggctcaacgatagcaaactgatgaagcacgctgaagtgagcttcttggaatgatttgtgatcatgggtgacgaatctcttctttcctatcgttcccctgccactcaacctgccctcgtgtcggggcacaggtactccaattgcatattcatctttgaggtaatcgatacagcactcgacaacctcttcagtactataaccctcaaccattgatccctctggatttgcacgatttcagacgtaactcttcagaaccgccatgtaacgctcgtatgaccacatttgatggaggtacaatgggccaagcgcaaccatctgcggcactatgtgaacaatgaggtgctccatcatatcaaaaaatgacggagggaaacacatctcaagttggcaccgtgtctcatgtgcgaatgtacgtagatttcctaactcttcgagactaatgaccttctgtgacactgtgttgaaaaagtagcacaaccttgtgatagcaacctttaaatgctccggttttatggcccttattgcaattgcaagaaacacggtgagcaagacatggcagtcgtgtgaattataaccagataccgacaaatctttcattgaaactagtcgactgatgtttgatgagaaacctatgggcactctgacatcacggagtgagttgcaaaatgacttcttctcctcaggtgtcagtgtgaaacatgctggtggaagatatactttgccattcttttctccttcttgagggtgtaactcttccctgattctcatctcgactaggtccatccttgattgcagaccatatttagtcttcttcggcatgtccaacaatgttccaactatgttgtcaaacacattcttctctagatgcatgacgtctatggcatgccgaaccaccagatctttccagtacgggaggtacttaaaaaatatggaatgcttcttgaatgggggagggagtttatcatctggcttcgaactatcatcttgcttcttactatcccctcccttcgtattcttctcgggtttcttgcgctttgtcccctttgatggtttcttagtcatttttccaaactcgcaaacaattttctctgtcattgcacacaccttttctcccgatgtaggttttggtgcaggatcagtctcttcagtaccatcgaactccgccttcatcttgcggtacttgtgatttgtgcgtaggaaccaccggtgccgcatgtacacaagcttgttggaacccgggagatacctatagtacgttccattcaagcagatcacacatcctattttacctttaatttgacctgaaactgaaaacattgctggataatcgttaatggtcacgaagatgatggccttcactgtgaagtattcccttaagtactcgtcccacactttcaatccctctttccataaatcagccatatcttccaacaatggttcaagaattatgtcaatatcaataccaggctaacggggtccctgtatgaggatacatagtagtacgtattttcgcttttgacaaagccaggtaggaagattatacatggtgaaaagcactggccaagtactatgtgagctgctcatgtctcaaaaaggattaactccatcagtactcagggcaaatctaatgttccgtgggtctttagcaaactttctatactgagcatcaaagtttatccacttacgagcatttgccgggtgtcgaatcatcccatccttcttgcgcccttcttcatgccagcacattagttccgcatctcgcgggtttgagtatatccgtttaatgcagtctttgacaggaaggtaccacatcacaagctgcgggatttttctctgtcgtccctcagttgcttcagagggttctaggccagtattgctattcgacttgtaccggcttgcaccgcatgttggacattcatctaaagaagcgtaatctttcctgtacagtatgcagtgatttacgcacgcatgaatcttttccacaccaagtgaaagggggcatatgagtttctttgcttgatatgtgctggatggtagagagttaggcctcgggagcattttctgcagaagttctaacagactgtcgaaactggtatcagaccatccatgtctcgcctttaacctcataagttcaagaactgaccggagtgttgtgatctcactgtcacagcccttcgactcatcgtacaaaacttcctttgctgccttctgtaaagcttcaaagttatttaaccctctagccgaccccatcagcacctcgggttctgcatgacgtaacatttcctctaggtcgattttgtcctcaacagaaccatcgtcatgcaccatgtcttcaacttgtgtcggaactacattttcaggcccgtccacttgttcttcgccatgacgtgtccatatttcgtacttgtccataaatctacgagttactaagtgctccttcactttaaaagcatcgtcaaagtcccaggctatttcattcttacagtcagcacatggaccaattatcttcctcatattgttcttctcagcgtgtgccttggcaataccaataaatttagacacttcgtttctatatggagacaaaaatctcggccaatgatacatccattcccgactttccgtatctctaaaagaatacacgtaaaatatttgcacaattaataccaaatttgtagggtttattgaaaaaacttatcgctattcaaaactaattaactaaaagttaagtgtaaattaataaaaaatcaaagtttatttcaattttttttacacagacatgccaaattagtacattaggaaaatctaacaaaatcatatcatcgccatattacaaaatactataactattttttgatttcaccgaataaatagacatttaaaattttattctctctctatatatgacaagatctagatctagatctagaactaggaggtggatgtgatagcaaaaataaaaaaaattgagaatttatgttaccacattaaaccactacaacaagaggcatcaagtattgtacatacatctaacatcaacatatcaaaagaaataaaattaaaaaacatggagctcttccttcacaattttgcatgcataaatccatcacaaattaaggtataaaagcttaaaaaattgcatacctagtgtgaaaatgagtagatctaagtaccgtagaaaaatcccccgaagaattgaagttcaaaacctcccccctatatttaggtcactttaggagagagaaacttcggggagaatgaacagggctcggggaggaagaagactatataggggcatcttttcaggcaggccatataagcggcgcctgcgaagattgatcttccaggcggaccatataagcgtcgcctgcgaagattgatcttccaggcggaccatataaacaattacatgcccgcctgcgaaaatcgatcccctacgacgccgaaaatgagttttctagtagggtcagctagaatatgattcaagcatctctaatttggttcaaggagcccttgattttgagacaacatgtttcacaaaaccaagacttaattatgcaaaacacacgttaatattgtactatggaaaatgctacacgtacgactttcgcttacgatcttgatacgagcaaacgtaaatgacggagaaggcactgggtacctaacgggagcacacactaatagaaaaaagatttttcatggcgttgccctatgatttttactggcggaaaaatacgaaaactgtcagcaaaaatgtaacgaggggtggagggctacggattgccagcgaaaacaaatcttcgctggcagccgagctaagcgggccgccagtaaagatgtagccatttttgctagcagcccactcaatacactgccaacgaaaatcacatttttactggcggatggtacagagtaccgctgcttttaaagtccaccgcccacggcccacctctcgccattaaagttcacgcgtctctctcccaccgcctccctcctctctctctctgactctctcctacagcctcctctctccgactcctctcccaccgcctcctctctcgctcatccgccgcctaggcctcgatcgggagctgcggcggctcgggcgacgggcggtggtcggatcaggtggcgcggtggctcgggcgacgggcggtagccgaatctagtggcgcggcggctcgggtgacgggcggcggatccagtggcgcgaccactcgggcgacgggaaggtgagaggcggcggatccaggtctttctcccccgctcctccctcctccccttcccccgccgccaccacccctctccctctctcagatctggtgcacgggccgaaggcgctaaggttagccgactcagcgccaaccaccttggcgctaacaccctgccagcgtggcggctgagccgttccccccggtgacaatgttcctaggatctatacctatcaacatcatcataaatcagtatgaatccccaaaatattcacaatacaacggcactatacatccctcccaagttcacccttagcaaaatagtgtataacttgcaaaaacaatatgtatcctctatacgaacatcaatatacaactacaacattgcattcttacccatattccctaattcacaccacaacccgagccacattcaataacgtacggtttcaaccaaaatactctacaaaaatgatgaaaacattggggaaattagggtttttggagggaatttaccttacaaatcaatctccaacgcaatgcgtacaaaatagccttcgatttgagggatatttgaggagatattcggaggggagcagagagggcgacgtggatgaaccctagccgcgaggataaaaagaagggagtgccgggcctgggcggctcggccgcgatctataggctgcaggctcaacgcaaatgcgtttggcgaggttagccgtctcagtgccaaccgccttggcgctgagaaccctgccacgtcgaaggggattggctcggccgccacgttagcaggggttcagcgccaacacgtgtggcacggtcatgtaggaactcggtgccaacttctctggcgctgagccgatggcttatttttggttgaagttttttgttgggactactttcgaaataagtttttgaaaaggacaaatttatcaaaaaaaaagggttatgatatagcaggccaagacatcatcatgaacttgagctttggatatgggctcaatagtggaagaggaatccatttcatcgttaacaaccgctggaaagaagcgttttaccgtacaacaatcgtaaaaaagaatcgtatgtatagcagcgccgtaaaaataccacatactattttgtatatatgtgtaatgcattgagaattggatggcgtagagatatatattggttatatgattatttttgtttgttgttttttgtaaactctaaaacttgggatttagaattaagaatgcgttaagacttaaattgtttttaaaaaatacttgaacaaatggttccagttaggattacaggaagatattcttctctcgtgggttgtgcacttatatttacacgggcaaatgaaatctttcttcttttctataggaagacgagagttctagcaaatcaattaacaaagggggatggagaaagatactcctaagtgttttactccctccgtcttataaaatatcaacttctgaggatggacataaataggcatttgtctatattcatcaatagaagattttttttttacaaaaggtgtacagagtaagagccaaagcactgaactagtacaactaataaaaacagatgtagcagctttttacattacaactaataaagcactgaactaggagatcggacagatggaatcttcaagtgcaaagtagagtttttcttatttgaagacagaaaaagacagtgggctgaagtattagataaacagaacgttgatcaaaagacgtatgagtcatgtgaaggcttattggaatttgggaaggagcatctctctctctctcttgagtcctgaactagaggggactatagtcaagacttaacatctcagcttctgtatcgtgctcactttccagtttccacccaccgcatagtctccctgcagtactgtcgatcgctcaatcagatcacaagtctaggccaagatccagagggagcaaggactgctgcgcgcggcagttatggagatgctgcaaagcgtgatcaacatccgcgaagcggtctcaaccatgatcaactttggggaagcgagcaagctggagaaggatctatcctgcctcccggtctctttggacaaggctcgcgctgtcatctatcggggcgagtggggcaggttcaagaacaaggatctggcggcacttctctggcatctcaaggacgccacctatgacgcggaggatcttctccgcgagtccaatgatcaggtgctatggcagaagatggaggatgctgaccggagcttggcaggtcaatttttctcttcctctctaaatgttgtacaaactttgatcggtggtagcaagacaaggataaaggaggtccaagataagctcaacaaggctgtggctgatttagagggagagcttaattcagtgggtcttaattttgagatagttcaacacatgccagtgacaagttcagtcattggcgtgcctcaagtgtttggtcatgatgaagaacgagatctagtgattgagaagctaggtgtgatgattggacgtgacaatgaacgagatttagtgattgagaagatgggtgtgccactcaccaggtttgttgcagcacgagctaaaggaaagagagcagcagggggcactgtcgccaaatcagcatccacaccgaagcgactgaaaggagagagtagcagggctggacccagaatttctcaatccaaatgcatcggcaatgtttctatcttgcctatatttggtattggtggggtggggaagactaccttggctcagtacatctataatgacgagagggtgagatctcactttcgcatgaggacatgggtctgtgtttcagacctctttgacaagaaaaggataatagaagagatcttcaagtccatcaccaagaaagactcatcacaacatagttcaaatgatcttcaggaggaattgaagaagaagctaaagagtcaaaagttccttttggtgttggatgatatttggtccattactaatcgtgaatgggaagaacttaatgcactcttgaaggacggacttaaaggcagtatgatcttagtaactacaagattacaaaatgttgctaatcttgtttgcaccaacaactttgaaccttttgaactcaaaggattggatgaagataaattttggaatttcttcaaggactgtgcatttgggcagaagcgcccagctgattcggaatgtaataatttgcataaaattggtcagagcattgcttctcggttatgcggatctcctttggctgccaaaactctcggacgcttgttgaatatggagctaaccgtgcgacattgggagactattcagaaaagtgaattgtgggagctgccacatcaagagaatgagatattgccggcccttcaactgagctacttatatctcccacgagaacttaagagatgctttgcattctgctccatgtttccaaaagattatagctttgaatgagatgagatcgttgacatttgggtggcagagagccttgtgaaacttgtatccggagagaggacgcgtcctgaagatattgggattaggtatttggatgatttgaggagcaggtttcttttgcaaatcgatcccaagtacccggatgaaagtagatatgtcatgcatgacttgatccatgatatggcgcagtctgtttctgtgaacgaatgcctcttgctgcaagatttgagctctcggaacgagggcagaaagctacatgcagttcgccatatgtcggttcaggttgcagatgaatccttgaagagtgaactaagagacattcagtatttgaataaacttcattcacttaggttagggatcaacctcaaggtcgagattacctggtttaatcagctctccaacatcctatttatgagcctacagggttgcaaacttgtcaagctacctgagagcataggtgagttgcacagcctccgttatctcgatatatctcatagctgtgtaaaggaattgccggagaaattctggcgcctttacagcttacaagtggttgatgcaaggcgttcgagtttgagagcaattagtccggatgtcacaaagctaatcaacttgcgtcgtttagcactgccaacaaattgcgctctgaaattatcagtattgactaggcttggaaatctctctcgtctacgaaacttaaaatattttacagttgcaccaaggaatgggcggaaaattggtgagctgaaggacatggataagctcagtggaacgctaactatcaaatctatttgtaatgttaagagcaaggaagaggcttctgaggctagacttgttgacaagcaatatctcaagacactagatctatggtggcgagatagtgacggatacaatgtgatgagcagtgagaatggagtgctcgaaggcttgtgtcctccacgaagaattgaatgccttaaagtcgaaaactttaggggtgacagcttttgttctagttagtttaaaccagaaagcctaccgactataaggtccctggagcttgtcaggtgtcactgcttgaaaagtctatcgattccgtcattaccttctctggaacatctattactggcacgagtaccgattgaagaactaacagtttttgctgacgatacgccatctggttcaactgattgtgacaggatgcagcatccaagcagcagtaatggcattgtatgctttagaggcctcactagtgtacgccttatcaactgtaacgggctgcggaatcttgatcagttcttgtctccggattatctaccatccatcaagttcattgcgatcgggcgatgccttcgtctagtattacctagtttcgtgggatttgatcgcctacaagacctgagaatctcgtattgcaacgaggtgtgcccacaagaaatggttttgccatcctcactccaatgactttctattgtgaattgcggtgagcttgataggtcatttccaacctgcctacgggctctaacatctctcaccgccctgcatttggttggatgtaataacatggagtccattccgatcggcacaaactttcaggtccaatacctgcatctcaagaaatgtttgaagctatcatccatcggaggagcgcacgctctttcatcgtttcgttacgtgagcatatcggagtgcccggagcttcttcaccaagtacaacagccctttgaaagggacctgctgacaaaggaggagaaagaactccataattttcttcgactgaggctgattgattattaactcgtaaatacttccgatggattctcttctttgggcgagtaactttccgatggattttcttcatcatgcggcggcagcatccacaggccacagcactccttccagtatttcatctattttgtggttaattacccttttactggaacaaccaagtgaggtgtcttccgatgtgcttcttcctatgtagagccaattacggttgtttcctgttctgcaatttctcatgctcttttatcttcatgtatcgagccgttcttcgtgtaagctgatcatgcctgctatgtgtactagttccatgtccaatactataataataatgttgccaatactacaatgcagcatcatgagttgctgcaatctgtagttgccacttgctttacaagtttatatatgtatgggattttgcaatatttgcaatctgtaatttgtcaaatgatcgatgcattgcggaatcgagttgcttaaatatatatatgttggtacctgtgggcttggagcctttggataaaatactacatttgaccgtgctttgtttatatcattacatctttgctaggcaaataaaaaaaaatgaccacaactattgtttacaacagcagttcagatttaagtgtcaggtttagcatggtaattttattttcccgctattattcacaacttacagcatggattccgcatgaaaagaaaactagctactaaagttactcccttgcagatagcaccatgagaaggatatggttctttttcgctgatttaatggtaaccgtatgatccatctgtgaatatttggaaaaacataagcatgtgcttccaatagctacatatttgatgagaattgagtgtgtgcagtaatgcatactgttggacgaaatatagctgcagtaatcacatatgttatattacaaaacattctctgaccttctgtagctcatattttgttgtctttgctcacctgaaaccgataccaaattattttattgaagcacacaattttctgccttgcatatatacaaagttattttagcaatacccgctgcaatatgcggggtatcaactagtttaagaacataagccccggcaagtgagtgaacaacctgacacgaaacaggaatgccactggatgaactgcagaaaaccaacccttcatttcgagcagaaaaatggacgacctactgtgttgtgcaagtgtatagcaccactcctaaaactacgaacttacagaaatttaagagcggatgaacttggtgattatagaaaacgtagaaatccctggtttgagcctgatccagcacgatctcgatgaacagaaattctgcaaaatcacaacaggtgcagcaaaagaatgatacaaaaaaagggtatgtgtaaaccctctctatctacatttacatattatatcagatgcaaccaacatgaccaatcggttcaagcagtttaaaacatgtaaataaacacaacactcgtacttttgaaataaatggcaccataacatagaacatatgcaaataattgcagtacattggtttattggatacggaatggtctaaagaaccaacatgatgacacatttgatgatctgttcttttcaacaaaatatctcgtgttcaccataataattaaattaattttagtaaagtatgtcgcagaaatctcgacatacaacaattgacagttaaagctaggattatactaggatggaaagaactcaacaaattagttcacacgctcattattcttcttgagaaaaacagctttcctaccaggtgtccaggttaccagtaaaaacaactagataaggcttttatacatagcacagataaaggttgaaaatcgcaagttacaaccatgaccagtgtaagattgcaggtagtaatcatctgagttcagcatctagaatctccacatatggcagctagtaataatattaactacttcagtacagcaattagcaaggtcagttcgattcatcgactattccgtgttcaagcatcagagctatgtaattatgtttcagatcacagaattagtctttcaattcatcctataatttacaggcgtatccattttcatgcaaatagacaaatagaaattgtaaatgcatattgcataactccactggaaccaaggttaggaagaacacacctttattttgtaagagagagaattacagcagataagaaaaggttatgtgctaatggtttctagcttctgtacatcgctaggaagaatgcacttgagcaattcttagtcagcaaaatcttcagaaacgtgcagggctgaatgctcataaaccagatcatcagattgccattgtccgcttcaccaagcatcaagctcgctcccagtgtcaaccaacccctcggccacagctttcttcacccaaaactcctccaacgcatccaattcagcatcagcatcgtcatcgctcccctcaccaagatcacccacctcctcccagtcctcgccaatgccaccatcctctaacaagtcccaagattcaccatcgacctgtaccgaatcctgttcttccccatcctcctcttcatcatcttcatcactgtcatccgcaagagcaagaaggcccttcttcttagcccgcctcatccgcttcccctcgcggacaagctcctcaagccgatccctcgcaacaagcatatcatcctccacaagtagcctaccgtcatcgtcgaacgcctcgacaaggaacaccgagtgccgcaaccccttgacactaacatagaacaactctgggtgccgaactagcattgcgcgcagccggttcggtagcccgaaatcacgcctgaaatgtgtgagatgatccaccagtgttctcttctccacagtcatggccaggacctcccggacaaccgcgcacgcccgtcgctccatcatctccaagcttgcgccctcatcgagtggctcgaatggcgacacctcgggcaggctatggaaccgcaagaggtaatcccggtgcgcgcggcggaggttgagccctcgccggagcttgaggtgggggaaccttcgtggccggtcaatgaggcggtcggatggcgccgcggggcggaaaggcgggagcggcggaggcggtggcggcgggggatcgactagctggagtgcgtggccgtgggaggtgttcacgaaggtgaagaggtcggggtgctgcgggcagagcgtggcgcggaagtccatggcgaggccgagatcgggtgcgaggtgagcaatcttggacacgaggaggctccgcccgggtgccagaaggaggaggcggtgcatcttggcggcgaggcgtggcgcgagctcggaggagccacggagcgcggcgaggtcggcggcgagcgcctccgcggcgggggtgagcgcgacggcgagggtggagaggttgggcgagagcgggtgcgacgtgggcgcctggaagaggcggaacagcgccgggtaccggagcacgaacgggaccagcgggcggcggcggcggtgcggcgggaggccgaggtagcggtggcagcggcggagcacgcggagcgggaggaagcggcgcggcttggagaggagcaggacgaggagcttgcgggcgaagcggaggcggttggcgcgcgccgcctggcggtccagcgccgggcaccgcaccagcttcggcggcgggattgacctcgcggacgccgcagacgccgccgacggcgccgccgcgggcgcgggcgtgcagcgtacggccgtcggagtgggcggcgcggcggtggagggcgggggattggggaggcggacgcggcgggggtggatgggttgcggcgagaggaaggagagggaggaggaggaggaggcggtggtcgccatggcgagcggattgtggggaatgtgtggggtttgagatgagagacaggataggaggaaaaaggggttttgggctttttctttttttcgtgggaaattttattttcagtgttccattcttggcttttgtttcatggaaattcacaaagctgcgttaaacgaagcaatgaattaacacatgttaattattaataagtattaactaaaaagtttaaaatattaacatgaatgttaaaagcaacttttctatatttttttaaagaaaaatatattgtttaacaatttagaaaatgtgcctatagaaaacgagttataggagttagaaaagtgatcaaaagaacacacatccgtaaatctctctctatcaataaaattaagatattgtaagacagtaccagcagtaactacatattacattagtatcatatttgaacgtgtcttacctatactatcaataaaaaaagggcatttacaaatttaccactgtttttttttaattttgtaaggatgctactcgaatgatagttccagtggtatttttgcaattttttagtggtagtttcgcaataacgattcaaaaccgtggtaaatttacaattgccaaaaaaaaaaaagatgctagtggaccatcactacccaactatcatgttgaaatcataaaaaaggataaaactttgtttacaacaaaattagcagcatggtaatataagggtgctttagggcgggcttttgaacccatttttgcttttacaaaagcaaaaaccaaccaaaaagctcaaaagccatagctgcttctacccaaaaactgcttttgctctagtacaaattgaaagcacctctatctcctgctttgagctgcttttgggtagctcctccaacacacgcggctgtggcctcactaggcgaggcgagctcccggcaaggcggcgagttcctcccccaccgccgccacccacggggagaggatcttcccagcctgctgctatcgccgcgtttcccccctctaatttgccaccgccgtcaccggccgatgccccctcctctcccgctgacgctacccatggggagaggatcccgccgaggccacgcgtagcgagacgatctcaccgaggccgctcgtcggtctgccgccactgccgcgtttccccctccaatccgccaccgccatctccggctgatgccctcctctcccggtgccgccgccccttcgcccgtcggccgtggaggtgggagacgagagaggtgaggtggtcaacggcggtggcaacaccactgcctccttctcccggggccaccgcccccttcgcccgtcaggcatggtggccgccgctgctccagccgcaccgactccaccgcgcacgtctgcctccccgctgctgccgccgaggccaacggcgatggcgatggccatctccatctcttcctcttctcgtttttttcaacgtgtgtatgacatgtgaggcccgtttgtcagcaggactagttatttcaaaagctacagttgttaaaccaaacgagctttttcaaaaggcagggaccatattccaccgttgcttttataaagccacaggcccacaactcatagctacttttccaaaagccacatctcaaacaaacaaaccctaagtagataacatatttttaagactttaataaaattatatataatgggctatttttaatttaaaaaatccgttgtaacgtatgtgcattatgctagtagagaaaatatatctgatgatattaatatcataataagaacaaatatatcaaactagcttgtctttaattacgcaagtactataatcatagggttgtatccaagaattttagtcaccgagctaaaggcacaaggacaccgtacattttggagaatgtcgataaaaaaataattttgcttcattacataactgaatcatacgatttttcatcgtactaagaagtatattaggcattcatgattaaagactaagatattagtcagataacactagtatatatgttaggagtaccatacattaggtgagttggcagccacccgatcaaaaaaatagtgcgacagagtgttaatggttctgtatctacagtaaattaacattgttcattgcgttggtctactgtaatactcacatggatagtgaacctctgcactaatatgcagaggatcgggctttcgggtctgctctctgcaacagttcattttgaacaattcatctgatctctaattctatagtagaccctatttatatgggactaaaacttttataaatattaaacgtagactataataaaatctattcataattttggactaattcgcgagatgaatctagtgagcctaattaatccataattagcctatgtgatgttacagtaaactaattaggcttaaaaagtttgtctcgtaaattagctttcatttatataattagttttgtaaatagtttatatttaatacttttaaattagtggacacctgtatccaaacaccaccttacactgtttttccaccaccaacttcaatacgtgtcgcgcttcgtcgctgtaatctcaaaaccatagaactaacagccacgtacacataaaccgccacagtttcttctcagtacacgtctcagctatgtcacctagtacacatgctcaggaccaagaacggcatttccctcaatatctgatagttctaatccttctgcctcccaagcccaaaaagccccatacaccatccacgcaggtaaaattgagaaagggaatcaactatgcataatttatcacttcaggctagggaagcggaagagccatcggattttatagtcaagctatttacaccttgccaactacatcacattttggccacgagtagtgtgcagtcattcaccacatgaatacgcaggtggcagtcgttactgtcagtgacgtggctcagtttatcacacatcggactaaatattcttctccatcacatcaacccatacgactccaagaacttacacaatggtccgaggggtggaaacgcgggaccgtgccagtccgtagctccactctaaaacgcgggatcgtcgtggtcccacggctccagaacgcagcactgacgtagctagcgattttttactgtgttggtactgttcaccactatttgggtcactgttttggcactgttcgacactatccacgattcgttccgcacaatggaacagcgggaccgatgcgtgaacaatgtcaaacagtactaaaaacaatgtaaaattgctcactatcacggtcctgtattttggagctacgggactatcgcggagccacgcgactgtcccgcgggactgtcggtcccgtattttggagctgcgggaccatcgcgggacaggtaaatttttgcaattccttcctatgcatgtatataaacgtaaattattgaaaaaataagtatattcgtaatttttttctaagtatagttagcatattatgacactgctaagcatgttatgataccaatgaactttttttttatacgccgcttattgaatcatgcgatttttcattgtactaagaattatattaggcattcatggttaaagactaagatattagtgagataacatttacttctactcatccttttggtattccctaaaatgacttgtacaacaatatcatcatatttaatcttcaaaacatacttatttctcttagccaaatggttctgtatctacagtaccgttcattgcattgatcaactgtgacgcagaggatccggattttgggtctgctctctgcaacggttcattttgaaccattcattccatatctacttctctagttatactgttttttcaccacaaacttcaatacgtttcatgctttgccgctgtaatctcaaaaccatagagctaacacccacctacacataaatcgcctcaatttctttgtacgtgtctcagctatgtcacctagtacacatgctcaggagcaagacagcagtgtttcccgaatttttttgagaattaatattatttttatggaaaatcgcaaaagtagtggccaacgggggaaaatcgcgaaagtaggtccctgtcgaacgggtgcaattcgatagggcacctatcgaacgacgggcagtcgacaaaaccctgtcgaacggctggcgttcgacacgctcacctgtcgaacggagggagttcgacagggcccaccacccggcgccgcgaggcctgtcgaaccgggggcgttcgacatggccctccaccgaccctgtcgaacaatgggcgttcgacaggccggtttaaagccccgtccacccaggccgcgagttcgatttgtttgaggaccacatcgccagccgccgccgagagtcgccacatcgtcgccgtgagcgccggagggagcgaggggaggggatagcaggccggagaggaggccgaggaggcgccggccgggaggaaagggttggcgacgccctctagcagtgaagttaaggtatacattagtaatccataagtacaatgcatatgaaagtttaataaaaaattggtttaagagttgttaattgtttcgcattgttcgatgttagtatgtatggttagcacatatttgttattgctaaatgttggtagaggtatttaagtaattgtacggttaaattagttcttagttagtacatattattgatatgttatgtgttaaaataggtacaaaggtgttatattttatttggattattaaactagttgtttgttactaatagttgtaaattagtacacgacaatgtagtataagttgtaatagggtaattatgaatgattaaatgattaaacgtgagactattttttcattttcatcaaggatgtcaggtgatatgcccatttgtctgtattatggggatggttttaacccaatattgtaaaacggggtgggtttggactggtatatcctttcccatgatactagtctaatgcaccggagcatatgggtttgaacgacgtgttagggtggttgtataatatgtttagggtagatccagtgcacgataaatttgtcataaatgccgtgtggccagtgaggggtcaacatggatggcagtggagagtagtggaggttgcgtcaactgggagttggaggaagtttgttagtaaagtaagggagaaaggctatagcctggcaatagtggtgcagaagacaacatgtgttgatcgatcgggggagtcaagtcatgccgtggtggaagaaacaacgttggaaggtggacaagctgaaaatgtttggcggactgagcaaggtcgaggggaagaagtagtagagggtaatacacaaggagaggtcattgttcgtggtactaatcgtgaggccaacgactcggatgatgaagaaccggattcgcctatgcgtgttgatgcaacggaggagaatgaggcggtagtggatcagatggaagtggaaaacgaggaataccttgcgcttgtagtggaaggagaagatacaacactgtgggacaacgaaactaacatacccgatgattggacgaccatatcaatgagtcgtatgaaggtaaacgatggtttagatgcccactggtgttatgatagtaagcaggtgaaagttggacagatgtttcatgacaaaggtcacttacaagatgcggtgaagaggtgggcatttgtccagaagcgtgagttcagggtgaaggtttcaaataggacgacgtatgacgtgaagtgcatacagggtggatgtccttggagagtgcatggttacaagccacaacatgacactttatgggtagcttcgagagttgagcaacatacgtgtttgttggagaatacccgtctggtgcacagaaacctgacagcggcatttgtggcacaaatggtatattcaaaggtggttagaaaaacatctttgtcccctttcaccataatgcatgacgttgagaaagagtacggatatgagatatcgtacgacaaggcttggagggcaaaacagaaagcattggagatgaggtttggaacttatgaggattcttatcacaatcttcatccactattggaggtgatgcaggcaagaaacccgggcacacacatggctattctcgatgaggtgaatgaatatggggagaatgttcttcgtcgggctttctggtcatttgggtgcatgatagaggcctttagaaattgcattcctttgctctgtgttaatggcactttcatgacaggcaagtacagaggaacaattctaaccgcgatcggagtcgacgcggatagccatgtcgttcctgttgcttttgcatttgttgaaagcgagaacacatcaagctggctatggtttttgcggcacattaaaatgtgtgttgttgaaaacagaccaaatgtgtgtgttctgcatgaccgacacgccggtttgctatcagcgatacagaagcttcaagaagatgtcacacagtccgtgccatggccagatttacatagcagatggtgcatgcgacattttggggctaatttttatagacaattcaggagtaagagattgatggacctgttcaagaagttatgcaagcataatcaacaaagaaagtttgatgccatatgggatcaactggatcgtttgaccactacacacatggaagatgttaggaaaaaacctatagttgccagacaggaggagccggagggacttgaacccattcctaatgaagcaccaagtattactcggcgcaggaagcgtggaagggccacgaagtgcttcacggagtgggtagaatttgagccaagggagaaatggtcgttgttgtacgatacagatggatcgaggtatggtgtgatgacaacaaatcttgctgaagtgtataactgggttatgaagaatacacgacctctaccacttgttgctatcctggagggcatcacgaggggtacacagaaatatctctgtaaaaggtattccatggctagtctgaaccttagcaaacccagtgttaagtatagccccgttattacacagtacatggatgagaaaagtaagaagggaggaatccacagagtgtggcctgctgggaatagagagttgttatttgagatacgacttcgtgacaagagtggtgtcggcattgggactactgacatcacattggaatgcacgttgtggccagagtatcacgcttgcaaatgcaattgcaacaagacttacctgttacatcggccatgttcccatgttcttgctgcttccgcaaaagggggtgttgatggaaacatttttgtttctccctactttagaaaggaatcgtgggaggcaacttggcgtggtgaattgcgtggttggcgtgccttgtgcgatttcattcgtcctcctccagggcaagccaattgggttcctgactcaaatttattagttgatactaagggtcgtcgccagtcgcgcaggatcaagaaccttatggatgaagctgaagtgaaagatcgttctcgtcgtaagaaagcttgcattctttgtggggagaaccattcccgtaaagattgcagcatgtacaatgtagggcaagatgccacaggcgctgatgttcgtcgcgttccaaaggggaagtcgaagaagaaaaataatccttagttcgctattatccttggtggactccctactttgaagatcgttatctttcaatttatgtttagtgcgtctgtaattttaatttgaactttcttgcacttttattacccgaatctatttgtaatggccttgtaattttcattttgaactgcactgcacttttaatatcgtcatgtatttgtattggaattgtaatttaaatttcgaactgcactgcacttgtaatatcataatatatgtgtcgtgggcttgtaattttaaattgaaatgtactgaactgttcttatctgtatctatgtgtgctggtactgtaattttaaattgaaatggcatgcaaatttgttacttgaattatgttgcatacatttactgtactgttaccatacgtgcattgtactaatgtggttttcgatctgcaggtatggctgatcaatatgatgggcagctgatagacaaggagatcgataggaaccatcgatcgcgacgtcttagtacaggaactttctgcaatgtgctaaagatgcgaggaccggatcaatattggcgtattgatcctcgttgggtttcaaggtgtgtgaaaaaatattgtttttactaatacaaggtgtttatattttcatgtattaataacttgcgctctgtcatgttgtaggctgagagcagctgggttgttgacgtttgcacggttggtcgagccttcacgtgcaaggtccgaacgaatccacattgacgcggcgcttctgagtgctcttgtggatagatggaggcctgagacccacactttccacctcacagttggagagatggtgcccactctgcaggatgtgtcttatttgttggggctgctgataactgggccagcagttggcccaacaatggtgaatgctggatgggcggatgaccttctggccagttttggtggtgtgctgcctgttgcactggaggatctcacagatgggcacgggcctacgaaaagttggttgaatcagtttcgacaggatgtcttccctgatgaccaggaggagtggatcgtgcagcggcacttagtcgcttacctgttgtggttgtttggatgggtgatgttcacgggaactcacgctgactccgtggacaagcacttcatccactttgcggagcagattgcagagttacctatcgcggagattccacagtacagttgggggtcggcggtacttgcggcgacatatgccggactgtgtgatgcttgcgtgaggaacagcaagcaaagttcactccctggatgcccgttgctacttatgttgtgggcgcacgagcgcttcgacattgggaggcctcagcttgactcgtacgcaaactacggtttgcgagagatgtacaggtctggtgttgatgacatcgacgatcgtcccactatgggatccttgtggacacaccgtgaggtattttttgttaaattcgtttatgttatcattatgaatactagttcacaaactttccttatatgactaatgaaaactactacttgttacagccgcagtgggttagcgggacgacacgtcgtgtctacactcagtttgtagctgactttgatcagcttacgcctgaccgtgttcggtggactccctacactcagcacgatgtcaatgatcgtgcaccgcacggtctcgcagatctttgcacgcgagatatgcaactctggatgacgacttgtcacctcgtggtggacgtgcacgtcgagccacacaatgtctacagggttctcaaacagttgggcatgtatctggacttccctccgagagatggtcgtcctttggctgatagtcttcataggttagttcacatcacagttgtttaatcctacatttttaaaataaatcactgcacaacattttttctgatgtgtgaatttgttgttgtgcaggtactccagaaaggggctcgggctttcctacgagctagttattgtgaccacggttcagccgacggtacaagagtgggagcacgcagctgataacttggcacttcagacacctccagacgatgggagttattatggagcttaccttcattggtatcgcagtgttacacgatggaggtgttttcctccacaaggagatagcaccgtcccccaccaggcagcgattactgacacgtttgcccctcagcctagatcagcttacaactcaatggtacgtgtttatttgtggaatttgagcaactagttcaatatttttaaaaagttagcaagtagttcagtatgtctaataaatgtgcaattggttcaactagttccttttcttacataaatgtggaactagttcagtatttataaatgatgtgcaactggttcattatttctaacaaatgtgcatcttgttaaatactcttaataaatgtgtaactggttaaataattttaattgccttgattatttgtggaacaggcggaatttgttgagcatgttcacgtggagtccgacaccctactgcaaagactagaggcaagacctccagtcgtcaggcttgacgacgtggcgagcatccttcgcaacttccgtgcacgtgctgccgcactactacgtcgtgtctcctgtcggagcgcggcagatgtggtgcagacgtcgggccgacggccatcaccaccactaccccgacgttccagcatggatcggagtggtccatcctcttcacgtcgcgggtacgaagcggcccacacatctcacggtcatccttcctttcagcacaccccagcaccggagtacaccagggggtcagccggatcaggggtacccacgtcgagcacggcaccaccacgtccgcaggtattccaaactccgccttatgttcacccctcgcagggagcatctgggtcggcacacttcccttacatgccaacgggggacaacgtgttgaacacaccagcatggggacttcatatcactccgcgtgcgccagagcagggccacacacagcacacatgtaagtcattttaaacaataacacgctttagtttctaattatatgtatcgttactaactacgccatattttttggtttctccctcttgtgcaaacagacgatgagtacggttcggcgtcgacgcatcacggaatgcctgcttactcccctcgcacaacattcattgaggacttcttttccactgatcctccccagggggaagtagggatggattactggcacgcagcacctcaggtcacacagccgacgcaggagacggaggccggtcaggggccagacgtgacaccacagcaggcagctagagataggcacccccctgataatttgacatatcccactgagcagattaggcgtaggaagaagggaggacctagcaagcgtgcgaagggcactgatcgtccttgacttatctatttgtattaaacttttagtcatttatgttctgtccgtactatttgagaaacactttacgattaacttagtactatcagtactatttcataaatttcttcagataattactcagtagcatacccttcgaatgaatcatgacaaattatcattcaaatatacaaataatgaaactaaataattcaaatattttaaccaacaaataaatactacaatttctgaccaaacattatcaaaaccctaaatcatatacatataacattacaaaaatattttcctttcttacacactaaaataaattacatattattaaaaaaaataacttattacaaataaatggagaacgcgaccctgtcgaactgcgccagttcgacggacatcctgtcgaacaggggcagttcgacagccctgcctgtcgaacggggctgttcgacaggtcctgtcgaacggcagccttccgatctcctcgccagtcgcgctctggccgttcgataggcgccctatcgaactgcacccgttcgacagggacctactttcgcgattttccccggttgaccactacttttgcaattttccataaaaataatattaattctcaaaaaaattcgtgtttccctcaccggctgatagttctaaaccttgtgcctcccaagcccaaaaagcccgaaacaccatccacgcagctaagaccctgtttagatgggactaaaactttaagtccctatcacatcgaatgttttgacactaattataaatactagtaatatgcctgtactaacgttacggtgatgtttcataagacaacagtgacaaacagaaaatgcactgtttcattaggcaacggtgataaacagaaatgaaattcctgctgagaatgaaaacaactttacagtgtaaatgaaaatgatgctgaccaataagtttactttcacaggtgtaaaggccgggtttaatataaatccattatcttaaaaaataagtatacttgttcctcgcaacatactgtttacacataaaacttactaacaaataaaactcattgcatgatcagcttcacttaagctttcagaaaggttctctaaaagataatagcaacacatacaacaggagtggagaccaaacataatttacagggtcattcacatgtacaagtgcaatagacatgctttctccttttctcgcctctagaagtaggaatattgattcaaaagaatggtatgctaatagttcacaatcctactctcccaagttactctaggaatgttgactttgaagatcatctgatttccaaacaacatcatttaaggtgttggagagattcttgcaaaacttacacattaaaattacgtgattcagtacaagacatttaatcaaaggctaaaaattaaacgataaattataaataagtgaaacccaatttactaagcttggagaagaataggctaggacgaaatcttatcagattaatgactcaaattttccaatgaaagcccatgaacataaggtcttaattcacatgatcgccacgtaaaatatctacctcgtggaattccaggttgcaccctctcttcatttggttgataataatgcacaataacagttagattgaagattgaaaaagtttttacacaaagcagattgcaatatagcatttttttatattgcctcattagcaacattgggatttccttttctccttgtttttaccttttccagaaactattcaatcatcaactaaaaagttcaacacgcagcaaatatctatttcaatttgctataaattatgcctagaaggctagaacctatttttttcaagggaaatttatgcaaatagttgttggacaaggggagcagaccttgtaaatttttctgcacatggaatacaacagttaatctgcatgagaagctgagagagtaaaaaaaaatctgaaggctcataaaaatctgaatttatgcaccatacagaggatatatataatactattatgaactgtaagtctgcagtatataagaacatttgtaagaggtggcacggcgtattcgaatactcaacgactctgcagcgtctgcccagctttacccacacgatacccacagctggccgggctgaaaagtaacaaggtgtaatattgctccatatatctctcccttctgcctagtaagttaaaggatgctcgggatgttgctcggagtgatccggtccaaggtgtgtaccaacctacctctgcatccacttaccattgttcgttattcgatgggcagcccagaacttcatggacccatagggtagttctgaactctcagggcccatcgagcccacatatataaatcatataaacatgaaccatttcactttgcttcacacacttgaaagctaatggccagtacaccgaaaggccttcagaagtttaatcaattggagcaatatacgaccaggttctacaaatcgatcgtgtggatgggcgaaactatgtcattcttattgacacaagggggttgattattatatcaattttaaataagaaataaccatagatatatccatatatccatcacaaccataaaaaggtccataaaaccaaacacatgaactctatcatgtgtaccatccgctcacaagcggtgttaacaattcttagcatatagctataaatagttccataagcatgttttcatatgcaatgataatatccatactaaatcgatagcatgctaaataattaatagtttgtttaagtgtttctcaaattttatcctaaatttgttagactctaaggctcattaaggtgtttataataacaacagaaaatataatgcaataatagtaatataattaatttaaaaggattcatgcagtctatcgtactccaaaggacaagtacgctaccaaaataactctctaactactgggattagattgttcaagggagggtgcatatcttgcaaccttcgggcttgatgtagtcgtacaaaccgtctcctcctatcgcggagatttcactcgctccgactaccggaccagcgtcagcgttttctatttacgcaacaatcatcaccacaataaataacagaaaaacaaagataaccaaaagaaaatagtatcacaaagtgcaacaatgggtgaaaaggatttaaagaaataatttttggaatttcggtgaacggcgaaccctagggctaaaattagggtcgcgacaacgggtgcttgaattgcaacgaaactgacacgcatggattcggaataattctaggagtttagaataggtctcagattttgattttgaggtcaaacggatggtcaacttgataggaagataaaaaggatttttctgattaatttttcaacagaaaaatcggatttttcttttcttctctcgctctgcacaggaacggctgacaactccatggcgccagtggtggagatggccggttttgggcaaaggggcgccggttttgtgatctacagggtgcagcgactctgttcccgtggttggcggcggtgcaggcggcggcggcctggagcaggaggcggcagcggccatggtcgcggtggttccagcgaacttcggtgagggtgatggctatggtgagcatcagtagagcaaggggagcgcggtggtggcggcagctcggcctggggcggcctggagctgtggccgaacagagcggcgacaccgggaggcggcgccggcggcactccggcgtcggattagatgggggaagagaggggaaagggagtactcggcatagagaatccgtttttaccttcaatttcagaggatttgcgatgtatgcgacaaattttggagctcaatcaatggcgccgatattagggtttcggggaattttccagcgggggtaggggcggatttgaggaggtgaaagaggtttaaattgcgcttcttttgcctccggtattgagtcttctagttaaggaacgaaggagatacggaggcgggaagctggaggtgtcacggcggcattcgttcgtcgttcgtcctcgtgcgagcgtgtgcgggcgtgtggcgcgcgcggggcggcacgagctcggcgcgagcgtgcgcgggattggtgcaaggcaacacggcgctggctcggtccggaaatgcgggctgcaggaat

SEQ ID NO: 7234 - DNA, 44776 bp, Oryza sativa
ttttggaataagacgaatggtcaaatatatgggaaaaagtcaacggcgtcatctattaaaaaacggagggagtaaggtgtaactgaaagcctggttgagcactctttgcttgtgaggtagtctttacctaagctatgtgccaccttgttcgtagaccgatagacccgaacaactttaacttcctggaaagcactgcacttgtttatgatcacctggataattgacccatacaccgacttgttataattgtgatccctcatcatattagccacctctagacaatcgatcatgataattagtatagaaaactcaaagatatagtcgtattggctttgctagcttagagagcatgtacaatctgaaagaggctaagtttctaatattaacaatgcaagtagaaattgattcttaaaaacttatgagatatttagcccatcagagatagacacatctcatatcaagaaaacaataaacaatacttgttttcatgataagctaatgttcctctaaaagttaatatggtggtttctaagtgttggccgcattggtagcaaacgttataaacaagttattatattatcaatataatatagccaaaagagtactgaacagacatcaaatcatacatgttgttgagaatagaaataaaaagtacattccaaagcctccgatgccttactaattaaagaactgtataatatataaccaagttgagatattaacaagtggcattttctgaaggccaaacttttgcactgttataataacaaacgattcttaatttcattgaaatacatactaaaagaaatcgaggccatgtatatatataaatgctcacaaacgggattcccttcattcacggttcatgaacttctctctgacccttttgaagcatctaccaaaggtttactacgaacgatacgaagtacgtacagtagtttaccaagggatttgctttaattctcttctagcaggatcacttgtacacaggatcactcctagcagtgcagtggttggcctgtagacgtgcgcatctcaaactagttttcttccagcaacaacccgcgatgttgttgggaatagtccaacattgctaatctagggggagttgaaccaacttaaaagtaaaagtgggggaagcccttcacctcttgagctagcttttggggtgtagcgaggctttctaccagttggttttgggccaacaaaagatagtgttgttgtggagaaattgtttagtgcagttcccgacaagtttcttcacattgttggcaccatcgagcaatggggtgatgtgtcgaagatgtccgtggcggaggcaatcgggcgcttgagggcgttcgaggaatccttgaagggtcggcgccgcgaaccggaggttgagtatttgttgctcacacgtgcacaatgggagaatctctatatcaaggagaagaaaggagaagacggcagcgactccaacagtagcgagcgcaaggttgataggaagaaggtaaagtgctacaactatggcatacatggtcattatgctaacgaatgtcgcaaaccgaagaaagaagaagcgctgctcgctaccgcggacgacgagccaacgctcctgtgaagattgtttactaggtattccaaaataaagacaacaagattagtgctaacagatgtagcaccagaaatcctgacacctcccaatccaaagcgattagttttatagtgttgcatagataaacggtgtatataattcactaataattcagtatgcctcaacaacatgtagatgaagttcttccaactgctgtgccatgtatatatataacatgtagatgaaggcacatgctagtgtttaagaactagtatatatatgcatgatgctctgtatgctactattatacaaatttgcacatgcctgcagattgctggttttttatattttagcccttttcaaaaacttattcggtagatagacccatataaaagcttattactggaatatacccttttctggatgctaaggttcatggcgcctacgtccaatgtctcggtgccaataccctcgacactgtagcagccaatatgtggaggagtcgacaaccaaggaccaatttgtaaaagtaattctaaaaagggttgaaatgtaaatatcttttcatacaaataggtcctcaacacatgctggtgtcaagggcctatttgatagaaagcatttacgtttgacctttttaagaaattaatttacaattatgttatctacgccagtctctttaataatgaccccgttacaccagtgcctaagctataaacatgggcaagggctgtcaacgttagtatcgttggctctgagacattgaacctttgtgccaataacttggctctgagaaaaaaaaaggttcattcttataatatatttgtaaataaatgtttaaaactaactaaaatgtaaaaatttcagctgcagattgcatgtctgtttgtagacttaaggttgtaaaacactgaacttttggtaaacagaatacgcacatgagtctagacgaccgtctccttttttgctcatcaccaatggttgactgattttgaaatggaaaattggtttagatgtcagaaaaacacaatgtactacgctgtacaagctataaaaaacactatatacaatgttaataatagtattctctgcaccataaaccactataataaaacaaattttacagacacccccaattcgatcacggatgagcgtaaagaacatccatttgtaaaaaatatatttggatggtgtttagtacagatccactaacgcaaatcaattttcgcacgcggatctcttaataagcttaccctcctctccttatcccctcaactcctccgcttcacatcctcatcctctttcccatttactccctctccctctctcttccagtctcatttattcactttcctctctcttactctctcatgcgctcctcatcccctttacttctctctcacttgtaggccggtagaggtgcatgaggaggttggtgcactgcggcgacggttagtctagcggcgctcgaggaggctagcagaggaggctcgcgttgacgctggtaacagcatcacctcctcaggagctgccagccacctcgcagatccggcgatgctggccttctccctcgcagacccgatggcaacggccttcttccatgcaaaccagcacagccagccttctccctcgcagatctggtggcggcggcctcaggagcggtggatccaccgccactggcctctcttgtagatctggctatgacaatgatgggtggccctggccctaggaggggcggattcacatgcgttagcgtcaagtgtggcagtggcgttgacgacgatggcggcaagcttagcagtggtggatctagtggccacagccccgggaaaggcggattcgccgttgttggccttgggtgcggccagtggcggagccacgttgagtttgggtggtgcacaggaaccccctaaacttacaatgtctcacttaaaaacactagaatatgcagctttgcatcgaaatttttatagattttcaatggttagtgcaccacccttactttgatgttagctctgcccgtgggagtggcggggtctcaacaaagatgatagtggtagcggactgcatagacgatggtggcggcaagggcggatttgagctagggttttgcctatttgaatttttatttttgttgtgattttcgttcttgcaaacggatggcataactgaccttatgtgaaaattaccatctgcatggggttttgctactcgtatgggaaaatgttgatttttacatttttatagataaactcggggggcaagcgcttgcattgcccgcttgcaaaaatccgttgtagccttttgcagaaatgtaggctgtagcatcatttggtttaggcaaagaaagtacaaggaatagaactctataacttttcccaaggatcctccatctgaatttctttccctgcttgggtaccccaggaggcgcaggcagccctttcaaaaaaatcaaagaggccaagccggctcggcaatcatgtggacagtgttgcagttatggtctaccgtgatcggccataacgtcgatagaatttgcaaaactaaacttgaaccagttcctggcacctccgattcccaaaactcatcatcaactgatggctggtaggagatgaaagttgagagctgaaccaatagaagttggagccttccactgtttctatccaagataaccgactcagagttggaacaaacagaggttgagcaagtatttatataggcatccatgtacgtatatagctttgacatgtctgtataagttgatatcttctgcaacaatttgggatacatatagtacggtacggtacagcaacatcagtatatattaatttatatgcaaacataaataagagttgcgtacatcaatttatatgcaaacatagatataagttgcgtattactgcttattgggcatagtgtaggtctggcatgaagtgaattaagtgatatatggtgaggtacgaagtaaattaagtggcactttattcagggtgttagaatatacaccaacagaccaaatttggtttgctgcagaccgggatacagctaccttgtttgaggcttagagcctatttatgaggcccaattcaagaggagaacttgtgggccaatggccttaattttcatgaaattgatttaactagcaattttggagaataaccccaaaaaagattgggctccctagagattgaaaaactattcgcagtttctgctattgataatgcattaatatttctttcttgatgtgtttatagcctttaattcgtcaaaactccagatcccttcttttcaggacacggtgaccattgtgaagctcgtagcgctaagaaatcatcttgatactagcacatatcagctcaccacagctagcttcgcccatttcgagctgtgtccacttcgatacagggacatggttatttgaatctaccctacgggatcatctctagatgatcaccctaataaggtattactactctttgatcagtgcttgctgttaacctgtaaacatgcccatctcgaactaacgagtgctacaggagagcaagaaatcgtatcactacaactcctgagtcctcccaagccaaaaccgtaaggctatggatatatgcagtgcaggacacaccggcctaaaaaactatatatagaagttcatctatcagttgtgtctcctagcatgaatggacaaaacagcagctctgattgctattttatgctatagcaacgacatttgttatgatcctccatgggatggtatatgtaaacaatagtgtgtagtagtcatgccagcttgtaatttcctcctcctgtccacaaataccaaataatattgtttgtcttttattgagatatatagtgaggatatatgaccgtaattttaaatattaaacgaggagtggttagggagtgcaagcgtggtcgttgaaattaagattacgtaaaactaaattacagatggttgctgggagatctatactctcttttatttaagtatacgacgttggttaaaaatggagggagtagtactttggaagtaaccactgtagttttggtacagcattgttcaagttgatttccgttatgatatttattttatatagtcggaccatataaaaaaatatcttcataattatgctcaaaatattaaagaaagttttctacgaattttaaaattttcgccattctaaaagaaggaaggcaaagaaacttttccacatacagacttctaaaaaaccgcatacacttttacaatgaactaggaagatagcccgcacatttgcgggggcatgcgcattagtatgtttcaaaaatagttctaacaaaacaaattaaaattaaagtaacttattttcaattttgaattgagtgttctttatatctctctttcgtgaagaaatctcaacaaactttcattggtttttttaccatcctgcaagccctctctttaattacttctcatatatgtgcaattagttatgcatgtgaatcaatatagatagaaacaatattttaaaaaatatttattgtagtacttataattattgggttcacctatttgaaggaaaacgaatggtttgtttttttatcataatttttaggatttttaatttatttgagcgctatatagcatctaggagtgtttgtagcacaccacgcatacgacaggttgagagtgtttgtagggagttatttgatttttactatataatagatagttaatatagcattgcttattgtttatgtactgagttgctagctagaaaatttggatataaaagtgagccggtgagataataggagataaaatgatgggtccaccatattaagtgaaaatcaatgatatgatgttttccttttttttctcagaattttttagatttctctaatttattagagggccacgtgacggcttagtagtgtttgtaggagttacgtggcggtttaatagcgtttctagaaagtttagagtaattttatatataatatggtttttttggctttatcctttaggagttacgtacgttacgttcgtacaaaggtaacatgtaatttttttttgttttttaggtagtacatacgaacattgctctccatccatatgcatagcataggaaggatctttttggtttttttttctgtttacgaatagtcattgtaccttcctctccatccatattagaaggaatgattttaatagatttaatctaatagcctgaaatatcaggatcactaatttaagtaaaaatcaagagctagatgttttgctttttctcagaatttgtaggattttctctaatttattagagtgccacgtagcggcttgagagcgtttttaggaagctaagtggctgcttgagagcttttgtaggatgattaatggacttttaatatataatatatttttttagagaaccgcttcactaattcctagattagaacaagtttaatatgtaaattacatgaaaaactgcttgtacgtagattaattttgtataatccctatcgagaagatcgagatttttactcgcgaaggattgattgcctttgaaatggaaaaaacatccggtttggacgatacacaatgttttactatgtgctgccacatggtaggattcccagcaccataaacagcttaattagtagtaaagcctggagcagcatttgctctaggcaagtatgtaaaccatgaatggaactccatcctttccaagaggccaaagcggcttaactggcaatcatgtggacactgttgctcttatgatctaccgcgatcgcgctccacctagatagagtttgcgaaactaaactcgcagctgttcctggtgcctcccattcctagaactcgtcatcaagtgaaggcttgtattggagatgaattaaatttgagagctgacccaatagtacgtagttggagtcttccactgtttctctccacatatatggcctagacttcgaacaaacagaggtttttgtgctagtatttatacagagctttgctttctactgtccatgtcaaaacaagttcactattctacacttatgctgtatatagcacgtcacgtgtctgcacaagttgatcttttctgcaacaagatagctggtacggcacagtacaacaacataagtacattagtttatatgcaaaggtaaatagatgttgtgcattgcttattggacttagtgtatgacaggcacggagtaaattaagtggtatatgttcaggcacaaagtaaaattaagtggtacattattctggtgttcgatagtgtcaaatagacacaatacaatttccgatgcttcccacccaaaacatgacttgctgaggtgagaatatataatgaagggcttctggacatatagactatgagcgtgatccggccatccattgctccctaagttaattatatggtctgagctggtatagaagcacatgcaagagcatgtactgcaggtgaaaactactgtaagaaacatcaaattgcaacctaattaactatgctatcacctgcagcacaagccaaaataaacgactgtacatgatttcagagtgtatgttcgagttcatcacgtgtaaaaatgaatgtcaagacatcatgaaagtaagattgagatttttacgaaggcaacgaaactgtgtgaaggcacctcacacaggttgattatttgtcaacgagatggtagagaatttgttgcgcgtgtcgaccttaaggtgacatgagatggcgtagaatttctcaatgagcttggctggctttcggtcagggaaaaaagcaggaaattcatcaattatatccaagattatgtgaagggttttacaaggatttgcaatttccccgatcaagtgtcggggagttcaccccatagggtgtcggaggtggggacatggttatagacccacgtggttaggagatatggtaaccacttaaaatatactccaattacaagtatcactcggtggaggcaattacacatcaatatataaactaatcctagtccgcagccccacagcaatatgtcgacgcacacacgatatgacagccggtgctcatcgatgctgcatgtactgctcctccttgtcggcgtatccttgtcagccccaatagccacgacgctgcatgttgcattgccccactagctatgccgatgaagctggaatcccttaccatagttggcctcggagaacttgctcgggtgacggagtccaagaagcgcaagagctggagactggttcagccccgttcttcacacaggggcctggaccgggttaacacgcaagatagcaggagtgagcagtttcgttcctgtccgcactgcacccttgcaaaccctagattttacaaacattgtttttttcttggtgtatgtggagctaggacaaatactgcacaacaagcgtactagtattcctaaagcttcccactcctgaatggcggtgagaaatctaaggtgactacagtgcatgatatggcctcttgtcttgggagcttcacattttctttttgcgtgctgcagcaaaaactgaaacaggactgcctttttatagtgatcatgtatgcatgaggtatataattatactgtaagtaaagcagggctgccttttttttatagttatgtatatctcatctttttatttataactaattattataagtaaaacatcttattaatgacaaaaaataatttaatagaaaataatttgcatgtaaaacttttatatgtgtgtcctttagtaatttttttaaaaaaatatgggaaaacaaactacaacgatgaaaacctgaaatcaactccaaaattatgtttcaaaactcgaattatcacttatccttataagctgaaggctaagtgaagaaaacctgaaatcaactctaaaaattatgttttaaaactcgaattttcagttatccttataagctgaaggttacacgttgcgagccgcatatgaaaactacactgtacagatttcactgttgcaactttaagctacgacacaagataaaataaaaccattgtggctacacatatgcaaggacttgccgttagtaaagtcttgaagggaaaacccttatgtgggagctgatgatctttggtatgaatggcaacgaaaactgatgcccacaatgttcacaatcatatgctccgtatgccggaatgtttgttagttgaaatacaaatttgttcattgttataaggagatgtgtcacattcatcatacgagcaatcctataaaataaatcatttccataactaatatttagcatatattcctccaaaatacagaccaggcataatcattagcctttccaaaacttgttttctcgcttttcactagaagtctagaaacttttatacaccaaaatgtctacgaatagaattctgtgcaataaatttggacttgtaaacaaaccttcaatgctccacacatgccatgcgtacaagaaaaacgggtgatgcaagtctttcagttatcaaaaaaccaaactatccaggatgcaacagttgatacattgttataatgaatcataatgaacggactaactcacaggcccttggagagtagaacacagctcgttctacagaaaactatcctacatacaagaatcgtaaagaagcaaacatcataagttgtgattcacagtcacagcatgcacagacgaacagattagctaagagttggcttgcttttttttttcagggtaagagttagcttgctaactcagggcctgtttagatccatttgaaatggcaaatggcaaatggcaaaagttttggtggcaaaagttttggtattgaaaaagtactagttggtgtttagatgcatcctaaacttttgccattctagcactaaagtgagagagagaaagagagagggagtggtcccaaagcactttttggcacaatttgctactatggactagcaaatgtcaaatgccaaattgccaaattttgctactagtgtttagatccaaaatggcaaaaagtgcttcagaatgacaaaacttttgccattttggaggatctaaacagggcctcagactacattgtaaacaatcgtaacaactaacgctaccctaatcgcccatgttatagtctccaccagctaaaccagcaaaatcgcttgtgtcccatagcggaataaactattcggtatctctaagattcccaatgtctcccaatcctgaacagaatctagtgcaattatctataagtatcacgaagtatttctttccccattcattttgcacatatcgaaatgaataagttctagcgttgccaaatttcttgcctcaaatgtgttgtgagccttgcgacattgtttcgtttgaacacaagcatgacacttaaaacctttgatgaaagtgaatttcgacataaaacttatgtcagctaagcgcatcgtacaaccaaaattcaccactctctcatcccaaagacccgaaatggcatggctatcctcctgtcttaatttcagccccgaggtgttgcggtttggctaaacctataacaacattttgaaactaaactcattgcagttcctagtgcctcaaattcccgaaattcttgaaattacatatagcgtaatcaacgatagttgaggtcatattttatctccatatgctgatcgactcagagaaaccaaaatgtaggggtaattctactacaaagatttgtatttatagcagtttgctatactcgggagtagtttcgacatatctcaagttcagttatagctctctactacataaatggggtcttttgtctggccactccccctctcattttccatacgtgaaaacctctcccaacttataaaaaccgtccaactaaaaaaacaatttcccaaaaaaaaaatctacgactgtatagagtaaaccaaataacctacttcgcccaaatctttcgcatccacgaaactacagaattaaaaaaaaagaaaaaaataaatccttcccgtctataaaaatactgttgcaatacacgggtcaataactatttaaaaataaaaatataagttatttagtgctaattgggattaaacggtaaggtaacaaaatcaaacccttgtaccacattactttacactgggaagcaacacctcggaatccatttggggagccaaatctcccacgcaacacttctataaaaacgatttcgcaggtcgtgaaagatctattggagttcttgaaaagctcttaaatgaaatgaaagtgcactgaggaccatggatatggcccataggatgatgaacaggcgtttcctgcaattacataaacatgcaatggaaattagaacaaccggacaatccggtaccactgcagacagtccaacaacacacagaagcggacaacccggcagctactggacaatccgatcaacacagagaaaaacatgaactcgcctagtggaaatataggctcgtactgtccacctcggtgctggacagtccgacaacactaagtgtttgacactctaacaatgataggacaatccgaccctgcatagaaaaaataaaacctatagatagagtactttgcacactacttatatactagagctagaaggtgatcaacaagatataagcatgtacaaatagatcaccaagttactcaatatgacagcatcaatgcaaagtacaaaaagcaagagaggaggcactgatttagagcgctaaatatgaaatttgtagttaatgacgtttttatttgatgtcatttagagcaccaaatatgtatgtagagatgaagtcaaaagaatagcatgcgtgccaaagtaatgaagtatttcatagataagatgccaagaagaccacgcatggagtaacaatattagggtcccaatcctatataccgcttgcatacatatttcgcatgacttgtgattatcagaaacaaattaacactggaattcattttgacaagtatttccttaagagagatgtctgtgaaaatgtgattgtcacatgcggttccttctaaacgcataagaaaattgttgattaatttttacaggcctaggtcacaggtggttcactaaagacgtctataaattggtaatcatcagtctacaaaattatagtaatgtattaaaaaaccattgctgctatcatagtaatttgtcatatgttctgtgcatgacaaggttgcctctgttgtttgagtgtatcgccctcaactattttacacaggctgttgtatatatgatcaacaaaatgaagtaaatacacttttcagaccgagtccagtaacattagtatatagatgcctcagtacgcgttgggataattcaaagccagagatggttggtggttctcccacatatataacattgtggtatttgaaatgggaatttttgcatgtcaaatgaaaatatataaggaagagtattcatatataaccgttaattacaggtcctttgcgtcacaaatttcagaaaaaaaaatgagaatatatagttgaaggtggcaaattaatactcaagtgaatataaaaaaagctttaaaattttaacacatacctacaaaataaaaaaatggaaataaaaataaggcaaaagtaagaattacgattccaatcaagtttaatacatgccttgatgttagtttatggtcatgattagaagctgatagcctcagctggctagaataactagtttcatcatgctcatgtctcttttagcagatcatcacctttcttcatattcttacatagggatctcgggctcccactcctgcctcatagagatgatactgatctagatggggccgtcgatatgccctatctcattctaggtggcagattttgaagagtgctactaagttcaccccaaatctgtactatgcatctctagagctcgcaataatcctctgctatcttacatttctgcttcctgcgtagcgagcagatgttcctgatgcctatcaaacctatgataaataataaaaccttatatatatatatatatatatatacacacacagacacacacatattatgtacagcagagctaccattttctattcaataactcagacaagtctgaccaaatggtggcaagggtggcatattcaagttttctgggacagcagagctaccgttttctattgaattggaagaaaaaatattggtactgtaactgttgaagtatagtctgaatattttaatttgttcaacctagctagacagaacgctggaactcacccctgcagatcgatgtgttggactggtggtatatatactggtataaggctttgatatgctagacatgtgtcagatgttggtattgggtactgcaaccgactacaactatcggtatatgcaccaatgtagtcacactcacacatattcattgtcatgctatttagtgttgtatactccctctttccacaaatataacggattttcatttcttttaagagcttaaggctagaaaaaacatgatgtccctgatgaatgatatataattgaggatagggagatatatatgatttgatgaaaactaaagttatatattcacggtatactactcaaaagggcgtacgatctatctagagtcaaagacaataaaaggttacatttatcatttagcactaggtgaaaccccgcacattgctgcgggagtttagcatgataacaataagtaaaaataatatgtaatacagctagacaacataagattatgtaaagttaacgtggtttatgataatttaaatttaaatagtatatagaatgatgattcaaatgtaaaagtaaggtgatatgactttatgaaagaagaaaagtatcgagatagtttggaccgtagattaatcatctaaaggttaaaaataattgaggtgatatggattaattagagaagaaaaggagagagataatttggaccatagattaatcatttaagcactaaaatattgatgtgatatgtcttaacgagagaagtgagaaatagcattaactagctaagactactaagtgaggatgaactaggtacatagcatattataaaaataatgaagatatatattgaaatattttgtgaattatgtgggatgatgatttaacatgcttgcattttaaaagctctaaaatttaataaattataaaattatagataatatagcatgtttacatgatgtttaaatttaatggttgttagtggatgatgatggtgcatcttgttaatacatgatgatgggacatcttgttagtacatgatgatttggcatgtttgcatgttaagccttagtaacataggatttgacacagacaactgcggattgctaaagaaatttgtttatcataattaattctctcttgctataaagttatagcccactaattcctaaagcttaacaagcaatggtgttccatcattatcatctaacaattattacatttaagcatcatgcaagcatgctatattatatataatttaataatttattaaattttagagatttaaaatgtaagcatgttaaatcatcccaccattcacataatatttcaatgtatctctctatcaatttttataatatcatatatacgtttatagttcatcttcatttagttcaatttttttcttttttctcattaagttatatcacatcaattgtttttagttcttagatgattaatgtatggtgcaaattatctctcttatattggaacagtcaagccatccaaacgtccgttgcatttctctttatgtagtatgtgactctaaggtgctagcatgtaaaaaccatctacccatgaataaaggcatgtacctggtcctgcaaagctagtgtttggaagcttaaatgcctacactaatgtgcttaaccatataattaaataattaattggaggtcctaacaggaaatgcatcattgttggatagtgcttaacctggtcatacacgcaattttgttagcttcgtaaaaatgttactcttttcgtttcattcgtttcatattataaggctaagacacttttatcaatgaatagaagacatatcagcaaatccactccgttgtcgagtctaggttatctgtaagtggtgaaatgatgtatgctattttagctgaaggtagaaaagtttagagaggttcaaatgatggacatctccagaataatttaattatgaaagtaaaaaacctagataagatgaatgtaccttaatttgttactcgaccgtgggcatgcaccagccccaaatcatatacagtagctatttcagcttgtcctggtggtagcttagggttagtttgagaagagggggattgagaagatacgcaaaacgaggtgaaccattagcgcatgattaattgagtattaactattttaaattttaaaaatagattaatatgattttttaaagcaatttttttatagaaaatttttgtaaaaaatacaccgtttagtagtttgggaagcgtgcacgtggaatacgatgtccttttctcacccaacctcccagaactcatcacaacgaacgcagccttaattaattaattaggatactatttcaagtttctgacaatagtcacgttgtcacatgcagtatatgctcttgcatttgctttcttatgcacgctatgtgtctaaacccactcataccatatcattcacagagcaatggccagaagctcggcactattctcaccacagccgtcgcgtttagggttggaaagcattgggaattttattttgtccatttctgaagattggactcgaattctaagctaattttgatcacaacccgaaccacatagtatgggggagaaattattttttctaccttcggtgcggtgaacttcggagctaatttggaaaacaagagataaatgcaaaaagttttctgctcctgaagtagcttcaacgtacgctcttcttccaaagaaccaaagacagaatgttgacctacatattagcagaagcatcttctataatccatattgtaatacttggaatcttaagacaagccaaaaaaaaaatttgtgtcaggggcttacggccatttttattttattttatttgtctatcctcatgctaatacagaaatcacatcgacaaataatatatcggttcaaattgaacatcacttatataaatattttttctgacatctcttctctcttataattaattaactaaccacttagaacacggtaaagaaagaaaataataaatataattaacacacatatttttttctgacatctcttctctcttataattaattaacttaccacctagtacacggtgaagatagaaaataaatataacttactatcgaatcaactccacggcgcaaacaaagccaatcgttttcgccacgcgtttctcttctcataatgtagctgcagaggagatgcaaaacacgccaacatgaagaattttatatattaactagatgctattataaagactaaataaagcacgtaagatggctacttggtaagttgttttaatattctaatattgttctgccatccaatgagtcatagaatgttaaccgttactatcatttacgaccctgagagtattatccttacatgacagaaggtgtaaaaacatgacggatatttctcgcccgcctgcccgaccgtattaatctgggataaattcggatacccgagtccttacacggatattggatacaaatacggatattttctggcagatatgagatcgggtttggaaggatggtatccgacggatatagagtgtccggtaaattatacgggtattacccggtaaactacccgtacattacccagattgctgccaccaccactccatcatgtcaacaaccaaaggcagccagggagggggcaagcagtcaccgtctcatcgagggtgccgcacgccggcacgccgcgcgcgtgcacaaccactcgccactcacgagcgccgcccagcaccggccgtgacggtacgatgccgatggcgccgcacatatgctagccgctagtggctacgctgccgcgcacccgcgtccgccggccactgtctcgcacatcgccgcgtggatgcgcgacggccgtcgtaccgccgccgaccaccgtcgtactactttgatactgctgtaatagcactgttacttatggtgatgtacagtagtagttttactactgatatgcagctatggtgaacaacagtctacagcattgagtctctaagagcccactactagctccaattcatctatagccgatctaatagctaatttatataatagttgcttactatactattaatatatactcccacatatcatacacacgttgtgtcttagagtccgtgcttgaccgttgctcttctctctcatattttatctcattaaaatatatttatagctggctaatagtcttctattgtacgtgctcaaatatattcatattatacatatatggaatggttgaacggctattatctatatgatatatatggtcgttgctttgatttgatgtccgaataaatattcgcaatcgatagagttcgtatccgtattggtgcgtattcgttccgtatttattcccgagattattcgggtctgtatttgtacccgataatattcatgtctgatccgatcccgattataaaatatgggttaggaatgggaaggatgagaaccaaccgaaccagacccgttttcacccttgcatgacagcaacacctcgtggatgatccgatcaaggttggtgtccccgggcccacttggcatcgttactcgtacggccttctccttccactctttgagcctcgccagcagcgcgaggaggtggccgaggcagttcgtcatggtagactggcacagcgcggggatgtcctgcgtggcgtcctcgtcctcggcaccgggcgtcgccaacgggaaaattaaacttgtacaagttgcaacaaaaagagcaaattaaactgaaaatagttatcgtatattcgcagctatatttgttatttttgttacaacatgtagaagttgaatttaaacttacatgtttgtggagtgatatatttcatattaatctatgttgctaattttttttaaaatattttgatgaatatttaggtgacatgcacgaaacgaggggatatcccctcaagggatgaaatcaccttcccgctttaatggtgctgttagctagaatctgttgctgctgctgttgctggaatgatattgctactgctgaagattggtgctgttgcttctggaaattctgtggcatctggaaattatgttgctgctccaggaatttgtgctgctgcttctgaagctcatataatgcaagaatttgtgctgatgctgatgctggaacgatggaatgatgctgctgttgctgctattttttttttgtgctgctgaaactgcagtgctgctgctgctaaactgcactgaaattgctgctaattaatgctgctgagatagcttctgttgctgtgctagctgctccttctgctgaaactgctgcttggactgctgaaaatataagcagtttcagctgaaaattagctgctgattctggaatatatgaaaattagctgctgcaggaggaattttgctgctgttgctggaatgtaactgctgctgctggaaaatgctctgttcttgctggaaatgctgctgctattcttgctggaatgttgctcctactgatgcataaactgctgctgataaaattgttgttgctggcttgctgctgtgagtgctgattgtgcttctgctgctgaaaattgatcacgaaaatgcagacatgtgtgttgattgtgctgtgtggtagcagctgtgtgtgctgctgctgtgtggcagggatggtataggagatcggcgacgagcagcagggcgcgcgccgagagatcggccagcggcgtaggggcagggagcacgcagtggagggatctgccggcggcgttggggaagtgaaaaaacggaaatatctgttggtaagagaagagcccacttttagttttggggattaaatcttgattatctgttggagggaggagttttttcacttcctattttcagtttaggaaacccaaaaatatttttttgggagattataggaggactgctggtgaggctccaagggagagcgagtggattagctggtttatttctaaacataatagatcaaacaaattaattagtgggtccacatgttaatagaaatcaacggttgagattttttcagaatatttaggatttttctaatttattaaagtgccatgtgatggcttatgaacgtttacataaatttctcgtggcagcttaagagcgtttataggaaatataatagatatttagtatataatatataaaatataaatagattagggattgacagctattggaaaactatccaatcaactacgtggcgcaaataaaaccaatcgtttgcgccatgcatctctttccataatgtagctgcagaggagatgcaaaacgcaagactacataaagcacataacatagctgcttgattagttggtggaatattataatactccctccgtttcaaaatgtttgacaccgttgacttttttagtacgtatttgaccattcgtcttattcaaaaaaatttaagtaattatttattcttttcatatcatttgattcattattaaatatattttcatgtacacatatagttttacatatttcataatttttttaataagacgaatggttaaatacgtgctaaaaagttaaggccgttaaacattttgaaatgaagggagtattgatctgcgatctaacaagtcatacaatgttaagcactctcaccattcacgctgagagttttatccttacatgacagcagcacctcgtggatgactcggtcaaggttggtgtcccagggcccacctagcagcgtcacttgtacagccttctgcttccactcttctgcacgctgccgcatctcacgccccttctccccttccatggcctccagtgtcatggccgccacctctcctcgccacgcctcgccgccgatctccatcgcgacgccccactctgtctgcttgtaccggcagttcgtctgctgctccgcgaagaacagccagctcagcatcagcacgccggaggcggggctctccagcgtcgagttccacccggagtgcgtcaggaacacacccacagcgtcgtgctcgaggaccttatcctgcgggcaccacgcccggaggacgccactgcccacgacgcatattttgcatgctgcttttcttcactattttgcatacatagatccaccacaaaaagaggggtttaaaatcataaaaaaatacatagcaagagtggaaaggcatgtatctaaccaatgtagaaaaatctcccgaagatttcgagttcaaaacctttccccctatattttgttgttttcggagagaaacttcggttgaaatgaacagttctcagggaggaagaagactataagaaaatgtttttgcaggcggaccatataaggtttcgcccgtgaaacaatctttgcaggcagaccatatattacgtccacctgcaaagatcctaattatcgcaggcagacgtattatacggttcgcctgcgaagatagttttcgtaggtggcaccttatgtggtctgcctgcaataagtttttttttaggtggacggctagcatgatcttggttgctattatcgtaggcggccctttttctccgagggcaatgcccgcttgggaaaaaaatccccacgttgggaagaacgatttttctagtagtgctggtggtagcttaactgattaggctgcaatttctagtttataatagtcacgttgtcacatgtagcatatgctcttgcaagtgctttcatatgctgtgcgtctgtaccctctcatatcgtatatgtcattcacagacatggccagaagccctgtactattgtcacctcacccatcgcgcttagggttgggaagcattggaaatattattgtgtccgtttcggaccatttgattcgaatccttagatcattttgatcataacccagaccagtcgaacttaggggtgagaagcatctggaatattattgtgtctgtttcggaccatttgattcgaatcctaagataatttttccagaccacatagtatgggggagaaattgttttttcatccttcggtatggtgaaattcgaagatttggcaaacacgttttcttctgtttatatacgctcttcttcaacaaaagcaaagacggaatgtggacctacatattagcataagcatcttttatagtcgcagcttaagacacaagccaaataaattgtgccaggggattacgaccatttagtttttattttatttgtctatcctcacgcaaataaagaaaccacttcgacaaataatatatcggttcaaattgaacatcactaagataaataatttttctgacatctcttctctattatgagtaattgatttaccacctagtcctcgttataaagataaaaaataaatataattatcaaatatgtttttaataatcaggggttgacagcaattagaaaactatccaatcaactccatggggcaaacaaaaccaaacgtattcaccatgcatttctcttccgataatgtagccgctgaggaaatgcaaaacagaaaaaggcatcccgtgaagacgggataagtggataaccttccattcttatccgttctctttctgtgtctctctctctccccgatcctcgcttcatcgtcatccaccgccccaccctccctctgtaacttctcttttcgttcctagcagggggttgggacatgattcccatggcaagccctttaacaagattggaattgtccagcgctcgctatgctaatgtcacgtcgccggtggtggccatggggctctcgtatgctagggtccgggaagagatgcaacgagttcaaggtgggaggtgagttgaggtgtgtcgcaaacgatgtctgcgaccatcacacttgtgtgggtgtcgaggatcagggcagcgacgctccgaatcaaggatggcaacgagaatgaatggcatccctccacctctaaggaagtagccatctcattttcgcgcttgctttttccttatttcctttctcctcatggctctcatcggtgtgaagacatggtactcacagtatttaatgtctgggtatcatgttcttgatacctaggtatcaagtaactggtacccagattatccggattagtaccatatgtaacaggcctgatacctcaggtatcaggtaccaggtacctagatcagtctaacacccataggtaccagacctagtactggtatcgggtacctaggtatcaagtacttggtatctagatcggtctgatacctgtaggtaccaggtacctagatcggtctgatacccataggtaccagacttagtacttgtaacatcctgaaaatttccaacaataaaaatcactaaaatttcaaactttttaaaacttttgcatcatgctggttgttatgattcctattgcttgccaaaccgtaaatgatcaccaagaaggtaaagaaaagaactacatttaagcaatagatatgatttatgagaatataatattgttaaccctacaaataattacgcacaagaaaataaagccagacaaacggaaggttaattactaatttaaattagggattaaatactaaatacgtgaaccatgtgttgcgtgctatgacgtctaaatacacatgaaatgatgaccatttataatggaactctatctataacatagtttcactaggagtaattaatgggatattactaaactctaatggtctatataaaggtaaaccaattcacatgaaataatggtcatgtaaacaaattaagctttatacataaataagaatgcgttggtgtttaactaaacaattagattaatagtgtaccgagtctaaatttgctatttgtagaataaatagattaaaaatatccgtgtaaaatataatgctacacaaagaaactcgaccaatatgccattgaattaataaggacacatcgttatattaattccgatattacccgaaagtcttcaaaaatatataagttcactttagggcgaataatctagattaatctaaaaaggactcatttgtgcgataaataaataaatatgggtaatattaatctagggtgaatacattggttagaataacacaaatattgagtaaacttcatttgtgtaaaaattaggatttatagaataaaatttatataggaaataggcttaaatagggttaaatagccggctagcactgttcattagcccctaggtgttcgacgtggtcccctagccctagcccctcctctgccacgctgcctcgcgccccacgcgccgcgcgccgctccgcctcccctctgctgcgccgctgccttgcgccccgcgccgccgcgcgccgtcttgtcgccgccgtcgccctgccgcgtcgccgcgtcatgtcgccgttgccgcgccgtctccatcccgccgcgcgccgacgccgtcgtcggtcgcatcctctcgagccccactcctccgcgcgtgccgtcgtcgtcgccgtcgcatcgacatcatcgcctcgccgcgcgctgtcgccatcgccgtcgcgtcggcttcactgccgcgtcgcgcgccgtctcgtcgcgcctcgcgccccgcgccgccaagccatgtgccgctgctgcgccgtcgtccgtcgcgtcgcaccacgccgagccccgtgtcgcgtcccatcgccgcttcgagctgcgcgccgccgctaccgcgccgcgtcgccgtcgcgtcgcctgtcgccccgcgcgccccgcgagccgtcgccatcgccgtcaccgcgcgccgcgcgccatcgtcgtcgcgctgccgcaccctcgagccccgcgacccgtcgctgccacgccgctcgcctgtcgccgtcggcctcgcgccccgagccgccgcgcgcccgtcccatcgcgccgagccccgtgccgccgtgcgcgtcgcgtcgccccgcctgtcacgccgctcgccgcctcgagccccacgcgccgcgccgtcgcgtcgccattagggccggccacccctcccccgcgccctataaaaccccccggccaccccccctttcaccccacaccatccccacccattcccctcttcctctcctccttcccctcttcgtcccctccaccgcgccgcgccgccgccttcgtgccgccgcgccgtgcgccgtcgtcgcgccgccctcgcgccgccgcaccgccgccttcgtgccgccgcgccgtgcgccgacgtcgtgccgccgtcgccatcgccggtaagccgccgtcccttccctcgttccgtcgccgtcgccgcccgggtggaaaggagccgagagagagagggaggaaggagccgggagtaggatgagagaaaagaaaagaaaagagagagaaagaaaggaagaggaaaagagaggccgacagagagagaaagagagaagaaaggaaaaagggagagaaagaaaaagaaaggaaaagggaaaagagaaaagaaaagaaaagaaagagagggagagaaaagagagaaaaagaaggaaaggagaaaatagaagggaaattgggggagaaattaggaggatttaggaaataaaaatggtcggggttaataatagattatttttggaaattcctcgagcgtaatggtatttcgatcgaaattccgagttaattataaatatatgtttcttgatcagattagattaaaattggtagtaatttagatataattaataaccaaacaattagatgaattcttatagattattatagattatttttggtaatctctataagtcatcggttcatggtagaaattcggattcaattactaggaatcttagccgtgtattatatttaatcgtttagtcatagactaaattaaattgtataatatttctaagatttcgtccgatatttagctcgtaatagaaatttctaacctgttatatggatataatgctcgggatgagtaaattaaaaacttatgacaacaaaatatttatacccgcaaaatagtttaaatcgaaattgggtttgccgtagttcgcagatagtaaagttaataaaaagtaatcgactttcgcattcgacttttactcggatttaagtgaaacttgaacctaaattcatctaaattcataagctttccaatgatatataattcactatttaacaaaatatatttataattataaattaattaatatcaaatgattagataatagttaacctaaatagtgtgccaatgaataaaaatggatattgtacagtagcataattatctttaacatgtattgtatagcttacagtaaaaagcaactactcaaatatatgatccaataataagatattgttgcttacacatatactatacatcccattatagtggtacggtatagtattaatttgcgtgttgcataaattaaattaagagggagagtatgacaaacatgtatattagataaatactagttataaatcttgacctcatataattataattatagttcaactgtaaattaggattattcattgtaaaattatgtgatgggataatctgtacccataatatgattaacctgaacaactctaacatacaaagcatggataattattaaccttttataatttattgtgacaagtaaaatatgttcataattaaagtaaagcttccatcaataaaataataatacaaatgattcactataactatttgattgatcctaaatccatctaacaacagaacctctagtaaataaccgtcctatgtagatagatgcatgcttagccataatccttccatagccacttgatagactaaaccactgattagccaaatatatatgtatcccataaatgctatgtaggttaactcctaaataggccacgatgacaatagaaagattaagaaactttagccttagcatgattgggatccattagcaaacacgaatagtacattttgttgcgcatatttgattgttgtttgaatattggtttttctcgcgtattatagaccttgtgtatcggttagtcgtgaggcaacgtctgcaacttccaggaggtgaaggttgatcaagattatatcaataataaggattatcctgagcaaggcaagtcatcactattctttgaacatgttgatcccaattgcgaaattattttgtttaccaataaaattgcatgcaatgatgaacatcctacttgtgattataccatgccttgattattgttcacctttaaatctttgtaaccatagatacgtacgagtccctagtcaactatgacacttgcttagaaatgctattttagattcatgcatactcatatttatcaaatgctatatgcttgggcaattacctttgggaaggtaattgagatgcggcatgtggagacatgagcgccacattgccatgatattgatgacatgatttgtgaaaggaaaataaagtaaaacaactgttttcgactggggcggctggaggacttgggtggtgtccggaaaaggctagtgccgtccctggtcaattaaggaccgagccatgaagttaagcatgaaacgaccctcgtacaaccgtacttctcgaatgggtatagacctagcggattagatagctgagcggaggcagtatccatgcatagtggtttcttgatgtgtgaggcaggggctctacggtggggcagccattggtagaaccgcgaggcgggtgtctacagtggtgtcgtcattggtaggactgccatgtgagaatctaaaacataactataacttaatgcatgtgtgagtcttcccttcccgggtgcgccagaactcctctcactgctagaaaccgtgtacgcctagagtgcatgaggatgaaaagttcatggagcgggtactgccaatgcgaggttatcgaaaagctttgccgtgacgcgtctcatgtgttgggacgaggctcatgtgttgggcagtcgcggagtgcgggtaaagtgtacatccactgcagtgtgagtaaaccaaatctattcgaatagccgtgctcgcggttattgagcaccgggacatgtattacacttggctagactctaaattcttaacttgtgggggatgggatattgcatgatgaattttatgctgatggagccacttcccgagaggagggaaggtggacatcctcagaaaaccatgacgattcaatggcgggaagctatccttgggatcacaatggatggtggacagaatcgtcgttgtttaaagtgaacactggtactaaaatttgatcagtctatgctaggttttaggcttgtgaaaagaattgtaaaattagctttatgcaaaagaacctgaagccattctttgaaataccctctatcatatgcattgttgttgtggtggcttgctgagtacggttggtactcacccttgctatttatatatcttttaggagagtgttgaagagaagcccttgtcggtacgcttgcgtatcccacaagatgatcggagtgcggtcttgttctaggtctcgttccccagtcgactgcctgtggcatgttaaccgggcccttatattattttgtcttccgctgttgttctctgatagttgttggcctacctgtccctaatgtaagtatttaactcttttagcctaaattcattcgtgatatgttgtgatccaactatgtatgtgtgtaccaactgctgatccagggattggtacggataaacacagaagatttccgatttccaaaatcgggggtctacagtactggtatcgagtacctaggtatcaagtacttggtatctagatcggtctgatacctgtaggtaccaggtacctagatcggtgtgatacccataggtaccagacttagtactggtatcgggtacctaggtatcaagtacttggtatctagatcggtctgatatccatatgtatcaggccttgtactaggtatcgggtacctgatacctagaccaatctagtactcaaattggccctggtgttagcatcataacaatcgaaacaggtgcgttgtgtctctagtgagaaaatgtgcactgacgtgtggtcccttgtgaggacacgaagagacgtgggctgacaaatgaaccctcacatggggtgaagttgataaaataataggagagagtagttagtccgaaaatacttgtatccggtcgaccggcgcggggggagccggatcgggcgctccccccgcgcactcctccccacgtgcgtacctggtccgcccacttcccctcctattttcccataaaaaatgtttcacctagtatacttataatgtttcactatttataggtctaatgttgcagtgaattaaaatattcttttgcaagaaaaaacccacatattttggaaactctctattaagaggatttggtttattttttgttccatcaaaaatgtttcacataatgtattcacaatatttcactatgtataaatttaatgttgtagtgaacaaaatattctattgcaacaaaaaaacccacatattttgaaaatcccctattaagagaatttggtttatttttttgttccaccgaaaaatgtttcacctagtgtgcacataatgtttcactatgtataaatcagatgttgcagtgaactgaaacattcttttgctatttgctgaaacattgtttttatataaggtgaaacaacgcccgatttaaacgagtgaaacattttcgatctacttagtgaaacaattccgatatacctagtgaaatatcgtgcaacatttaaaaaaaattcaataataagctaaattttttttcgtcggaatatatccatgtgtactcaatgcaaaacgcaagaagaattttatattcgaattagatgctcttattaagactaaataaaccacatgacatggctacttggttagtaggttgaatattataatattgatctgcgatctaacaagtcatacactctcaccattcaccctgctaattttatccttacacgacagcaacacgtcgtggatgactcggtcaaggttggtgtccccgggcccacctggcagcgtcactcgtacagccttctctttccactcttgtgcacgccgccgtatctcacgccccttcttcccctccatggcctcccgtatcatcgccgccacctcccctcgccgcgcgttaccgccgatctccatcccgatgccccactccgtcctcttgtaccggcagttcgtctgctgctccgcgaagaagggccagctcagcatcggcacgccggcggctaggctctccagtgtcgagttccacccggagtgcgtcaggaacacgcccacggcgtcgtgctcgaggaccttctcctgcgggcaccacgccgggaggacgccacggccctcgacggcggcgtggaactccggcggcagcgcggcggcgtcgccctctccccccttgacgaggtctgggcggacgacccacacgaaggcgtagccgctgtcggcgagcccccacgcgaactccagcagctgctcgctcgtcatcaccgcgatgctgccgtagctcacgtacacgacggagctgggccggtggccgtcgagccactcgaggaggccgtcctgctccttccagaggttggaacccacgccgtgcagcgggcttccggtggggacggcgcggcggacgtggaggtggagcgggccgacggcgtagaccggcggcgggaggacggcgcgcatggcgtccagcgccggccgctcgaggtcgtcgaaggtgttgaggatgacggcgtcggggagggacagccgctcggcctcgcgcatgatgaagttgagcatcacgtcgccgaggtccgtggtgcggatgaagctggggtagtcgcgcagctggacgccgtcgcacatgccgcgggcggcggcgccgtcgaccaccgtgtcgaggtacccgtcggtgagctgcgccgcgtcccggagcggcaccaggccacggtcgatgagctcgcggtagaggcgacaccccacgaagccgcaggcgctggccgtccacagcgcggcgcacggcacgccgatcaccctggcggcgtcgtacgcgaacgacatgaggccgtcggcgacgaggcaggtgaccggcggcgaccccgacgccggctcattgagcctcgacagcagcgcaaggaggtggccgaggcagttcgtcatggtggactggcacagcgcggggatgtcctgcgtggcgtcctcgtcctcgccagacatcgccggtagcccgtcggggatggcggcgaagacgaagcccggcacgccgtcgagcgcggcggcgccacgggaggcgaggaggcggcggtggttgaactcggtgttgacgaaggtgacgtggaagccccgggcgtggagcagcttggcgaggtgcagcgtcggcgtgatgtcaccctgcgacgggtacggcacgcacacggcgtgcggcggcttgtcgccggtggcgcccatcgccgatgccattctatgcccgttaattagtttgcagcagagaaagagagatcgctagctgttcgtctggtaatggggagattacattggagtctgttttatagtcaactgagacgtgttaaagttggggtgtggctaaggagagatggatcgcttggagcgatcaccccttgtccccctatacgctcatcccctttcttctccgcttcttctcttcctactgcaccataaattttaaaaaaaataaaaataaaattgaaaaaaattatgtatagaaatactatatgtaaaaaatatttgaattcaaattcaaatttaaaacgaatatgtaaacttttaacttataaacattgggtctataaattaatatttgaattcaaattaaaatttgaatcgggcatgtaaacttttgacttataaactttgggtctataaactttaggtttataaacattagtacagaaatactatattaaaaaatatttgaattcaaattcaaagttgaatcggatatataaacttgttgacttataaactttgggtctctaaactttatatgtgtaaacttgagctgcataaatctatctatctatcaatctatctattattatatatactaaaagtccattaaacttcctacaaacgttactaagccgccacatggcatttctataaatgtttctaggccgccaagtggcgctctaataaaagtccaagaaaaaataaaaatattccattttcatttaatctggtgaacctatattttttaaccgttagatctaactaaaaaaataccaaatagaattatatttagaaagcaccacgttctacgtcgatccatcccatacgtgtacgtgcatgtacgtgcatacttcgtacgtggccccttcccttcctttcttttttttctttttttttcactctcatgagataaaaaccaaattaataatttcagccaatagttgtaaaaatatatgttattccgagttgtattctatcacaagttcattaaacttcctacgaacacacttaagtcatcatgtgacaccctatatactctcctgaaccatcgcgtggcactctaataaattagaaaaatcttaaaaattatgagaaaaaagaaaaaaatatctgaccatccattataacttataaaccggtgaacctattatttctaaccattagatatatcttaattatctgtttccaataaaagaaatctcctctctctatatatgtactcctccctcagtggtatgtacgtgaatttcctattttatagctagcaaccccatataaaaacttaagtgaccataattgttagtaagttatataacaaaccacaacgatgcagagaaatcaaaatattgaataggttttcaacgtgcgtgctgcttgctttaatttggttatccaaataggctaacctattcttgctaggattatcaatgcaatgagcattaggtctacaaatgagggtgtgcatgcacgtgttttcatcctcctaagctctactagttttatcttttactggctaaacaacaagcaccctaaataatcagcaaatttgcgaacacatctaaatttagatccatggtgcctttaaaaaaattaatgattcaaccgtggtaaacttctacggaaaaaaataatttctagggcacgtcatcctaattaccatttaaatatatatatatttagatgttcattaaacttcatacaaacacacctatactaccacatgctacgcatataaacattactaaactgccacgtggtattatagtaaatcagtgaaccatatattttcaactattagatttatcttttttttttcttaaaaaaaccaatatccacatccctcggctctatcccaccagcacaactctcctctccccactggcccacccttcccaccaccccatgcacgtacgtatacatacatacactttttccgtctccaataattctttctctcatcttcctattttataaataataattttaattataaaaatattatgaagaaaacaaatctaaccatcaatttttaattaaattggcagacttataatttcatcaattttcattcaaatcagtcgagttataagtttaacaattagatttaaagacataaatatttcaaactgatgaacgcattaaatatacctcaataaaaacaaagtatccttgccaaataacaatgaaacattgaaaaacatgaaaacatatattatatattcttgaatcgttttacatagtaaagatcgattaaacgtgctctatagcactctcaagtcaccacgtatgatattttaaaaatttgaaattcaaagagaaaataaattatatatctatccatcggttttcacttaatttgatgtcccattatttttaactattagattgcttttctctttataaaaaaaactttaagccaccacatgtcatgtcttaaagatccttagaatgagaaaacaacaaatcataggttcgcacttagattgtttacaaagattttctttttaaaaaaacaatgtaccgtccacttcccctccctgtccaatcatatgcacataacactattgcattgtgaaccctttctaatatctgatttgagttctacgctattcgtttctctccagtctcctccctattttcagctacaaaactaaagagagaaacaaatattaaaaagagcataattttaagctacactgataattttattttatatatcatgtaatcgattttagatgatggtttcttttttacataaagtcgccacctattaccccataaatcctcctaggccttttaaaccgataagcccattatttccaaccattagttctatctcatcttaaaagacaagtgtgtattcataatacatcatcttccaaaataatatattgcacaaccatatttcttcatccaatattatttgcgctaggttgcatggagtctcacacactctctacatggaacgttcgcatatggattctttctcaaattaaacaataatataaacccatgcatttagtggagcctcatatcccacccaattcatccatcaataaacaatgacaacctatattcaattaaaaaatatcttacttttgattttacacataattttctatacatgttttctaacacaaaatatgtctacctacttagtagatgatgaagaatattataaatatttgcttgtagggattaattaaatatgatatgttataaagataactaatagtttggttagacaattataaaagcaatgctaatgaaaacaatttatggagaaatcatatattgtagatgttcaaacatagcgtacgacacatgcccgcgcgaatacgtggtctatcttcttagtttattaaaataggaaagtaatgcgatgccaaaaaaagaaaccacgtggaggagggggtttgatcgctccaggcgatcgatcgcctgttagccttttcattaaagttgtgcgcgtcaatatttttccctgtgcctgacaatttgagaggggaagtttagtgaagattaagaagatatacaaaacgagataaattattaacgtatgattaattttttaaaaatttaacactcgatcaatataaatttttaagcaactctgatataatttttttaaaaaacgcaccgtttagtagatcggaaaacgtgcgcgtgaaaaacgagcgattttttctatcaatcttctagggccaaacacattggaaacaaaaaaagccttaaaattcgagcttcattaatagcttgaaacaaaagttatctaaatggcactgtttgagctcaagtttgagccacaagagtgcaacacaacaaacgcccaaaacaccttacgctatcgaagaacaactcatagttacataacaaactcatactgcaactgggggataataacaaagaaattgatggccaagcagttgttgcatatgcagctctaatttctcatctggatttttccggtcacttcatgctccgcagtaattgcagcttgacaatgagcaactgaacaagtcattgaaagcatccacctcctccgtgtcaccttcagtatggccaacgcctctcactgccgacacagtaattttacactgagtagagccgcacccgttattggtacgtgggtgaaatagttagagaaaaaattactgtaaaacaatttggtaacatcatctaggataacatatattaatctatattcaaaagtccaacactaaattaagtgtgaaaaataatgtctgccctcattgtggcaagctcaaagtagaccacccatatatatcttattaaacagaacacagtagagaagacctccgcggttaacaagtgttgcaattggaaagaaaattacgaatacgtgatccaatcttttacaatatctgtctctatcattgaaaggacagtaccttacaaggacgttgtacaacattacaaagcatcatacttgtggacggaaatgcttaaatttatagataaacttaaaatatgcttcacatacttatatatattttttctggacggagagaatactgatgtacttccgtttgggtgagcataaaagaaattcttcatggcacggttcctaggactaaattgcagagcgtgatcgagcctgcatgtggctaaacgaacaaaagaaaaacaaactttaaaaatgagagagagagagagagatcaggaaggcaaaggaaagcgagttgggggagaggttgttttagtatctcaacaactatgcacgactacgtcactgatgtttaaagaactaggaaggtagcgcatcagcgcgggcatcttatttagtggtgtttgaaattttgttacgaatgtttatgtatatgattttttttaaaaaaatattttttctcttctaaatatgtgtatatcaataatttgtttgggattgttttgaaagttagtttcgatcactggacgtacagacgtgcaaagaggggatatgtttctgggcatttaatttatctatacatatgttggaccgatgggtacgtcaggtcttttgagggggtgtctgtgacatcctagttcgattagatatggcctatgttttatttaaaggatgtgatttgtgttgtgtgcacttcagtagtactatcttgctagttaagcaagagtgcaactaacttgtaaggcattgtccctctaaccatatcattttcgtgttgactattttacatgaagcgacaacgaaagtgtaagtggggtgatatctgtaagtgagtgccggttaaataggctgtgatgtgttgttctagagaacggattgttacaaattgtaaactaaaattacatgaatcatgtcatcttaaatttatgagaaaaaaatgtcgcaacagtggatatggttcatatgaaactatcatttatactatatatgtttcttttttgaaaaaaattagcatcttaatttaaacttttaagtaatactttttcttgtatactaaagatgcatttatagattttaggatatattaatttaagaaatttcctattaagaatatggtaatatggcttctttatctaattaaagacataatcacatacttctatttgcttgtactacctccatccataaattaaaggattcaaattttatacattttaatactactcatcccatcgaaccatccattattcattttttatccaataatactctaaccatcttctaactctgcacataccacatatttaatgagccttatttagagaggggaatcttagtatatttttacattctttcttaattcctataaaattgtaggattcattataggacagacatagtaattaaaaagagcttcattcatagatggatttacagatttatttgtacgtttgtagattgatttagctttacatatttatataggtaaatagacctcatatacatgttgagagatataattaagttagtagaagttgttagatgtctaatggtataaagtaatgtgcctaccatttttgttaaattctttttaggattttcttttattcagttgttaacttaattgtcgtaaggaagaaaaaagaggcgaaagctagtgggttcgtctcatccgtgaggagggaagtggatatgtgaattgtacatatggattttgacagcctgatcgatcggtaggttttatttttaagatatagatctaacattttaaaataaggtccaccggtttgggtaagattttttttctcaaaattttttatataaagatatattagagcgtcatgtggtgatttaggaacgtttatgggaagccacgtggtagcttgagagaatttgtaggatatctaacggatctttagtatataataatagataattcatgtcatattaattaacatatcactcagtaattaaataatttgtatgtgtagtgtccctgataatatccaagtgatgtcccgattttttttctgagttcacccctgaaaattaagggtatatacatccaagtgacgtattataatttttatatagaaatatatgtaccaagagattatttagctatctaattaatttttatactacacgtatttggtgttagccaaaaaaataggaaatatggaaggggagggttagagggggagagagggagtacgtacatacatgtgcacattttttttcgttttaaaacgtattaagtgaacttgtgattggagtgggggaacgtacagattttttttttggaagataagatttagtggtgaaaattaataatctaatgatttaaaatgttgggtccaccggtttataggaaagtgccacgtggcggtataggagcatttgtaggaataccatatggcggtttaggagcatttataggaaatttattagacttttagtatataatgataatgatgctcaaatttctaagaatttttttctaatttttaaatgtgataagttcgatgaatctttattgcgtagaatgatttaagatgacactaatattttaatgtttcgtggttgtttggttgttgccagtatgttcaaatgatgtatttaaatttttatagagcaaaatagtaatatagatgttgatttacttaattaattacaaataaaattactgtttaaataaattaaaaaccggattctgttttgatgcgatatgatcaaataatgtattttagtttttgtacatagtaaaatatgggtgatatggattttaaattattagttatttttctattgaaaaaattagttaaaaaaagagttgggagaaggagtaagacgtaagtacatactatatacgcacgtacggctggaggggtgggaggatagtttgtttgttttgatagatttaattagttttgtgttatctataacagatctaatggcataaataataagcccactgatttaagtgaaaatcaatggtgggttatttttagaaatttttgatattttttaatttattaaaataccacatgccacatggcggcttgagagcatttataggatgtccatgtggtagcttgagagtatttgtaggaagttttatgaactggtgagcaacaagcctgatgggagaaaaaaccaagcaaattggattggcatactctgtttattgcgttcttcacttgctcgcaactgttacaattatgcgttcggcagcagctgactcattctccacatgcatactttttgaactactaaacgatgaatttaaataaaaccagctgcccctcctctcccctttattggcaccagctgccagataaaataaaaaacaactttttttttctccccgacctcctctctgccacccaggctgcctcaccgccacaccgtcctcctgcagggcaccgccgcggccaaagctgaacctgctctctagccgactggcgcacaactccaccctggcctcgacccttctggtaaagctcgcctttttttcttttctgttgggcttttgtcactagttgtgcgacttgatttcttgttagagtgagcatgctgtttttttttttaaagtgtaccactcataggtaccggcatccatgttaccatgtcatcagtgttgtctaacgggcgcttgttttaaatttggcacctaaggatggtttctaaccggtaccaaagtcgatttctgtagtagtggtccgagccacagacatgctaaatagcgtccacgacttatcagctagtactttcattttctggtttctccaggaacgtacctgacctcatcaagatgatcacatatccacgagatccgaagacagaccccctcctatgttattactcttactgtttctggggttagaatgcatatgtgatcatctttagctagaacttcacgagaacaactgatgccgtatgtagggcgactgctcttggatcctcccagtccaaatccttatggtcgagtatagttgtctgatacatgtatatatctctgaaaattgtaataacatactacctccgtttcaggtaataagatattttaactttgacatactacctccttttgatatattatcatatttatttataaaattagtcaaatttaaagtagtttaactttaatcaaagtcgaaacgtcttgtaacctgtgcaaaccactcaagtacaagaacagtagtctatagaagttccagtatctgctgtgcctcgtagcatactttgtgataagagagatcgcagtccaacatatcaccttgctgatatttcaaagagcacacaacatataaatatagaggaaaaagtgtgcccgattgcccatccaattacgatattctctccgatcagactgttttgctcacaggataacattcttttaaacattacctgaaatactcgtccataggttttgagaaattactgacttactcgttctttataatatattttaacttgcttgtaaggtttgtgtcgttcctgcaacagcgaagggcgttgccgctgctgaagctgacagaggggactgatgctttcatcgacatgtccctgtaaaactgcaacgattaagaagccgtacgtgacttgaaatatgataaatgcagatgaggaatctggaaagaactgcttccttcgctatattttctagtttccggccgtgtttagttttcctctatttttaactttccatcacattatatcacatcaaaaacttttatatatacataaacttctaactttttttccaaactcccaactttctttaaatttttaacttttttcaggaactaaacacacccggagtatgtgagtctgaattagttctctgaaagtggtcggtgttttggcatgttctgttctgtcactaaaaaatgtaagctctaatggcgccttttacgccaactttggtttcttattagttcctttcaatctagttgcccagcatagacccaatcaaagccgggcatcattttcactaaaaatgtcgaagggagacaatcgtgggatcgaagatcaactagaatgtactcaaccaagtagcgatgttatttatttaatcttcattagtgatccctttgagttttccacgagagcatgtagttgagatataaaatatcttcatcttggggacttgcatatcctctgcggctacatgattgcaagagaaatccatggccaacatatggagaaaacgctgtgtaatagatactataaaaaccaatattaattttatcttagctttattaattgttatctctgttgcgatgtaactaatttcagtaacacaaaagagaaagggaaaagagaaacatcgttggtacgtatgatatcagctcagcgtcaactcttagtatctatcttatataagtccattaaacttcctacaaacgctctcaagccgccacgtgggattcctataaacactcctaaatcgccacgtggctctctaataaattataaggaaaaaatccaaacaataatttccacttaatcacggtggacccatgcattattttttaccattagatttatctaacaatataaaaacataaaaagcccactttccatcccttcacgtgacgtacgtgtatcaacctccacgtgtagatacgtacgtatctttcctcccccctcacatcctctccttttccccccctaaaactgacaacgttatatattataaaaaaattacatagcttaacaattataatttttaaagttcttttagttgttcttttatttataattcaataaataattcaagtttcatattatctatattttattttactatataaaattgaaatacatcatttggacattatatggaaaccaaacaagaataagacattataaaaagaatttgatgatatgcttcattttatcttaagtcaatccagatgatcaaaattgatcaaacttcctatagagcgctttttaagtaaccatatatcacgtctacggggaaaaaataatttggtggttcaattagctttaaccattagatttatctaaaaaacttaccaattaaatttatctgtaaatagctccacatctataatgtgtacgtgcaggtaagtagttacatacgtactaaaaatagtactacgtacatgcatacttacgcacaccaagccccacatctttatttctttttccctttctcacttaaattagatgaaaaaccaaactaataattcaatgagcacgtgtgtcatcaagcacctaagataagaaataatactaaataggcaatcatcaacaaatgataagtagaggttgccaccaagccacaacaaataatagttgactacaaatagattgcgagtatgactaatagggttcctacaatcctaagaagccacgtaacgctttgataaataacacaaaatctaagaataaaagtaaaacaccttgccatcaatttacacttaaaccggtggatccattatattcaaccattatattagatctatcgaagtaatgccttgctcctaaaaacaattaatccctccctatatacgtacatacacgagagatgtaaaaagaaaaaaaagagagtgtatataccatttcgcatgtatggtagattttttttcagcgttaactcctagcgatgttgtcgaggaagcaatgtcgtcttggcaccacttgtatttttttataatgatgtaaaaaacagttgggcgctcatataaacacatgcatacccatcctgtgaatacacatacacacattatcccctacaaggggaaaatatttgtaaaaaaccaagaaaaaatatatagatccgagagactactattcaccatgaaaaacatacctacttacgtaggtacgtgcgtgcgttcgtacgtacgtacatacatacatgttacatacatgcgtacgatcgaaaatggcacgtggaaccacattatatctctttatatttagggaatcatcttaatagtgttaataattagcataataaattttgacaatataaattattctttcgtatattacccatgaaaatgcataagtgaattagatgtatagtaaaagaaaaaaaaaaccaaaacacatattaactagtatgttcatatgtttgtgaaggatggtgataataaagtgatttttgtttgaatataataggcattatcatatagtatatcaaagtttatggtctatattacagaataaatatttttttattataaggtaatgattctcatagtgaatatggcgagatatcttttagtactctttttataaacaataagtgaattgcccgcacatctgcgtgggcttccttcctagtttattaaaaaaaatactacatgggatgaaaaaaaagaaaaaaatatgatgaaagaatatttgggggaattaatagctaagagaacatatgtgtcgacatctttctagcaaacctgaaaatattttaccttagttttattgatggttatctttgttgccgcgtaagcaattttaatgtaaaagaaaaaggaaaaagagaaacattattattgatacgtatgacatcggctcaatgtcaactcttagtatttattaaaaaaaaattactacatggggtgaaaaaaaagaaggatggattaatacatataagagaacataaataaatgtgtcgacatctttgtgttacatccgaaaatattttacccttgctgtattcatggttatctctgttctgttgccgtgtaagcaattttggtaacataagatagaaaggggagaaaaaaaagaaacatcattcatacgcacgatatattagctcaacatcaactcttagcattttaaaaggaaaatttactgcattggatggataaaattaagaaaagaacgataataaaatattattttggtaaattaatagctaacagttcttgtcttatattgtaaaagggtagttttcttagtgacaaccatttactaagggctccaacgagattctagtaaagcttaggttttgttcgtttaaaactaattagctcgtaattaattaaatattaattattgtaacttaaaaatagatttatttgaactttttataaaacaacttctatataaattatatttaaaatatgcaccgtttagctgggaagcgtactaatggaaatggaaaccaaggaagatttgtggaagtgatttctgtaacttagggcatccacaatgtagtctaagggtgtgtttgaggagaaggggattgaggagattgggaagatacgcaaaacgaggtgagctattagtgcatgattaattgagtattaactattttaaattttaaaaatagattaatatgattttttaaaacaactttcctatagaaaatttttgcaaaaaacgtaccgtttagtagtttgggaaacgtgcgcgcggaaaacgaaacaaacaaactcactctctcaccctctcgaacgctgcctaaaactagtcaataagcaataaaatattccattcagccacctaaccacattgtgtaactagtccatagcaagaaaatagcaaaagccacccataagcatatgggctgcccatatagaataaaatatattatttgtctctattttctctctcctcctaatactagttgctatccatatacattgtgaagataacattagttatagtctatatatgtgggtcccatctatatggattacttttgttatatacattggtgttacccttagccggaaagctgccattaattaattattacaggagagaaggcttagcatgtgggtagaccaaaaaaacaaaaagtgaattgagattctttatttgggttgtctttaagcttgcagctactatcagagcaagtatagtaatgtacaggcagccagcgaaatcgacagctacgtcatcgaatccaacgtggaggagcgagaaaccaagaaagagaaggaaatgggtgagtcgcgagtcgccggctcggagcgttatatccgaggcgaaacgcccgctcccagcccgttgctggcgccggcgcttgctccacaacggatgttttgtacatgcatatattaattgcttagatgttttaattaggtaatgtatcagtcaacttatagccaacccattatacaggtgagtttttagagcatggctaagtgacatggcagtgacttttagccggctgctggctaagttattatccttactctcatggactataatcaggattctagctgccgcagctagctactatcagattctttttcacactattgatggcacggcctatggccaccgaacggccccgttgaagctattccaaaagcataaaactcttgtatttatcttttcttca

SEQ ID NO: 7235 - DNA, 58722 bp, Oryza sativa
atgtaaatgtataagatataaatcacacttaaagtactatgagtgataaaacaactcataacaaaataaattataattacgtaaattttttgaataagacgaatggtcaaacatttgagaaaaagtcaacggcgtcatctattaaaaaacggaggtagtatttgttagtcaagaattgtaacccattaagtgctgattagttcattagacattaagcctgttctaaaaaaatgcttggttaaaatacagttctttaatcagtaaggatttggaggcttttttgtttctattcttgacagcatctatatttcgatctctgttgaatactattttgtgtagattatattgatcatataataacttgtttacattgtatactgccaatgcgtatgcggccaacgctactagagaaaccaccatcactaacgggtgaaaacaactattattatattgttcacaacgaagaacactacgaaatggaggggggagaccaagaagaggaacattagcttatcgtaagaacaagtagtgttcattgttttttctttaatatgagatgtgtctgatttctaaagggctaaatatgtcataaacgtttaggaataaatttcttctttcgttgttaataatggaaacttagcctctttcataccatacatactgtctaagcaaagccccaataccactctatcttaatttgaagaactatattatattatacaagtttaattctttctatgaattggcaaatgccaagtaaaggttgagcataaatactactacctttgtcccaatatataacaacttttgactataaatttggacacacagttatctagatttatagctaaaaatacttatattttaggatggagggagtagctagcccctatgctgcaaggcactagatataaaaggttcccactgtttactacatcgatcctatctacacatgtaccagaaaagtaataactttatggttttgggaggagaggtcttgatcaagagctctaaccctagctgcgtattagctgctttgtaccagtctcatatttatattccgttctagatgtttgtaccagttatctccggttaggtggtcgatacatacggaagattgcctatgcatccgcttgagttttcgttccgtacgcaacttctatgaacttgacacttgcaccattgttgatacgcccctcttaagttctcatcatttctttctcttgcacccagaaaaggttaattacctgtttaattattaataattcaaaattggacaatatgataatgatagaaatggttgttctagaatgtacatgtttcagactatatacagatactccctatgtagaagtcgttttggacagcgacacggtctccaaaacataattttaacttcttgttactataaaaatatttattgaaaagtgatatatgtataattttataaaagtatttttcaagacatctattcctataatctttacattttcaaactcaacaacttgggagttattcatgatttatattttcaatgtttgacttaaatattattataaacgacatggaggtagtacatgtgttgtgtctgttccgtgcaagcacagactcgcaagcattgtttgtgtagaaagcaagcaataaatccaattaattgtaacaagaaatgttctggtcaacaattaataccagccatgttcatgttatttgttttcttacttctgttttcgtcaaaggtgttttgctgtttgctttgcccttcattgttttttttttttggaaatgtatcgtttcaaaagaatatctgaattttgtgaattataatacgtatttttgaaaatctttgttgttgttctggtattttcgaaaattgaaaaaaatgtaacattgatttttttttaggattcttatgaacttcaatgaattcattgagtctggcacttaattacaaattagttgagaattttgcaatatgtcttctgctgacggatgcagccaagcagtggcagcaacgtggatcgacgtcttatatatccacgaaagggcaaagagtaatgtaagtcaagtactactagagttctttctcctctctggtaaagccttgagacagaacccatgcatttggcagcattcctggccaaattatatcctccttgacattcaggccattattttataaggccaaaccccactataaatactagctagtatacctcttcatttctggtcgtctcaagcagtgtttggagagacagggaaagagttgaacttgcaatggttcacatttcaaatttaatctcctgaaagcctttagtttgggttttggaggcaccaggaactgcgttggcttcaactctccgaattccttctaagttttttgcaatcagcacagtgcagacttgtcattcagtacgagaataattgacgaggtgatttggctgcgcttggaactgaggagagtttagctctttgtttcctactcgcctagtttaaactatgctagactcaatatttgtactcggcagctgccactttcgtggggttatccaatagggccataacataacaaatttaataatatcaccagctgatatctgtaaaaaaggtagtcccacatgtcagcaagagatagctctaaatctctaatagctgatgcgtatgatagctagctgtccaactatgtgtacatccaaaaaaaagagtaaatctttaatctggtaagtttgcttctgtcccacctagtcaggctatatccgtgggggcgttacaaccatgtggggacagcagcagcagctaaacttcatttcagcagattagcagctaaacttcaacttactcgctttccattaacacatatttcaaattgttaaatggtgtttttttcgaaatcattttatatagaagatgtttaaaaaaatatataaaccaatttatcgagtttataatgattaattcttaatcaatcatatgctaattagttttctagtttacatgcgtggagaatgtctctttgaagtctgcggctaagactctctttcctctccagccatccttagaccctatttagatgtgactaaaactttttagtccctatcacatcggatgtttggacactaattataaatattaaacgtagactattaataaaacccattctataactctggactaattcgcgagacgaatctattgagcctaattaatccatgattagcctatgtgatgctacaggaaactacactaattaaggattaattaggcttaaaaaatttgtcacgcgaattacatcgtatttatgtaattagttttacaagtaggttatgtttaatactccaaattcatccgatatgacacggactaaagtttagtctctggatccaaacaccaccttagaactgatgtggcaatatcatcagcggctagcctatcctgctttacctgctcttaggatgactcgacctctatctgatgtgcaagcattgtaacttttatatggctgcttggaagttatttaaagaatacaactactcatgcaaataaacaacttttcattggaaagtagtgtttcaattctgtacaaaatgaaaaagcccacaagtaagccagagaactgcctagctatcagattttatttatcttttttgtctttcaccatggattgctcttctatcagacaagtgtgtcatttttatcgaataacccattcgctcatattaaattatcgacgtatacattgctattgttttttttctaaaaaaatgaattatttggtattattagaagaaactagaaaggtaacccgtgcacatgaacgtgcacctaatttaatatgtgtgaaattttattatgaatgtccatgtatgggtgacctagtattaaaatattatatctaaattataattgaacttatttaatgtgcttttaaaattagttatgattttgttctaaactaaaattactcgaaaccgtataattttcaatttatgagaaaatattatgtcgaaataatatatgcagttcctatgagaaaatttagggtatttcaaatccccacggggatatcttagcccgaacattttcccaaaaagtcaaaaaattgttacactctatttgaaattttagaatgagatttctcattctattagtcctgcaaaaatatttgaatatttctatttagaatgggttttgaacccaacaattatttaaaaattttacataaattttttaatccttttcatgtccatttttttaaaaaattggaaaactccactctatcaagcatatttgaaatgatttgatctaaatatcttcaattgagtaagaatattaaaatagaggtcatataataactacacatttctagattattctacgctaaatcttaggaatttaccatgtagcatagcaagttttaccaaaaagaataagtgaacatggtccttaattcttatatgaaattgacttaatatattggtaatgaaacctcatggttgtttcactgctaagatttctttctgcagcccacatgtttggtacaatcagtatgatcttcaaccgagcacgtttatagtttaaaaatgttgtctatgaaaaattaacactagaggggtacacattatgacataaaaatagatatcatttaaagatttttctcgaatttcttagtgaattcatagatcatatatataattttatctcctaaaagatcatttattgataaaagtaccgaaatcaaattgcataggtaaatagcccccatatacatgttgagataaattaattaagttcatagaaagttgttaggtgtctaatgggatataagtaatgggtctaccggtattattaaaaattaagatacgatattttgatttataatgacgaattttattttttatatttaatggaggcctcaagatggatgtggatccagaatgtaatttttatgatagcatttatatatagtcaatatggatattaaagtattgatttcatttaaaaaatataatagttcaaacagaacataagttgaatatagattttaagaagtgctagtaagagaagaaagagaagaaaagggacagtgggagagctagctagacaaaggagggcgggatctttttcttaaaaaatgattgatataatgacctaaaataatgtgttggatgtttttaagtcgaaaccgacggtcagatgttttgttctttttcataattttatacgatttttttaacttaagagagacatgtagtggcttagaaatatttataggatgtttaatgtactttaagtctttaacattgtagaggcggggcgggaggaaaggaggtttggtagcttttttttaaaaagtctaataacaatctaaatggtatgtccatcaatttaagtcgaaaccaatggttaaatgtattgttcttaaatttttatgattttctctaatttagaagtgtcacatagtggtttagaagtatttataaggatagttaatgggttttaacgccatatgggagcgtagaggaagtttgggattttttttccgtaagaaaaagaaatatctaataacctaaaataatgtaaaaagatggtcaaatgttttagtatttttatattttctctaactttagagtgcgatatgtttagaaatatttatatgatgtttaatgtacttattaggagacgctagctagtaggttgatgggcgttttagacccgtatttttttaatccttattattattatggatattaaaaaaaggaaaaagggaaacggatggatcatacgtacgttgctctaaaaatggatagtcgtacattgtggaggcgtacgtggatggagggagattttgttttctcgtgaagataaatctaactatcaaatttaatgggttcaccaatttaaataaaaattgatggttagattttttctattttattagagtgacatatggtgacttgagagcatttgtaggataccacatggcgacctaggagtgtttatagaaggtttaatgaacttttagtatataataatagatagatagataataggtagatagatagatatctcatgagttacgtgtttagaatttgcatatttttttatccatgacattaactaatcaacattagtaggaaataggaatagctagcctcttttacgttgtatatgatcggagcttaacatagcctctttttaagaactatataatatcaattttttgattgattgtattttattttttatatattttttcattcaaatagaactcgtaaaatgtttgaatttttctatttacagtgggttttaaatctagcaacatttgctcaatttccaattgtaaaagccgcctcaaggttatttcactgttaagattcctaggtgcaacccacatgcttattggtatgatgttcaactggccacacatttatttttaacctattgtctatattgctagatgaatacctattatgattagtgacttcatagatcatatgtgtaattgggatgctatgatcatctttcttatgaatatttatttatctcctaataagatcgttttaaaagtatcaagatcaatttgtataggtacatagccttcataggcatgttaagagaaattaattaagttagtagaaagtcgttagaagcctgacaggatataagtaatagatggaggtccatttgtgtctttttttacatatagataattttaatttcagttgataaggagataaaaaatagagagaaaagaatggcgtacgctgtacgcgagcagggaggaagggagatttcggatgttctttttctaaatgattaatctaacaaactaaaattatgtgtcagatgttcaagtcgaagctgatggtcgaatattttgttttcttgtcagaatttttacgattttctcttatttaagagaacgacgtaatatcttaagagcgtattttctccgatttaagagaacgacataatatcttagaagcatttataagatgcgcactttttactgtgttacaatgttggggtggggctatttttttaatattactcatagttctgttcattttacttttattagatataatttaactattatcaagttatatacgatgacaaaaatatatatcattaatttttatagttttaaaattgcttaaatgacacgcaaaagtcagaaaatgtagccccaattaatgtgacatttctctctttacaggtgaattaaagaggacatgagttttaaaatgtaaaatatctaaagacataagcaaatcaaatattagcattataatttagatgctgcatttgcttaattgtttggcatacaatttttgcttttctaaaagaatgaaaataggagaaaaaataggtgataaaaggggtgaaagaattagggggggattgagcagacgcaagtacgtatgtacatgcaattgccaacaacaggccgaggtgggcctacagataaggatatgtttttttctaataaatctaatggttacaaataatggtccataaaatttaataaaaatcaacagttatatgttgtgtcattttaagaatttctctaatttattagagtgccacgtggtggcttaggagcatttataggatgccacgtggaggcttaggagcgtttgtaggaagtttagtgttgattaattttttattataaatccttatgtggaagacttttaaggaaaaagtctgaattacacccttaaacaataagaatggtacgaattgtcctggttatatataatctgatctctcaccatctttcgcaaacacataagctaatatattttttgttttgttttttcttttattatacatctgatttagatatgtatgttcatgggtaatataggatggaataatctatattgtcaaaattatttgtcctaattattaacattatatagatgagaatgacataattaaaaagatataatgtggttctatgcggcattttcgatgatatgtgtatatgttttttctagcaaatactaagcacatattttttcctttttttggagacaaatattttttctcttagggcaggtgtgtgtatgtgtatttatatgatgggtgagcacacgtttatatatgcgctcgtgattgctttttttaaggaaacgtgattgccttatacatcattagtaaaaaaatacttttaaaaaatttagcgagatggcgtgaagcggtgctgcggccgcgtgaattctttgacaaactcgccaagggtggttgctacacatatgcacaatttgaggaaaatctcagagccacaaagaaagaaagaaaaaactactcgatggagctgatcttgtacacattcttcttttttttttcctttatgacatctcttgcgtagatatagatataaaataatggttgaaaataataaatccatgggttatgtataaataagttgctagattttgttttttatatataggatgacccttatatatatacagcatgtactcctgggtgtatagaaccatttttctatatattttttgttagataagcacgggatatgcaatatttgatacttaattaatcttacgctgatggcatgctttgtttcgcgtgtcctagataagctcatccaatgagatagaccgaatgaagcttaagagataaaagggcatccacatggtgtaaaaatatatatatggttgttaattttccaaaaaaaatatatgaatacagaaacatggaatatatgaaaatacattcttgataaatttaataatgtcatttggatatatcagtattacacgatagggagtgagtaaatttttaaaatgctactcaaaatttaaattgttttttaattataagtccaatttaattgtgatatacaatcatatagtctataatgttaattattaatatttttttatggatgtttcaatgagatgcgctatttagaataaaacttaaaataacatatatttttacaacttaaaacatatggttaacattaactttttagtttttcatctaatctaagtatataagaaggaaaaaagaaaaggacatagaggggatatgtacgtacatcggacataaggacgtacaggtccaggggacacggccgagtaacgtgggatttttttagatagattgatttgtttttttcttaaaataaagatctagtggttaaaaataatgggtccaccagattaaatgaaaaccgatggttggatgttaaagcgccacgtgccgatctaggagcgtttgtaggagcgccacgtggcggcttgagagcgtttgtagaaagtttaatggacttttagtatataatagaagatggaagttttattgaactcgaaaatctgagaacactcccgatctctgcataacaaagtgcacacataaaaaaaaaaagacactcctctgtttcctctgtttttccttgtttccaactgtaattaggagcaaattgcttcatatagtttgtgtccttgaaactcaatttcaaattaacaccatgaatagctgatattcagtttgagttcaatacctatctacaacgtacgaataacagttgaggtgaaaagttgaaagaaaaattctacctaggatagactgaagcaaagaaaaaaaaaggcaaacaaacaaacaacctgctggatgtatgggatggacatgttttaatgcaaccatattcaaaatcgaaccacaatgttgtgtacaaccatgcctattaaatgtgatcaaatgtgtggcttccacggttcttgcacttgaggtgtttgtttcatcagtacatcctactgtgaagtatacatgtatcaaagttgtctaaccttatagttttggattgggatgtctcaggagatctagccctacatagcagataatgcatactagggtaatatttgtagtcctagatgggcacatttgcataggtactggcaaaagatggtgattatctgtcaattactccgtagctttcaagtacagagtcagcatatgttcttgtgtgaagtgtagaaggagctgatgtcctaattgatgtatacagaacacatgtgaatctacgtatctgaagaggatgctatcagcgtcgaacatttgtgtcattcttcatagatcacactttcaatgtcaagtcgaatatgtttcctgttagcatatttctgttgtgaagtgcatgtgcattttatctcttaattagtagcggactttgttatatcctctgcgattctttcgtttttgcatcgtatactctaagacgtgttcagtccacgtaggttggcattgttggaggtaggatcgatcatgcccgtgtgtgtagaatctgcgtgtttatttctgctatataatgagaagagaaaacccaaaagctgcagaagttagggcagcaccaaacttgttgtttgtgttcctgcgctctgagtttccatgaaatcgtgtgcgtgtgtatttaggattagacaccaacgtttcctgcaatcttgaattgcctttgctccattgcccatatgcggcgatgagttttctgcttgcaatattttcaataccttgtttgtctgcacttccattatttcctagcaacccaatatttcagaaaaaaaaagacgtttgaaatttcaaaatggattgaaatatttttgaattttcttgtcgttgccgtgatatttgctgaaattgaaaacgcatcgtggaacttttactggatcgagtggaaatttaaagggtgaatagctaatatggtccctgaagtttcacttcgggctcagtttagttcttgagatttcaaatcgttcaaataagtcctccaaattaatactttgggtcaatatacccttatataccgtataaaaagaaaacaaatgtttcacacatgtatgatcgttttagaattgtcacttacgattgctgcagccaagcactgatcgcataaattcctttgtcggccacccttcacaacaatgttgagcctgggttggtctttttttttgtattttcttttctatatggtatataagggtagaatgatcattttattcataccgctgcatgcgagacgactttggcatgtttacgtggtattttttgtgggtccaaagactatattagcccaaatgattaatttggaggacttgtttggacgatttaaaacctcaaggactaaactaagcccgcaacgaaacttcagggaccatattagctattcacccgaaacaatacatcatctgatgattttctcttaagaaatgcatcaaactgtgtaagagagaaaactgaagtgatgccagttacaaccgttcagtaccattggacacgatgcaactgtcactggtagctcgagaaatggcctttaccatgttgctatgttggcaccaaattgtattaccacaccttgattatgttatatgtgaccagtggcggcactcggagacacgccgtaacaagacaagatctcactgaacgatgacctaggagggacccatcactccatcagggtgaacgttcatcggttaattctagattcgacaggttaagtagaacatcctcaaatgcagaaatggcctttaccatgttgccgtgttggcaccaaattgtattaccacaccttgattatgttatatgtgactagtggcggcactcggagacacgccataacaaggcaagatctcactgaacgatgaactaggagggacccatcactctatcagggtgaacgttcatcggttaattctagattcgacaggtcaagtaggacatcctcaaataccttagagaccagagagatcgagcattgaagggtgaataaacatgggatacatcggaacaaataggaggaagatgtagaatattgaggaagtcgaggcatctcacgtatgccaacctaaaaaggcaaagagattttgtttagagaagggtattttttacctagcttctacatccaaccggatatatgcggccatttaaattaggaacttagccccgcaaataagccaatctaaaattcaatcatacggagatttgaactcagaaccttgggtactacttaggtcaatacaatcactaagctacgtaccttttcataagtcaaatggcgtattgcatcttgttatatatgacctgtgtacggttcatacgattgctatgacatgttgcatattacttcctccgtttcataatataagtcattctagcatttcccacattcatattgatgtatgtctaaattcattaacatcaatatgaatgtaagaaatgttaaaatgaattagcttgtgaaacggagggagtacctcatatttatgggtcattccctgcatctacatattcatgggctcctttatgagctattacagatgacccatcttatatgtctttatgtggcagtggtggaatctgtactatcatgaacctgggctcatgggctcatagatgtctacctattgctggaaaaagccagtaaatggggcaaacatattattttgggaagacagttgtatttgttggggggaggagggggggggggggaacctttgtcacaaaaatgtccacacttatatagaatcacagacacacacagcagataacactggccaggtaaaacgaaaaggatgaggaaggatgggggagcataactttcaggagaattttgtcaggtaacaagttgttggactggaataacataaaaaaaatattatgacaatataaaggatgaaataatttggggcttgaccaaaaatggagtttttagtatcaaatctttctacacagctatgaaaatgcaggaggcaagttcaatgataggggagatacataaaaaaatctggcacatcaaagtacctctaacaatcaggatttttttgtggttactgataaggaacagcgtgctaactaaaaattacctgaagaaaagagggtggagaaaaggaaatgaaacttgtcagttttgtgacaaaaaagaggcaatacaacatttgttctttgattggcccatgacaagatttacttggaatgtggtgtcctgtgcttttgatctgaaacctatgaagaatgtacaacacaccttgggtgcttggactcagaattgtgataaagttacaaaacaactattgctagtggcggtggcagcagttctgtggtccacttggaaagcaagaaacaaggtgtgctttgaacagattctaccacaggatcctactgacatcttatatagggctcgctcatggatgaatgactaggctgttttgcagaaaccggtggaaaaacaagaacgactacggtggggaatccagccgctaaagcaagtcacaagtgagatgttcaagtcacaatatggatggcgagcaagtatcagaagactcccctggcaactgaaaatggaatggcgccttttcttcctggaagtagccgatggatgttttttatttttattttttgttaactgccactctttagatgtgttttgcggcaagatgtcttttgttatactatgaacttggagtgcaagaacgtactccctgtgttctttatcttgtaatccctgtcatttctcttaatggaaatggagggattttgccctttgctaaaaaaataattatttattatcatcaattttcatctgctcgttgtcacaaatgtacgacttgagaagtctcagccacagaatgaatccaacaggtccatcataaaaacaaaagaaatcctgccagccataatatatatatatatactatgtgagtacatgggtatacatctatatgttgtgtatgtaccaactcttggctacaaaagggaaccaagtggtgatcggttcaaccagccaataccatctgatacacggccttgccaatcgttgtatccagcttgtacaaaagaaagttcagatcaaaccaatatcctttggtttgaatagaaaaggatcgaatagaaaaggatcgcattgctgtgtaagaaatactgttgaatgggtcacatccagtttcccatttgtcagaactacatgcaaaccgattgtttgtttatttttaggtttggtaggcaacagggaacaaatatgcaagtaagcagggcattactgcgagctttggagatccaaagaacagatttgagatgagttcaggagcattgtgcaaagcgtctcgccacctacatctacgtacgtagctcataccgcgaggcgcagcaggtaagcatgagtcatttgactatgaagaaaggtgatacgaaactatctagttgttcatgcaagtcagcttgggcaagctgctaatcataaacatacatcaaggctggtatatgtactactaagcacgtggatacgaacggttgcctgaactttcttatgtgttcatgatgataaagtattggcattatctgttgctagggtgactacctttgataaaatgacaccttaaatgatacgggtggcagcagtggggaatttcggacaaccagaggtttctgaacccgtggaactcttgttttgaggacggttgaaataagtaaagtgattcactaattaatccccaatggtttggaaaatcaagttctccagcaagcaaagaatcgtataaatgtataaaaggggggaaatatatgtggtaaacaccgtcgagtaagtaaaaatttgtgaaaatcatatttaaaaggtttatatataaattaatgaaaaaatacactagagtttggtatagccacaggggcggagctatagtaatagggccggtgtcaggtgacaccgacgactttcgacaaaacgtatagcaaaactgcttatccataagttataacaccatgatctaaccataattagtatactatgacaccgatagacacgttatgacaccaacgaatcaattttctagatccgccactgtatagccatgaaatatatttccatccaatcttaagcctaaaatcaaattcaattttagaaggaactaaagtgacagcctgtacttttcacctaaaatctacgcttttttcagaatttgtaattttttaattcatgttttcatgggttttcatttcattgaaggttataaatgtcatgttcagattgtagccaaaataaccttatcaaagtttggacgagattgacaagattttttatgtttttaccagagttttggtaaaaaaaactaaatagatgtatgtatttagcaattttactaaaaaaaatagtatagtttgaaatgaaatcaatctaacaatcctaaaagcccttcctcacatgattaggcagtcaccagctagctaccgctgcttgcagtaggtcgtcttgcgttgctactgtactgattacatcatttgactaggtcgttgcacgcgtcagccggtagtccggacagaatttcagtagcatcattggtgcatatgccaaccgtcgagaatgtcagggatgatcagccaacgtggcaaatatgctaatttgtgttagtaaactaataaaaagtacatggacaactaaccggacttcatactactagcaagtagtgtatatatcagtcttttgctaatacaatattctcggtcaacatgctgcatatcgacatcgtacagtctttacatacataatatccatggcaccagtttggcactctagaagaggccatattaaagcatatgcatccatgtacagctagaaaacaacatagattcacatggcaccattccaattccttgctaatagatacactgacaaagtggctttatccaaagcaaaaatccgttcaaaaccatggattatcctgatacaaccattaattcatgccttaatatataaggttttgtacatgtttcatttgagtaggacaacaatttggaaatgtttataccggaaaagaaccattcaaatgtgaattatttcacatgctactcatgctgagggtggtatatatatgtattggcagtgtgcactgaaatactcatccatgcatgcaaagaaagcctgaaactcccaagaaatatggaaggagaagaagagagtgaaagctggccgccgcagctcgcaccgccgtcgtcgccggcgagcgccgtgctctccgacgaggacctcctcggcgagatcctcctccgcctcgagtcccacgaccacctcgtcgccgtcgcgatcgtctgcaagcactggctccgcgtcgcctccggcgagctcttcctccgccgcttccgtgtcatccacccgccgcgcctcctcggcttctgcgtcgacgacggcggcggcggcgacgctgggcggcggccgcagttcaaggcactcccgcagcatccgggcgtcgccgctgccgccgcgcaccggacgcggcaccggttcttcggcgcgttcggccacctcgccggctaccaccgtccgtccatcgccgactgccgcgacggccgtgtcctcgtcgagtcccccgacagagcgccgcggcggctcggcatcaacacgccgtaccgctacaccgtgctccggccgccccacccgcgtgaatccgtgcaactcctccctccgctgccgccgccgccaggccgcggcgccgggaagcacgtcgtcgaacgcgtgttcctgcccgaggacggcggcggcggcggcggcgaccatggtatcacgctggtgtacgtgttgctggtcgagcggagagtgaccgcgcgagtgcacgttcttgactccggcggagcgtggggagcgccaaccaccgcggagacggagctcccggcgccgtcgtgcgacgacgccgtggacaccgttctgccgccgatcaacggcgatgtctacgtcgtgacgacctccggctacacgctaggtttgcgtctgggcaccacgcgcttcaccgtcgtcgagctcccggacgcggcgaggtcctccgccaacttcaggatggcatggtcacacgccgccgccgccgccgacgacgacgacgtcgctcgcggccggctctgcctcgtccacggcgacgggacgcggctcagcgtctggcaccggaaaacgacgaccacggaggacgacggcggcgcggccggagttgggtggcggctggccgacacgttctgcgtgcgcgaggcgtgcgagcggatcgagtggcttcccgacggctggtggaccggccgtgtcgcggtgatcgccgtcggcgacaacgccgagttcgcgctgctggacttggagaacgtcggcgtcgtgatctacgtgcacctgcagtggaggacggtgaagaaggtctacgagaggaaactcgccgacgccgacgatggcggcggcggcggcggtgaccgccagccgccggtgagggtgttcccgctgacgacagtctggccgccaacgttcccggagttggacaaaccacgacagaattgctgcgtcagaagcccggacggtctcgtcggaggcgtggtgatgacgtgccacgccggctggtcggcgacgtcgccgtcgtgctcccgccgggatggggacgacgacgacgacgacgacgaggacgtcggagcagtgctcccgggctgttcgtgggccggatggttcgatgacatggctgcaatggtggcccagctcgctgaatgggccgcgcagcccagaagcccaagaagatggcgttggtcttgtctctgatacgacccacacatgacacaccagatactgtggcagctagccgagcgcgaactagacactgcgaccctgtagatcaggtgcaagctggatgccactgggtgtactccacttgtgaaaatcaatttctaagagaaggtgaacttaattacgacaactgtctcattttattggacaatcaacttaagaatctatctataattattggacaatcaacttaagaatctatctataaaaaccgtttattatagtcaggtgtttgacgcatttgtatctgaaaattgattttaaaaaactggcacccgtaaaaaccgagctgagccgaccggtagtctcaaacggataaggcctagaggaggactcggactctccggtttcctcattctttcacgctcccccctccctctctctctcctgcgtgcgcttctctctctctattgtcctagtggtggctccgcggcggcggtgccctcccctgcccgtcgacggtggtgaattttttgtgttagtgttgatatttttgagttcttggatgcctactaattctatgaattaaatgttccatggaatcgggatgaaggggaacagcttgagctgtttttttcccttgattcttgggacctcaaaggttctcttatctatgctgccttctaggtgccggttaggaaatccggcacctacgcagggttccaaccagcaccaatctatgtttatgtaatcgtgtctttttgctgcacgaatttgtttaattcatatgagcttggacgataatggcaaggttaattttacacagtttgtgttgatcagtatgagacatgtgtagtgagtacacataggacatgctatatttacaaacatggtctctactttgcttcatcatagcttggtttttaatttctttctgtacaatcagtattgcttcatttatatcttttgaagaaaaaaaaaatctaaaaaatgccattaacaaacgccaaattctaataaatatcatcgataaatgtgagttccataaaatgctatcgtgcgaacgacttatcacataaatgccattaccgttagggttctatccaacccaccccatcaaatgcacagttcatcttgtatcacttaatgaaaggctactaacggaaccctaatagcaatggcacttctgagataaaattacttatacgatggtattgcatagaactcgatgcttgttaatggcatttcttcgatttttttttctcatgttttcattgaacacatgtatgtctaaatagcatctttatgatatatatatatacttatgtaatatcctagttggcacctaaatcaataagattaagcatgtagtcaaatttgtgcttcaaaacaagtgttttaaattcgtgcactatattgcacccatctaacaagtttgtgtatcaccagtgcaatttacccttgaatcaactttacttttattggattgtttacccaagtagactttattggattaattgtgtgcccatggatatatgattatggtgggaggtttggggcttcccctactaagttccggtaaaaaaattgatattaagaggacattcctcatatatacacggtgaattcaacagactttctagggccaaatacaccacggatcatcaagataactctagggccaaaatatgctaccaaattgaggctatcattccacagaacgaaacaaaaattggaaaaaaatagcacaatttcttgagtaatgtaaccactgaaaagtactagcttgctgcaacaatggggggagtgcagtaaggttttgttctccgatgcttcctgccgatttcccttcaaaatcagacccaaatagcatttatgaatcaagatatattcgtgaatgagcacaaatgaaagaaattgaaattagaatgcaattgtttgactaaaagaacattacgagctaagttcaattaacagttacctggatctgtcatatatacaaccatgtgtttgttctgcatcaaaattaccagacaacatgcatgctgcggcgcatacattggaggtgtaggggatgcgaccatttgctgttcgccagctgccggagcttgcacttgggacacaagctaagaaaagaaagagagtggggaagaactaatgaaacgagaaacatggatctggacaatggacacatgattatgtggagaaaaaggtgttgtggcaccgacggtagctccatcgtctacagctcggcggccactccggaagctatcgctggatttgcagcacttggacatgttaatacgcacatttagctcttaaagtatgaaatagaaaactatagttaaatttaaaaagaacccaccctaggccgatctgaccacagctatcgggctgatctgatcggcggcatgtggtcagtcagactagcagagtccgattccaagttcgatttattggttcttggggcttcttgctaagacatgagattttagatttctaattggatatgaaatatatacgggaaagcaagtccaccactcctataaatataagggagcaaagaccgattgaaacaacaaccaatcaatcatcaaaatcaatttaatatcccaaccctctatatcctatatctctctccttttgtttacctatgccaagtctattctcctcaaaccatccaattgtttgtcgtctttcatctctatggtgttagacgacgtcctagccggcatgccgagtctaggacaaaccggtgtgtgttcactttgaagggatccctcccaagtgtttgttcagcagtatctacccgctccctatagcagtgcgcctctaggcgccacgccgcaggttgcacataacatgtgtagcaacacgattctacgtcaattaaatactcgttggtagctggtgtatggagctcgagcttggctaatgcttggtagttacgagagggcaagcactggccacccatggaagaagaaggggaggacgtagacaaaatgggtccaaaaactactgagcagtgaatttatatttgcaaggcaaggaattcttggcagggagagaaaaaaaaaaaaggaaagctaatctggccacgctgatgctgatgtggcactcctttgtatcctcctcgtcagaagttccctaggaacatggacaaactcctgtaccaagttctggtaaaaactataattggattaattgcgtagccatggatatttgatgatgatgggggctgtgggtcctcccgaaccaagttctgttataaaaatgatatgataaggacattcttcatacatggtgctaatgacattcaagaaaaatcaaatagaagtggaaatgtttcttagaattaatattatttcaattaataataatttgcattctatgtgaaatacaacataaacttttatgttggtggtattgcagtatatgcacaagatgacaacactcaaccgaatgtcttgaaatggagatgggtggtttagttactgcctggaagctattatagtaaagagggaagcacaacaccatggccaaggatgatggttcaaatctatgggatttcagaaaaaaaaaaagcaaaggcatattgactatccatggtacatccggaaaataaaaaactttgcctggtatatgagatctatttttttcaaaaaaaaaaaaacagagcagacaaaggagaatgttaatcggaaggaatcaatataatgtagcccaagctgcatggaattcaaggattaagtgtcttgggggattctttcattcttaggtattattattagaattatataaattgtgtaacatgacaccaaatgaacatgtgcaatgacaaaaatgacccaaaaccctatcactgcaaaccacctcgaaaaaagcctaaacccccaaatgggcaaaaggtggggcaaacccattctcatcctctccacactaccaccgtttccttcctcaagctcccgcctcctccctataggtcttcaaggttgagctctctccttctctcccatggagggacacttgccatgttcgctgagaaaatattttgtcccaacaaactgtatgttctttcataataaacacaaaatgtatcagcaatatgtagcacttgtaccacataaatgctttaattaggtccgttatgggtggttgcattccaaatatagcgcacatgtgattggtcacttaaaaccagcacgatgcaaagaaagataggaaaaacgtgtctgcctcattaggtcaacaaatattgtgggaaaagattcatcttttggcatgagaacctatgggacaattaaataagtttcttgcttcaaatatttcatatggtacagcatgctgaattgacaaaaaaaataattttccttgcatttaagatttttcttgtgttgaacatagatcttttttaatttatccactcatatattgtttttctagtagctcattttctagataggaatttcattgtttattagcattaagctggtaatcagatgcaacaaatacatgaaccaagactagtttgtagggatctagaaaagggaaaagggataatatgattaaaaaaggaaatcggatgatgggatacaaaatagaaagcaatgatatattggaatgtaaataaaggagcgacaccctccaaaattgatagttgaccatggtttctctggcaaaatatcatctaagaaaaagtccacctttgccatgttggccaagtaggcaaatgataatgagtctcgcattacttgggtgggactgaaaattcctaattggcctatgagaatgctgcaacactgttgaaaggctaagccatgtcaccattggatccagcagtgccgcttacactgctaccttcgaactgattgtaccccattgagccagtgccccttgcaacatccatcagccatccctccctctggattggtacctccgtgctcgacaatgagacagatgcaggtatgaggccttgctcacggagcttcttgaggcggtcgttgacaatcttgaggcgtgaatttgccatccttccgaggctgataatctgctcgatggtgagaccatcgaggcttgggtggcggccattgatggcttcaatgaggagtagcttggtctcgctttcatcagcttcgcgtcccagcttgtgcaacttctccttgagcttgtcgatctgcttgttgaggatgccctctaggtctatcatcttcttgtatctgcccagctgcggcatggccttgaagtgctcgagaactctggtcgcctcccacaccgacggccaaaccttcgttgcttgcacctcaacctcaccgtacaccatgaggaacagtgttgcgaactcactaaccttcttcatcaagcccttcagatgcttcctaaatgtcacccgccgcttcacatcaatgacgatccgcagaagcttcatcttcttgcgagccatggcctttgcagttcaccactttctagcaagaatgcacctgtaaattgatgagagatggttagattgatgtgaaatcaaagaaaggggaatatggtggatttatagtgggagatcatattgcaacaatcgccatgatgtggaaagaaattattttgcaaatccaaaaatatcaaatgaatcaatgtaagttaatgctttcctgaaaaaaatgatcggttaatgtgtagctggcgagcatatcttcaacctttaatcgtgtccgtctttagaaacttccttgcaggcatgagctagcaatagccaatagatattactcgctagatgataatgagttcacaccaaagatacgttcatccccagttcatcatatatgtttgagttaatcctctttcatatgcgcaataggaattcaatttacaactacagaaatgattttcgctacattcaaagagttccaaggattgatcctgtcacgatagctgccatcggatgggccatatctgccacagaatggatgatttcccccatcactcataaacttgtgaacaagggagccgccttcatgctcgctcgctgtcccagcttgcatctgttaaaaagcatacatagttatcttgttaagaaagagaacactagataactcgcaaaccgtatttttatcaactctactattattggattatttatccatttattgcagttgagtggagagaacagtgaagctagctatgtaatttgaggctcctattaaagccccattggtctaaaatctcaacatatttgttgcaagtcatcaattatattattaaaatttagtaaagccacaatgctcagcaaaaagaactagcaaaacagtactatattccaagggaaaaaagaatttacatctttgatcatgtagaatttagattgtatcaatttagactattctaccacctccacaacatcaattggagaaaaacaagaaagattaacaccgctatgttcgatgggtccagattttctcactatactgcagtaaattggtctgcctcaaccgtgtaagaaatatactagtataactctattttacagcgaagatagcgtgaagacctcggctagttcgtaaaattttatcttatatctgttcatggttttcaggaaacacaaaagcacatatgaagttggcttgcaatttgcacaagaattacatttggcagtttccatgccgtaatcatttccttcagttcttggacagaagttgactttttatctaaccagatcaactttgcttgcatttgtaggatgttgttccaagtgtaattatgtccaaaaatagcttgaagaaaccgttggagaaaatagaaactaccaacgctgaagcgcataagattgttgacctgccaaacttgataagcaagaaaaaaaatgacaaccatagaccaaatgttttgccatatatacatccattccgttgcagatccaccacgctaggtaatcggatgaaatatggaatgtcggtagagaaaaaatgtgctcaatgacgatgacaacccaagtcctggtgttattatgaactggcatccatggtatccgtggatctagtaagataactctcgcacaacatttttgtgtcggatgcagaaaaagtccgctatttcgaacttgttatgtgggttcttgtttccaagaattttcatatagatacaagtttcacttagatgattgagcaagctacagggcaatcaattatttgaccagccaaatttgataagcaataacaaaaatgacaaccatagaccagatgtttttgccatatatgcgcccaataatgccactgcagatccaccacgctaggtaatcagacgagatgtggaacaccgacagagaaaaaaatgtgttcaatgataatgacaacccaagtcctggtgttcataaaatattattctgcaattggcatccatggtatccgtgggtaggaaaagataactctcgcacaacatgtttgtgtcaaatgaagaaaaagtccgctatttggaacttgttatgtggattcatgttttctagaactttcatatagataccattttcacttagatgattgagcaagctacagggcaatcatgtcgtcagttaccctcggtttaagagtctaactgctctaaaaaggagtctgaaggaagccttggatgaaaaacgtttcctcttgtacaaaactataatcgtggaggacccctttctccattgaaggttgataagactggcagcaagatcctagcaactagtccaaccagagatgcaatattattagctttgggtgttgtgacatccaagtcatcaagtgtattactcacttgatggtgcagagataggtgaacaagatcaaggagtattagagatgattggggctgaaactgccaaaaagttgaagagatcacctctagcaggcataacagtaggaggacagctatatatatgacaagacttttgagatatgtggatgcagccaattggggacctgcctttctgatgagttatttattcacctcacttgacctaggtcaccttgccaggtaacatggagtgcctcatgacgcttaaagatttgatgatcccctattagaggaactagtcgcacgggatattattattgtaatttttagtacataaaaatgttgaattataccagcttagactaattgagagtagagtctaaatcaatcataacttgctaaattctactttcaaaattaaattaatacactaaattaaaaatcgatgatagttacatcattgtagtattaactttgaattctacaattattaatttttggaaaatgaaaattaaagagtccatgctattttcgtcttgcatgttttatttaacacaaactggcaatacaatttacgatcatcgtaatacgcttttaacagccataccattttgagttataataagagcgtcaagataatgtccaattatataatataggcatgaaataagttgtgtatcaacatacacaaagcatctccaaccattaatattataccgcacggttcattaaaaaaatacactactttgcaatttatcttattgtttttgctaacgcagtagccacaagtataataccatgagcgaaagcaataaacccatataatacaccctatcaatttttctctcaatcacaattgcaatggaagtatatagattccataagaaatctgtatatgtcagaattatgattctttgatgaaagcgataaaaaaacacaattatcttgacctcaccgagccaagtgcatcatatatgtacctccttgtgcatggagacattatgtgataaacctacgattagtccttcaaaggatgcatgtacgaccatataaattaggaacaaatctaagaaccggtacctacaacttcctaattatatataggtgccggtttttttaagtagactggtacatataggtgtgttcacaagtactccactgacgactggatcaactataggtgccaacttttttaataaccggcatataaagtattggtgctagtttttgctagtaaccagtacccataatttatattagatgcaggtttcttttctgaacatttatatttaggccggtaccaatttggggtgagtacaatatggacagcgtggcaattcgttgtaaatttatacatcaagaaactgtagaaatttgtcataactgcaagtcgattaggcccggagatcgaggtagtacaacaattgtggtatgtttgatgtgatatggccatcatagtttgaataagacaatttcttcacctctaactaatttgatatttcataacaaaaagcacatcgttcaaatgtatggctaacattatcataatgttgaaccaagaagcgattgatattactattttaaatcaataagattaagcatgtagacaaatttgtgcttcaaaactagcattttaaattcgtgcactatactacacccatccgacaagtttgtgtatcaccaacacaatttacactttagtcaactttatttttattggattgtttacccaagtagactttattggattaattgtgtacctatggatatatgatggtgggtgctgtggggcttcccctactaagttctggtaaagaaattgatatgaagaggacattcctcatacatgttgaattgaacatcttctctagggccaaatacactaggattatcaagataactctagggaacaggttcccctagattaacccctacggaagacaccctaggggtcaattctaccggaaagacaaacttccttggagtttttcatgaataccttggggaagatatttgttccctagagttcgaaattctacagatagttgtacatgtggcatgttcatcctacgtgtaaagtacattcccctaggttttcagctacaaaatgaaatcttttattattttaattttttatacatgttgtattatcctcatttacctcaatgttcaaggaaaaaaatgattaattaacaacaatgttacttttattatgaacagaaaaaacttaacttgaactgaatcttcaatttgcatgcttttgtagtacagcaacaaagctggaaattaaactgggctaacatttcttcttacaaacacgctcacactttcaaaatatgctacctaattgaggctatcattccacagaactgtaacatacccgaactctagaccttaaaaattttctgtcaaaatagttggaagctaacttttctatttttgagagccaaaaatttccattttaaaacctaggtgaagttgatataactcttgcatgataaaattttagaacaaattaaaacctttgcatctctaacctaggacaaaaatataagtttatgtgtaagcatgcatattctcatagccatgtttgacttgagtccttcatatgcatttggattgcatttggattttcgatttgcatttcataataggtctcataaatattaactaagatctagataaacaactgaaccattagggcctagtgctagctagaggaagttaaaataggaaccatacatcttaaaatatatcaacaaggccaatgtcaagccccacaaaactatttggtcatccatctgaagactagtcatgaacctggaagtgaacaaataaattaactcatataggatatattccaccttagttacctttataagcattctcttaattaaatactagagtaaacttatgcataaatagttaaggagcttattacatgtgtaaggtaaactaaaattctaacatatcaacatcacctcaggttaagaagagtctaaatataaaagttttaaaaacatttacatacatttaggaaaggaaaataattcttgctaattatttaaaataatctgtgcaagataaaatcattgaaaaattcatgtaggctctaattaacatatacaacacacagtaatttcggtataatttaataactaaatttgatacctcaaataaataagttaaaccagacaaataatagactaattataactcctaattggctaaaaccataccttgttgaaaagtgcatttaactgcatggaagtgtataggggaaataatttattaaaatactaggttaattatcatgactaaatataatttttctagaatttatcttctctgtttaggtctcctaaaaatccaaactagtttccaaagaacccatattcctctaatttctgtgagtaatctatccataatttttgaggcaaccaaagaaaatggaatctaggtatcttcatctaccttcagaaaaatccacactaaattatcctacccacaaattaaataattgaattactaaagtgggagagagaaataatcctgaaaatcattcaaatcttttgttcacccacgtttctgcccaaccctctcaccctagcttagtttgccacgacctggacccacttggcagccactctggctcatcctcaccctgtgcaaatcttccagccgaccatagacagccgagagagagagagagagattggcgccggctgtgtacgacgcgtggcctcgacgtggcagcgccgaaccgaggcttcacctccacccagctgtgtcgccactcttcacccaccatcccagtgccgatccaaccgagggaggaagctccagctctccctctctacctctctttcgtcgccggccgccaagaagagggacattgccaaccgtcgtcgagccctctccatctctaactcatactcgttccattctcatatcgccatgccgaacaactttggttttgatcccattccatttcatcttctacagcagcgggaacgccgccatgtcatggtcgctctagagcgcgctctgtgcaccgccgcagcgacatcatcgccgttcccgcttatctggaccaagccggaccaagctgtcgcgccagcgtcttcgcctcgacctcctctccatttcccctcaagaatctcgaaggatggtgctacgagtgtggagatcgtccaccgtcttcttcacctccggtcgccgtcgccattgtcgattccgcctcctccggtgagccattgtccgattcttcgcgtatacaccatccctggggcctcactaacctcatggacacacatacatgatagttcttggagctgattgagccatcgccgttcacccggaggttcttgccgccgccgagccgttacatgagccgccgtcatcaacctagctaccccagccatgtctagcatctcggtgagcacccttcagcctatagaacatacatgcatgcacccaattaaccaatacatgattgtagaagcacatgcatcaccacccgaaaacatcctcctttcggactcgccgccggcgttactccgatgtccactgaccaagaaaagtagaggaatggaatcgcaatatcatgatcttcattttgtcttttggtcgcacccccaaacgagccatcgtttgtcgccggtgagctcgagatcgagctcagccatggctgttctgcctctgtgcgtgagaaaagaagtcagggaccttgtttcgagaatttaaacaactataaggtttaatgtgcaacttttcaactcactgacatatgagcctaggtctgcgggttgattcttagaaaccgcagggatctttttgtatattgatctctcactgacagtggaccccttggaaacaaaaatctgaaattataaaagaaaagtacctaaaacctgtaaaatccatataaaattaaatatagctcattttaagatgattcaaatttctgtgaactcaccaaattgtgaactttgatgttatggaataaaaacttgcactcacagtacaaatttagcctctaaaatttatccaagttaaatcacacataaagcatgcacaaatttataaaatgcatacaaaattcatttcaactcattttagagcaaacttagtttctacagatccaccaacatgttctctaaaaataaagtaaaataaaacatataaacactttacatcaaatgcctctaaaactattatctttaaaataactagttttgcataagatgaactttagaagtttatataaaattcatcttagatcctttttgagtaaacccaagttctgtagaatcaccaaaacatatacttccaagttataaaataaagttatatacttactgtatgataaaagcctctaaattcttatgtaagtaataaccatcatagagcaaccttaaattgtaaaatttgtagaaaattcatctttagtctaaatgaagtgaaccaaatatctatagaaccagcaaacagtgggcttcaacatagtaaaataaaatatggaaccttctgtacaggttatagctatcgattgagcaatatgtatatatataaatgtatatagaaatacactctagctataatgaaacacaaataaaacctgttagaccagtgaatgcataatgcatagttccatccccatccaccaaaacttaaggcacttagctcatataataatttttaggttgatataataaattgctagcatggactagagctcccctagtttataaaatatgaaccatggtaataaagaccataagcctatgaactaaggttagattagttaactaaaatactcattttatacatcactagctagatgaggcaagttctggacctaaacctctaaagctatgaacctatagaacactatacacctataacacgttataacttgtaaaatacataaagaattcatattaactctaaaaattatgaaaccaaatgtgttggtcttagaaaacacatatcttcaccccagcaaacataaacttaacaagaatcaccttacaacagcatttcacaatagtacctaagtaaatcctacactataccgacgaaacttctaaaattcataattctcaaatgaaatgagataaaatataaattctttcacctaaattcattttagaccagtacctattcactgtgcacaaatcatccattttagagcattttggatttttcgcatatttcggtgtttaattgcataacgtgtactttgtttagatgattgcttaaacggtgaagaagtgatttaggtgctgacattttcctgattcaaggcaagtcccacctccctctctttgatcactttgaacctatgttttggaggttattgaaaatgtttgaacctatgttttggaggttattgaaaatgtttgcaaatcctgcatgtcgattgtacattaacaaattaaaattgtgttaaacttgttagacaaactcctattatttacattatcaccttaaccccacatatatccatatccatcattcctatccttaggaacaatatgactataccacgttatatatgaattttggagtcactaggttattataatgcttagccatgcttagaatggtcttccttgtcattatgggttcattacaaatatgaaaaattgattttgaaataatctggacagaactttaatacttgtgattttcataaataaaatgatggaaaacatggattttaggtttgggcctcaactggtgcacatatggtgattagttgtgtaccgatagggggagagtgcacccaaaccgacctaaggacttcactcaatgtcagttcatttcgtatacagtacaaccacatgtgctagtatgggatagctcaagcttagtaaattatttatggtttagccttacattctggtagaccggtgcgtatgaattcggataactcagaggaacttcctatttaccccgacgtggtagtttaggtcactaagtctgtccaatacaacggtattgtgccacgtgggtgggttcccgttgtgtccgccaccacggcgttaagtttaaggcgtgagcccgccacttaacggttctaggtcatataacgtgtatggcttaggatggagtaacacgtatcgtgctggtgtaaggctaaatcatgaattttggaaaagctttgttgcgggtaataaatcgggtacttatgtatcgcgtgccatgctcttgcatgattattatttcgcatcatgtgggtaaagtgtacaaactctgcagagttaaaactaatcgattcgttgtgctcgcggtcatgagcggcgtgtggatatctattgagtatagacttgtgtttattctcctaaatgctgaaatttacctttaaatcaatttaaagagatttgagaatgatctccttgctccttgctgccatggaaggcaatgaggtgcatatttatacatgattaatgcctattttgatgcccaatatgacaagtactagcttgttgaaatttatttgaaagtaaacctgatttggaaatgttttatgcaaataaaacttgctttatgctaaaaagaaccatattatgtcttccttgattatatgccttgcaagtagggtgttaggcttgtcttggtgcttgccctaataatgtactgactcttgctattgaattaatcttttgcttgcaggttttagacttagtctttgagtgatgcgggtaatcgactgcttcttctagtacttgaacttaatggggtaaacccctagtcggtgtgcttgtggattgggtagacaagcttccgctgttctatatatttatttggccggtcggccaatgtaactaaagtagatgtagtttataatcgctttcatcttatttgtgtttgctatgtataatcatgcttgagatgaaagtgtgaatctagtgcacatcctgtgaactagattcacatgagtatgagttaagaatatttgagatgttatagatctttagccatttttgttaagtctcctgaatgtgtaacacatctggtcactgccttcgagtggtttgacgggcgtatctcaggctgaagttgactggcaggttaaaggctcagcaatgtctccaatattcctctctcgaggcgtcggatattttattatgcttgtttgatgacttgaattattcatttcatctctcaattataatggaaggtccggagagcctatgacaagaacgaaacaaaattgaaaaaacaaatagcccaatttcttgaggactaaaaccactgaatagtactagcttgctgcaaaaatggaggaagtgcgcagtgagttgttctcggatgcttcctgccgatttcccttcaaaatcagacccaaatagcaattatgagtcaagataaattcgtgaatgagcacaaatgaaagaatttgaaattagcatgaaattgtttggctaaagaacagtacgagctaagttcaaatatgtacaaccatgtgttgttcggcatcaaaattaccaggcaacctgctggctgtggcgtgtacattggaggtgtaggggatgcgaccatttgctgttcgctagctgccggagcttgcccttgggacacaagctaagaaaagaaagagagtggaccggatgaactaaagaaccaagtaacatggatctggacaaatgattgagtggagaaaggggcgttgcggcaccgactgcagctatagctggatttgcagcacttggacgtgttaatactcaaatttggctctagaatataaaattgaaaacttttgctaaatttaaaaagaacctagacttgtcatacgaggccggtcggaccgatagcaggggccggtctgaccggcagcatgtgatcggttagactggtagagtccgactacaagtttgatttatcagttcttgggttttcttgctaaggcttgatatttgagagttctaattggtttctacagctaattgaacgtgagaaagaacctgggaagcaatttcaaccctcctatagatataagtgagctaaggcggattgaaacaaaaccaatcaatcgttaaaatcaatttaataaccaaaccatctatattttctatctcactttttcttgctacctatcccaagtatattctccttaaaccggacatcctagctggcctgttgagtctaggacaaaccggcgtgtgttcaccccgacggggtctctccgagtgctcgttcggcgacatctatccgcgccctataacggcgcgtctctgggtgccgcgccatgggttgcacataacgtgtgtggcggcagcacgattctacgtcaacagaacgctcacttgtagctggtgtacagagctcgagcctggttgatgcttggtagttaggagagggcaagcactggccaaccatggaagaagaaggggaagatgtagattagatgggcccaaaaactactgagcagtgaatttgattttcaaggcgcgttgttcttggcggggagagaaaaaaagggaatgctaatctggccatcctagtgctgatgtggcacaacttagtgtccttctcgtcagaagttccctaggaacatggacaaactcttgtaccaaaataaaaacttttattggattaattatgtagccatggatatatgatgatgctaagggctgtggggcctctcttacaaactcctggtaaaaaatgatatgacgaggacattactcatagagaaaatttcctatgtacccataaaagttcacctaatctcttatttgcttctgaattttgctcattctcttacatacccctgaattttagtttggatcgcttccacgcccttttctctagttgactgctaaattattatgaaaaagtccatttttccctttgctacgagaaacataataaattaatggagtacattgttggatgtagaaatttgttggatgagactattatatttatgagtttgttatgcaccatattaactgcgacaaatttagttttagatttgatataaaaatttaatatttatttattagttattgaatgtttttttatgtagcatattgttgacgaaaaatccgcactcggccagtggtgccgggtctgtgctggcgcaaactaagtcgacgaacataacggtctgggagatctgcttagctccagtgcaggtccaaaggttggtgaaatacaggcgtgtcagtcaggtttatcctgaaactaacaagatatacaaatagcaggtcaatgagcctatcggctgacgagccgatggagtagttccagtcgatgccgataccagccgatagtgatagggtttggagctatcggttatatatccaatttagattctgatacttgagacaatcggctgataataataaataacaataatataatccagtagaaaccaatcggctaacattgatatgatagaataagcactgatccgaaggttgaagaatacatcggttggagatccgatgtcataaaatccagaagattagattaaacagtgaaatctttgttatcatcgtctaaatccaacttatatgcaatccttgtaaaccgatgcaacatctagatacctcatcggctgaaaccctgatgaaacccttattggcagtccaaaagcaggctagagattatggttctaaacatgacttagtagatcaaacttaactgatgcagcactaagtttgaaaagaaacacaatatctagataatcaagccgttgactgatttttcgggtggtagaagccttagctaatctaatctagtaaaataatttagccgataccggcagaaaccctaaagcgagagacaaccgatagagctaaattgagaaactaagactagattaactaagacatatgataaatagccaagcaaatatatcaacatcccatagaaatccaagaagtcaaatgtactgatgcagccttgaacgacaccaatgtagccaatacaattgactaggccggtagaacattggacttaccccttcgccggagatcgaatagcgatgtagccccgcgtcaggtgtcaagttccaccgtgataaataaaataaagtagaaaaggtaaaaggtggcgatccaccgaattgtattgatcgtggagatattacaatgaccccgggtgtacatatttatacccatgggtagatactagtccttgtaggataagaaagagactttcctaaagatgaaaggaaaacataaagtccttataggacactaaacatactttcctaaagataaaaggaaactgacaaactattcctaattagtagataacttgccatggcgcatcctccttgaacacggtcactagtggataagcttcctttaatcgattaatttccttaaccgaatatagctggaatccaactatatgtgttttgatagtaatacaatagatagattgttgtataagacaaatatatttatatgcaacataaacaactttcaataagtaataattaagtattattttttatgtcatctctaaatgtatatttatcgcaaataatatggtgcataactaactcataaatataatagtcccatttaacaaatttttaccctccgataatacactctattaatttatatgcttcttcaaagcaaagggcaaaatgggcttttctcataagaatttaacggtcaactaatggaaaattcatagcctaaactcccaagtaggcaaaaggtggtgcggacccattctcatcctcttccttcctcaagctcccgcctcctccctacaggtcttcaaggttgagctctctccttgttaagataatattttgtcccatgttcgctaagataatattttgtcccaacaaactgtatgttctttcattaaaaacacaaaaatgtatcggcaatatgaagcacttgcaccacataaatgctttaatcaggtctgttatgggtggttgcattccaaatatagcttacatgtggttggtcacctaaaaccagcacgatgcaaaaaaagataggaaaaacgtgtctgcctcgttaggacaacaaatatcatgggaaaagattcatcttctggcataagatcctgtgggaaaattaaagttttactaagtttcatatttcaactatttcatatggtattgtaggctgaatcgacaaaaaaatcattttcctcgcacttaagatttttcttgtgttgaacatagatcttttttttaatttatccactcagatcttgtttttctagttgctcattttctagataggaatttcatcgtttataagcattaagctggtaatcagatgcaacaaatacatgaaccaagactagcttgtagggatctaaaaaagggaaaagcgaaattattattaaaaagggaaatgggatgatgggatacaaaatagaaaggaatgatatattgggatgtaaataaaggagtgattgacaccctccaaaatcgatagttgaccatgctttctctggcaaaatattatctcagaaaaagtccacctttgccatgttgtccaggcaatcaagtgataatgagtctcgcattacttgggtggcaaatgaaaattcctgattggcctgtgagaatcctgtaacactgttgaaaggctaagccatgtcaccattggatccagcagtgccgcttccactgctacctccgaaccgattgtaccctattgagccaatgccccttgcaacatccaccagccatccctccctctggattggtacttccgtgctcgacaatgacacggatgcaggtatgaggccttcctcacggagcttcttgaggcggtcgttgacaatcttgaggtgtgcatttgccatccatccgaggctggtaatttgctcgatggtgagaccctcgaggctcgggcggtggccattgatggcttcaatgaggagtagcttggtctcgctttcatcagcatcacgtcccaccttgtgcaactgctctttgagcttgttgacctgctcgttgaggatgtcctctaggtctgtcatcttcttgtatctgaccagatgcggcatggccttgaagtgctcgagaactctggtcgcctcccacaccgacggccaaaccttcgttgcttgcacctcaacctcaccgtacaccatgaggaatagtgttgcgaactcactaaccttcttcgtcaagcccttgagactcttcatgaatgtcacccgctgcttcacatcaatgacgatcccctgaagcttcaccttcttgcgagccatggcctacgcagttcactactttctagcaagaatgcacctgtagattgaggagagatggttagattgatgtgaaatcaaggaaaggggaatatggtggatttatagtgggagatcggattgcaacaatcgccatgttgtggaaagaaattatttcgcaaatccaaaaatatcaaatgaatcaatgcaagttaatgctttcctgacaaaaaatgctcggttaatgtgtagctggcaagcatatctgtcaacctttaatcgtgcctgtcaatagccaatagatattactcgctagatgataatgagttcacaccaaatatacattcatgcccagttcatcatatatgtttgagttaatcctctttgatatgtgcaattggaattcaatttacaactacagaaacgatttttgctacattcaaagagttccaaggattgatcctgtcacgatagctgccatcggatgggccatatccacagaatggatgatttcccccatcactcataaacttgtgaacaagggagccgccttcatgctccgctcgccatcacagcttgcatctgttaaaaagcacacatggctatcttgttaagaaagagaacactagattactcggaaaccatatttttatcaactctacatttattggattgtttatccatctatgcagttgagtggagagaacattgaagctagcaatgtaatattaggctcctattaaagcccctttggtccaaaattatctcgagatatttattgcaggtcatcaattatattattaaaatttagtaaagccacaatgctcagccaaaagaactagagaaacagtacaatattccgagggaaaaaagaatttacatctttgatcgtgcagaatttagattgtgtcaatttagactattctaccacatccataacatcaattggagaaaaacaagaaagattaacaccgctatgttcgatgggtacagattttctcactatattgattggtctgccccaaccataaaagaagtatactagtataactctattttacagtgaagattgcatgaaaacctcggctagttcgtaaaattttatcttgtatctgttcatggattttgggaagcacataagcacatataaagttggcttgcaaattgcacaagaattacatttgggagtttccgtgccgcgatcatttccttcagttcttggacagaaggtgacttttatacctaaccagatcaactttgcatgcatttgtaggatgttgttccaagtataattaagtccaaaaatagcttgaagaaacagttggagaaaatagaaactcccaacgctgaagcacagaagattgttgacctgccaaacttgataagcaataaaaaaatgacaaccatagacccgatgcttttgccctatatatatcgattccattgcagatccaccacgctaggtaatccgatgaagtatgaaacgtcggcagagaaaaaatgtgatcaatgacgatgacaacccaagtcccgctgttcataaatgttattatgaattggcatccatggtatctgtggatctggaaagataactctcgcacaacatgtttgtgtcggatgcagaaaaagtccgctatttcgaacttgttacgtgggttaatgtttccaagaattttcatatagataccattttcacttagatgattgagcaagctacagggcaatcatgtcgtcggttgccctcagtatacgagactaactgccctaaaaaggatattgaagaaagccctggatcataacttgctaaattctactttccaaattaaattaatacaacactaaattaaaaattgacgataattacggcatcatagtattaactttgaattctacaaatattaatttttggtaaatgacaattaaagggtccatgctatttttattttgcatgttttatttaacacaaacttgaaatacaatttacgatcatcataatacgattttagcagccatactttttttagttattataagatcatcaagataatgtccagttaatattggtatgggtacttagctgacacaaaataagttgtgaatcaacataatgtaagcatctccaaccattaatgtgtaggatagaacacaagtaaccaaggcatattgactatccatggtacatccggaaaataaaaaactttgcccggtatatgagatctattttttaaaaaataaaaacagagaagacaatggagaatgctaattggaaggaatcaatataatatggcccaagcagcatggaattcaaggattaagtgtgttggggattatttcattcctaggtaatatttttagaattatataaattgtgtaacatgacaccaaatgtacatgtgcaatgactaaaattccccaaaactatatggctgcaaagcacctcaaaaaaagcctaaacccccaaatgggcaaaaggtggggcaaacccattctcaaccgctccacactaccacattttccttcctcaagctcccgcctcgtccctacaggtcttcgatcaaggttgagctctctccttgtctcccatggagggagcacttgccatgttcgctgagataatattttgtcccaacaaactgtatgttctttcattaaaaacacaaaaatgtatcggcaatatgaggcacttgcaccacataaatgctttaatcatgtctgttatgggtggttgcattccaaatatagcttacatgtggttggtcacctaaaaccagcacgatgcaaaaaaagataggaaaaacgtgtctgcctcgttaggacaacaaatatcacgggaaaagattcatcttctggcataagatcctgtgggaaaattaaagttttactaagtttcatgtttcaactatttcatatggtattgtaggctgaatcgacaaaaaaatcattttcctcgcacttaagatttttcttgtgttgaacatagatcttttttttaatttatccactcagatcttgtttttctagttgctcattttctagataggaatttcatcgtttataagcattaagctggtaatcagatgcaacaaatacatgaaccaagactagcttgtagggatctaaaaaagggaaaagcgaaattattattaaaaagggaaatgggatgatgggatacaaaatagaaaggaatgatatattgggatgtaaataaaggagtgattgacaccctccaaaatcgatagttgaccatgctttctctggcaaaatattatctcagaaaaagtccacctttgccatgttgtccaggcaatcaagtgataatgagtctcgcattacttgggtggcaaatgaaaattcctgattggcctgtgagaatcctgcaacactgttgaaaggctaagccatgtcaccattggatctagcagtgccgcttccgctgctacctccgaaccgattgtaccccattgagccaatgccccttgcaacatccaccagcaatccctccctctggattggtacttccgtgctcgacaatgacacggatgcaggtatgaggccttcctcacggagcttcttgaggcggtcgttgacaatcttgaggtgtgcatttgccatccatccgaggctggtaatttgctcgatggtgagaccctcgaggctcgggcggtggccattgatggcttcaatgaggagtagcttggtctcgctttcatcagcatcacgtcccaccttgtgcaactgctctttgagcttgtcgacctgctcgttgaggatgccctctaggtctgtcatcttcttggatctaaccagatgcggcatggccttgaagtgctcgagaactctggtcgcctcccacaccgacggccaaaccttcgttgcttgcacctcaacctcaccgtacaccatgaggaatagtgttgcgaactcactaaccttcttcgtcaagcccttgagactcttcatgaatgtcacccgctgcttcacatcaatgacgatccgctgaagcttcaccttcttgcaagccatggccttcgcagttcactactttctagctagaatgcacctgtagattgaggagagatggttagattgatgtgaaatcaaggaaaggggaatatggtgggtttatagtgggagatcatatttgcaacaatcgccatgatgtggaaaggaattattttgcaaatccaaaaatatcaaatgaataaatgtaagttaatgctttcctgaaaaaaaatgcccggttaatgtgtagctggcgagcatatcttcaacctttaatcgtgtccgtctttagaaatttccttgcaggcatgagctagcaatagctaatagatattactcgctagatgataatgagttcacaccaaagatatgttcatccccagttcatcatatatgtttgagttaatcctctttcatatgcgcaaaaggaattcaatttacagctacagaaatgattttcgctacattcaaagagttccaaggattgacgatagctgccatcggatgggccatatccgccacagaatggatgatttcccccttcactaataaacttgtaaacaagggagccgccttcatgctcgctcaccatcccagcttgcatctgttaaaaagcatacatagttatcttgttaagaaagagaacactagattactcgcaaaccgtatttttatcaactctacttttgttggaatgtttatccatttattgcagttgagtggagagaacagtgaagctagctacgtaatttgaggctcctattaaagcccctttggtccaaaatctccacatatttattgcaggtcatcaattatataattaaattttagtaaagccacaatactcagctaaaagaactagagaaacagtacaatattccgatggaaaaaagaatttacatcattgatcgtgcataatttagattgtgtcaatttagactattctaccacctccacaacatcaattggagaaaaacaagaaagattaacaccgctatgttcgatgggtccatattttctcactatattgcagtaaattggtttgcctcaaacatataagaagaatactagtataactctattttacagcgaagattgcatgaaaacctcgactagttcgtaaaattttatctcaaatctgttagtggatttcaggaagcacagaagcacatataaagttggcttgcaatttacacaagaattacatttgggaatttccgtgccgcgatcatttccttcagttcttggacagaagatgacttttatacctaaccagatcaactttgcttgcatttgtaggatgttgttccaagtgtaattaagtccaaaatagcttgaagaaaccgttggagaaaatagaaactcccaacgctgaaggacagaagattgttgacctgacaaacttcataagcaataaaaaaatgaaaaccataaacccaatgtttttgcctaatatacatcgattctcagtatacgagactaactgccctaaaaaggagattgaaggaagccctggatcataacttgctaaattctactttccaaattaaattaatacaacactaaattaaaaattgacgataattacagcatcatagtattaactttgaattcaacaaatattaatttttggaaaatgacaaataaagagtccatgctattttcattttgcatgttttatttaacacaaacttgcaatacaatttacaatcatcataatacgattttagcagccatactttttttagttattataagaacatccagataatgtccggttaatattggtatcgatgcttatctgacacgaaataagttgtgtatcaacataatgtaagcatctctaaccattaatgtgtagaagagaacacaagtaaccaaggctacaagagggggatgaacgattaagtcagtggaagtcaaataatctaatcttgatagatctggcggtctatctgacctgttagggtcggtccaaccgaggcatggccggtctcttaatgtcaaatgtcaatttctcttatgccaaccgttggatcaagttgaaaagttgacaaaataaactagacaaaccaagaaacaactccaccggagggatatgtaaactaaaaaacggtttaagagaaaacaccctcgaaagtcagctgtctcggaatttcagcaaatctgaactaaacataaaacttaagcaaattcgaatcaagcacgaaccaacgaatgaaactttccagatctgatcaatgaagtattagaaaggttttcgatggactaaattgaacaaaatcgtagcaaaacgaacaatcacaagttaatgccaaaatcaaacataaacgcaaaacttacgaaactagaatagatcgtcgatgccttgatgattaaatatgatctttattgctcaagtattgtttataaagtgcagccacagcacccctcgcaagttttcacgaaaccctatctaatctctcaaacttggcttaccctcaaggcatagccttcctctctatttataccgaaaacctcctactcaaagtagaaatacaactcatattcccaataggactctattgctgaatttccaaaccaatctacaatttccaaattgtaaatatctcttccatataccgcagctgcagataatcctctatgcatatgctgcatgatacagtaccatcgctacagtacatcaagcactgtagaaaccatataatcctcaacagttttccttccgttttccttcacgaacaccaacgcttaatgtagaaacacctcgtgaagcccgttgcaaagatctctcccacacggtgtccatccactatgtgccatctcatatccaacttcgtcacccattatcactgaccgtttgcacctcaactgctcccttgtctagtcccgatcccacgttgaccgaagttgacctccaaaaatcctaactctagtcgctttctcacatggtatcccaaccgcactggacatctgctcctccctgagcatagtctcgatcctcaccattaaccaagactgaccataagttacctacacactatcagacaacacgaattgactcgcattagccaacttgcgcttcttgctttccatcttcggtgcttgtcctccaagcggatcgccttgtcgactagtttttggaagtcttcgtagtcaccagagatgagatggattgacaattcatcattcaacccttcaagatatttctcttgcttctcttcatcggtgcgaacgtcctcgggagcatagcgggccaacctattgaactcgtgcaaaaattcagtgacggtcctgccatcttgcttgagttcacggaattctttcttcctcagggctaaaactccagcaggtacgtgagctctgcgaaaagcaatagagaaacgagcccaagtaataacttgtccagctggttgggtggcctggaagtggtcccaccactcggaagcagtgccatgcagttggtgagcggcaaaagcgactttctcctcatcagtacactagataaggtccaacttcttgttaaccgcgtgcagccagtcatttgcttcgacggggttggttgtgtttgaaatagtgggaggccggacttggagaaattccgacagctttgattgtggtggagcgtgtatgggagcttgagcagcaggtgcttgcgggttttgcatttggtggagcaaagctgcgatgagatggttttgattggcgagcacttgtgctaagttggggtgatcatggattggtggaggtggcggtggtggtgcgtggccttggttctgattctggttctggttcttgttctgattctgattctgagctgagttcccagcacgagcattgttagtagcaatactccttgtgtttaccatctgtagtaaccaagatgagaggaaaagaaagaagggagatattaggacaagaacacgagctattaaaccaacttatttaaattttattgatgtgatgttggttacatagagttcaagttgcttaagcaccacaaaggtacagctatatcacaacgggtcgatatagtccataccaaaaagcacacaaggcaacaaactcaagtagaagataaatgataaaaatagacgcgtactaagactacgcgtctactcgtcctttgttgcgttgtcgtccactgtcggctctgactcatcatcaccgtcataggagttgtcgttggagtcatcttcattggcaagagccacagtcaatccccttcgctccaagtagttctggacaatcaccctggctgacgcttgagcatcgtgcaccatcggaggaaggccatctcgcttgcgtgtcgtgatcttcaaggacggtccaacacggcaacgcttagaccccacaacagagcttccttctccaacctgaccatgtccgagctcgaggttacgcaattcccgcttcaggctagccatctccaacttcacacacaggttcttcctccttagccgtagaatcctactagaagcttgaataaaacctctcttcgccatcttgtagtagtcgacacgagcatcatcatacgcctgcaccatcttggccaggtgatcgatcgtggtgtcgttctcgtgctcggcatccctgaaggtggcatagtcctccgccaaactgcgagtaggatgatagcggaatggagtgtgttgcagacgtgtccagtgtcgttgaagcagcctgccaatgcccagaagcaccacttcttggcatgcgtcgatgaaggtgtcagtccctcccgttagctccaatgattccaagctagggttggtggagagcaaggtggccttgactgaccatcggggggatgccaactctttttctccttcgtctggcacagtggtaccaacaaactggacttcttcggtgtagcccagctcaacgatcaagtggcgaagctgcagaactaaccccttaagtgagacgccattgtaggggccaaggctggtcatctatttttcaaaaaaacagaacaaagaattagtaaacaattttgcaaagcaagagagggtgaagatagaataaaaaaagtttccacaattaaagaactattttctaaaaaaaaaatatcatcctaaggcttagaccacttgctcatcctacggtcaaggtggctctgataccaacttgtcacgcccggaaatatacaccatttccaaacgctcagtgcattaatcctcgtcccagaaggcgaggtacacatagacattgttgattattacaagccacacttgcggaaatgtaaagcaagtactttattacatgggcgacttaggccctcacactcaaagataaacaaataaaacagcggaagactacagaacaggcacttgatggcggagcgaactagagatccaagccttcatcttcctcaggtccatcctctggattatttttgtgagcaagactgagtaccaccaccgtactcagcaagtcacaccggaaatgcaacaataatgcatagggtaaacaaggaaatggcctaatagggtttattttgcataaagccatagtttaaacattttaatcaggttaaagctcattctaaaacacgatcctgttctaagccaatattttcatatcatcaaggtcgcatgagcctgcgaacctgtcttaacccaggctaatctccacatgactacaccatcatgatttcaccctcccaaggttttataaaacaaaactaactttgggtacattgctcagcttgcccataaccgagggcgcggctattcgaataatttttaactctgatcagaggtgtacaactttacccacaagacacaacctcaacacacgttaccacgcaccgggtactatcacagtactcgaatagaggtcgtgacaagactatccatctaggtctacccaaaacaggagaacccgctgaggtttcgccgcccgccggtccccgacaaggtaaaggatgccggatcccccaggacgagacaggtccccccttgcaccgagtgaaaattggccttaatccaggccccacacgcttccaaccaatggtctttgttttgagaagatctaaacttctagtcaggccttacccactagacttgtggttgcacgaagatgccttgcaacagaggcccgaagaccggtccttatattagccggggtgtgactaccaaaataacctgcttgcaccccaagcccagcccaaaaatatgttttagttgtacaaagcattttatcacccatctattgacaaaccagtcaatagtccataactaatccagttttagttgttaaccaccatagtctagtttatccaaaagttctacttcctccgtttcacaatgtaagactttctagcattgcccacgtttatttagatgttaatgaatttagacatatgtatgtgtgtagattcattaacatctatatgtatgtgggcaatgctagaaagacatacattgtgaaacggagggagtaggttggaactaagcatgactaagcatttacctaaaacaactagttagtccatcatgtaggatactagactagtcaagttataattttactagggttcacaatgatcatggatatcaaatcaacatcatggccataacaaagagcataggaataactaataaaacaatattaataatgaacggtataatctataaagcaatgcaatataagtaaaaccacataattttcacaatatgggattcaacatgttcaaggtagatatgacttgccttcgctcacaaagtcttcggcgtcaacggcgatgaagagctgatcttccggaacagcgggatctacacgaccaacacgaagaaatataaaaaggctaataaaaaccacatgaacagaagcgacaaagcacataaatgggttctactcatttttaaggggaaactagagatttgaacgggtcgattctgagttcaaacggtcaagatatggccatttgaagtttagttgttatttaaatggaaatttacaattttgtgaattatttttctaaaggaaaacttgaattattgagagagagcgcacgcggaccggtccacgagcgggtcccacttgccagccgctcgatccaccgtgagccgagcacaccgagggcggctcacggcacaccgacgcacaggcacgacagcaaccgagccaggcggctcgccggcgacggccaacggcgcggcggcggtgcgacggactacaggaaagggaaaaacgaaaagaggaggaggtgacggttctcaccgagcagacacggcggcgagaggtcgacggtgttgctggcggcgagggagaaacgacgaggaacttcgggttgtcggcgtcgtcgtcgttcccgcggtcctcgtgctcgacggaggggtggacggggaagaggaggaagcgaagaagcggatggtggcgacgccgggctccgacgaggtccggaccaccggcgaggggcgaccggagctgtgacggcggcggcacaagaagagagcggcgcggcggccgcgaagagaggagggacagagcggcggtgtgtggggagggaggagggagtcgagggtcccttttataggccagaggggagggataagggtgccggggagggagatcgacgccggccatggtggagctcaccattgatgaacaccatcaaaatccaccgcaaataatgcgggatcgagtgtgaaattatgggggaattggacaggatgaggtggaaattaattcccctcaattaatttgatgaaacggcgagtggaggaggcgaatctgaggttgccgtcggtaggaattcggccggagagagagaggatggctggaggttagggatgacgggtgggacccacctgtcatcgagagggagcacacctgtctctgactgggcgcgcgaaggaggaatgatggacttagtccgagggagaaggaatgagctgggctggcccaaggagagggagggggaggggggaataagttcaccttgggctgggccaagagagggagagatgggctggaagcagcccaagaggaggaaggggttttcttttagcttttcctttttataaaattcctttaattgtttttgttgccttaaaattatttaggatgctctgaaaattcaagtaaaaattggttacacattttgaagcatggggaacttattaaaaatacccactagccaacttgacataaatcttggtgaattttaattgttggaggctcttttaggctttttaaatttctagaaatgcattaaagcacaatttaaacttagagcgattttcagggcgttacacaggcccaggaagccaatcccggagcccacgagtcaccctcagcctggcctctcctttcatccgcgtcgctggcccacgctgccgtcgatggggaccgactcagcccacgccctacgctgaggcatagccgccgctgaacttccacaagccgcgcaaggagaaccggtgtcgtccttccttaaattggtgttatgcatcgccctaacactaacctctccctctatagataccgccggtcgtcgccccttttcctccccttttttcctgctatttccactgtcgccgtgccaccgacttcgcctctgcctcctcctaccgacaccgcagctagccagtgcctcggtgcgccgtcgccacagaacgatgttgtcaatgccgttgtgccggagcgtgcccatggagccatggctgctcttcctcctccgttgtgtagctgatctgtgggtcccgcgacaaaaaatccccaaataatcacagccatccaaacccttgattcaatctcaaccattggatctatttaaccctagatccatccctgtcagcgccacatcattgccctgtatcacctcatgtccatacgcatcagctgagtccacatacaccgagtccaccatactccataacactgtcagtgggccccacacatattttcttgtcagaaaaaattcaatccccgaaattaagtatccaaagaatattcccggaatattacttttttcttttaccctcagattttctctgaattcaaacttctgaaggctataaattttccattcgaactctgattcaatccattcttccaccttaagtcctctaaaatcgagctctacgtcctggtttaatttgttgtttcattttatgttctttagttagatttttcttttgtttatttgtttttcgtttgcgatcgtatagacattggagcagaagagcagtttgtttcagaagatgtcgtgcaagactgggatcaacgcaagtgcactctttgaacatattgatcccatttttatcaattgttttgttttgaatacatgcattattttatttacgaactaatgatgggtagcgtaacctaattttcattatatcctaccttgataacttttgattacccatgataccttgtcaccctagtctttgtgagttgaacattaggctcaacaggatgcaatgtcgtacaccccgtaaaatagtgaatgctgtacaattggaaactttttttttcttgttgtgcattagcttaaattgattaacgtaaattattattactccgttatgctctatagatagtagcaatatgaaataactgcatacatatatttgtattaactactcaattatagttgtctcatttatttctttcagaggataccatgaaatgcaaccctacaaaagcatagtgctaccaatgatatatatgtttgggcttcaaggatagaaactatatcaaggcggcaatatattactatttattcgctcttacagttttataacatcggattgggaaaaccatttcatgaaaaaaagtttcctgcacatggagaccaaggtgttgccctcaagtatattaggaacccaaccgccgctttattggatttaggagttggttccattgtgcaacatgtgtgctagtaggggtgaaaacggtacggaaaccatctttatcgttttcgtttcaattttttttcggaatcggaaacgctggatacaaaaacggaatcgaatattatcgaaaccgaaaacagagtgaaaacgaaccggcgcgaatacggtaacgaaaatttattagaatacaaaaacccatcaaactgataaattcaattctcaagtctcaacggtcaacaatttattataaaacacaatcatataagtccaattgttaagtctcaacagtacatcacaaaacacaaatctatggaataaattatctatatttaagagagtaatgttgttgataaatcccaatgcagaaaaaatatattcttatgtaacttcaaatttgcataacaaatattttttttaaaaaaataaaagccaaacaccgtggtagatttgcataacaaatatttttttttaaataaaaaagccaaacaccatggtattcactattcagtgctaaaaaaaatccagggtattccgagaaaatttccagaaagtttccgactgattccacgttccgacaaaactgcccttatcattttcgattctgtttctgagaaaatatttccgaattcgtttccatttccgaaaaaattccaaccaacagattccgttttggaaataagtccggaatccggaaagtttccgtaccgttttcacccctatgtgctagtggcgtcttgtgcttgcttaggttgatttctgacctggtcatatcttatttcatattctgtaaattgctagcatgcaaatatatttcgagcatggggagcagctctccaacccctgggaaaaccggttgatgcaattaagtgaagttacatgcttttagactcaagtcttaaacagtatggtgatgttatgaggttgtgtctttttaataagaaatgttatgtcagtttacaatataatcgcataaattgatatggatctgcactccaagacgctgtttgtgctaaaatacttaattaatataataaaatcatagtacttttgtacatatagaaacagcagaatagaagaaaatttctcataaatattagccatataaatttcagctctttccagtgggaatatacaagagtgcagtatatcggagatattaaagaggaccatagaatgctcgcaccacagcgattctgcggtttttcggctggcgtgttcgcttcccgtgatgtccacgctgggcgctggagctggcaatcttgcaaaaaagtccttgattaacttgataatcattcttaagtccctcactgtatgtttctgtattttgtattcttttgtaaaagccctcaatgtcttggtatatcctacgtgaaggagacgaaattccaaatataggaccgcgctctgaaaaaaggaaagtaagggtgttttctgcaaaacagaacatccctatcccctccattcccctcaaaccctagccaccactgttcacccaccccttctcttcctttccccgctcttgcgccgccgccgccttgccttccctccccggcttctcctcgccaacgacaacttgctcctcgcgctctcccctatcctccccttctcctggtgctccctccatcactctcctcccagtggagcaaggggactgggggactcgatggtgcaggattggatttgggtgcggtgatggagtttcgccgacgacagcctccccctcgagctctcccctgttctcccccatctcctggcactcccccaccgctctcctcccagcaagcagagggagcggacggcgtggcactagatccgcggcacggtgatggagttcgatagtaaggaggtcaatctgttgcctcaccccttgacccattggggaagtcgttctgatgtgtgcaagggaaaaaaagaagaagaaatccccttcatgttggatctatgcatgactgatctgcttcccgttctgtgtctaccacctgccagccatgttttttctcagatgagtgcaaacctttcctctattcttgcttgtccatggtcatgagctgcttttgacttattgccacaatcttagccgcttgccatctatatatctatatatatataatggttggaggtcagagattaatggtatggcccgtgcaaatatctaccaagattcatacacctacatgcgctgcttagggactctgcatttttcttggtagaacttgaaatcttggtacatatatagatggcaaatcttttcctgtagaactgcaaatgttttttaattaaaattgatacccccatatatttcttgatcactgcctgcgaacctctgtaactattagattcagctataacatgggattctaagtagtgaataagctggttatatttgcatatttaaatccgatttttaggtgccatctatctatttgttgtagttctctacagaatcaaatgcaaaatctgaatgttcataaccactttataatttaggccagtttgaggttgcgtcattgtgtgccatgccgtcgagcacctacacacctgctctttttaggttgaatgtgctttgtgtttctatggttcatcctatgaaatgatttattctctgaaaagttattgttatgcatggactacttttgttccagcatgatgacccttcttgggggtggatcgacagcttgagtaaccatggctgtaaaagttcaagcggagaaagttgcatggtgaatcaaattatttttctttttctagcattcttatatttgccgtgtaaaatactggcatattcagtagatgtttattatgtgaaatgatggtgaattaagttttcttatgttactcagtgcacatcagccaataaaacctgacatgctcagatttttttccgagctggtataatgttgctttggatgttgggggtccctattgactttgcctggcaaacataaccctgacttgaaaatagtgaaaacattatttgtgacataactcaagttacttattcgggaaaactttattaaatgaaaatgtatgctctagactggattgggtttaagagtaggagtttaattaagtatgcaagaaatggtttatgtgctttcatgcaattatatttaagggacttacaatttcatagttgctgttgatttaaatccaaaaaacttcttgcctaggagacacaacttactcttttttgctgagccatttattttgcatcttcctagctctgttaaaattaccgtcctcatcggctaatgaaaaagcagattaatgtacattacagttgtgtttctatgtacaagaaggtgaaagattgttaaaatctatgtttttctcttcagtttgccttctactctaggtgatactttgaagtgttggtcaatagataagtggaatcttttttcaaaaaagagaaaaaatgcaatctaattataaatatgaatatcaaatatgataattgattttgtcttatctgtataaaaaggattggttgctgccatagaaggtgctcaagtttgtcaatactgtgggtgctggttagcttgatgctctgtcggccgtgcggcaccaccactgtttaacgattccagatctggtgatattggaaccatgtgttgtcgccttgcccagggtccatttgtagtttgcttctcatggtcacttttggtgagttaagccacaacccgttcctttctacactcacttatgtatgcttggcatgtatcttccatttcctgcctccagttccctcgctagctttgctttttcatacaccattattcccttacaaatgatagtctacctttttttttaatcaggaatgctacagtatttctgatttgtactgcatatctttttctttggttgtgtttgtatatagttccaacaaccaaagcttagatgttcactccaatggttttcagccgaggcaacagctctggcataactgctcccagtaggtgtgttataaccagctgacagcatgctgaaagtgtcaactgattattttcatgaaaccactgtggttcgctctgctccattacatattttaaggagatggtcaggagtcaggacagggtttggatggttgatggttttgcttcattgtgttttttaaggtgtcatctagctgtttgatataatgtcacagaatcaaatgcaaaatctgaagattcatgacatctttagatttcaggtcaatctaatctgaattaagactcaaattatagaacatagaaaatattctctttttgtttggattatgtttaataactgcataagttagaatcacaaatcagaacatggaaaattctctctgattttttttttcttgggcctatgtaccaaataccagatattgaagcagagattagtccgaaaaatgttctttgtaagctggtatgattgagggagcatctagaagtggattttagctgataattcagtggattgatgtaatcaaataggtttagtaggtgctgtacattgttaatgtgtttttgttctatatgctcctttcagcttaattgtgcattgtatttctatagctcttcatctgatatgatgtattttttcgaaaggtattgttatgcacgcagataagtcagacctttttagagagtaataagtgcaatcctattataaatgtcaaatccgatgactcctttttcttattcatgtaaaaaggattagttgccaccatatatgatgctaaggtatgtcaaaactgtaggggcatgtttcttcctaatatgtgaagtagatttttaactatcaagcaaccttgtggctgtgctttctcatgttatactatgctaagcagttgcattgcagtttaagatgtatcattttatacccaaatctttggaaatttgtgaacatgatgtcaatcttttccttttaaattaatataagggataagaggaagaaaccagggctggcagtcttttttttgtttaccaatttttccactatgtgcaagtgcaaaagcatttcattgtcttttcagagttcacgaaagaactgggctatctatttggtagcaggacaggaagtaggaacattctttacacctataactgtttagtaaggaaatttgagggtgcctctccctcatgagtgaacaccattatttccagtgaaaaggggtaaaaagtgatttaccattatacctaactctgccatttccacagtgtgctgcctgtaataatctccatgtcacattaaacatgcgcgcgtgcacaccagtaaagtgtctactcaccttccaggattgctaggaacttaattttacgggcaatgaaaaccagaaacctggtgcatacaaattctgagtctccatgtgcgattgaagaatatttattttcttaagtgattgcaaacatagtcctttacattacaacttagttgtgattcatgccccgtaatggaactgaattaacctcttttaaaagaggatgaatgattaaactgtttttcaatacattattataccttttcttgctcttttgggtattataaataattgtggtttctgaacttattaggtattttttatctgacagtattcagggtctatttcaaatcatcatgtaacatcggaattcaagttatatcacagcctgtgctagaatgaagtcctttcgtactcaacatttaccaatataagtgcatacatatcctgacttgtgatactttttaccaataacaaacgggtagggcgccgcgaagcgcgcctaaagttctagtatatataacaagagagtgtgaagtttttattggattaatcgcttaacttcctatatgtattgaaagttcgataaattcatgttgattttggtttgagtttaggcatggaaagtatggggaattctagtgtcacatgcattgcttaattagctccagctttccaaacatcatgatcaatgtattgggatctcttttcttttgacgaaatggacacatcgacatatacatagaccaatgtatagtcctaaactcctaatgaagcatatgaatgcattcatgcataattaggcagggtcccatgtagcttattcagaagaggtgagaataagatagttgatttaggaagctttacggtcgcttcaggactaaaaacttgagtgttcatttaacgatcgtgctaatacctcgagggtgtacttcaggagactgcgattcctcgcctgatcgcagctttcttcgtggacgcagtgcatagctcaggtaaaacgaaagtatagcgttacctaaaattgggcattactatagtgccggctctaaaagcatcaagcgtggagctgggtcgtctctaaattcttgactatcatcgaatagcatgttgtgttgacgcaacatggctcattcaag

SEQ ID NO: 7236 - DNA, 7234 bp, Oryza sativa
catgctcccactacttcagctactcctaccaccagagtgactcgtgcttccacctcagctgctccttcttcctctgctgcacctcagcgttctgagtcttcttctcccataaagaaggctcttagggctatcttttgcatgtgtgccaagacagctaagaaggtaaagaagatagagaggcgtcaaaaggaagattggattgcagcaggcaaggatgtctctgacatttctgatgatgaggagtttgttgatccttttgctgcttatgagactgctcgagacattgctagtggtgagggtccctctggcacttctcgtttcttcaatgaggagtcctctcactccgaggagagcagtgatgatgaggagtcaaatgcccctaccgagaatgttcttacagatcccgatgaggcagtggacgccgccgggcaagacatcgactctcctcactccggcgacaccgagatcattccttctgatggcgatgatgatgaggcttgatcctcttcttcccttgtgattttgtctctttttggtgccttgatgccaaagggggagaaaattgcaaacgaaggggggtcaaaattttgtttttgatgcttactgcctgctatctgtataatccggaagttccggatcctcttatctggaagttccggacctgacagctccctctccttattgtcatgtcagcttatccggaagttcctggtattttatccggaagttccggacctggcaatcctttgacccctattcttaagaactcatggacatgttctaattctctatttgtgtgaatgtaatgtctattagatgctcttagccgccctttatttatactgctcttcatttatgctatgagtgtcttatttgttgtttgtgttatgatgttgattttatcctcttgagtgctcaccatgtcgtatcttttgcatataatatctattcttactgctttttgcatcccatgaatgagtagggatgaaggaaactctcctcggttgctcccttatatatatgcatatgagcttctctcatatcttccatatgcatacattaagggggagtttcatttacctttaaccattcaaaacaaaatttaattcaatcttttgtaagctttaaccatgttgtcatcaatcaccaaaacgggggagattgaaagtgcattaatccccctagtgggttttggtgattaatgacaaatgtggttaagggactaatgagttcattgagtgactttcaggtgcattagtccaaggtgtggaagatggatgcttggagacccccaaaaaagtacaaaatcaaagcggaccggaactcgagaagggcataggatagtttatcttttgaaatcgagtttttaggaaaaaccgtactattaagaggggttccaggtgatgctctgagatatatcaagtgctcttagtgtgaaccaagtgtcaagtttccctaggagtcatttttgcaaatactccatctgtccaaaaatgcaagtccggaacttcctgtcttccaggtccggaagttccggtcttgtgaaaaagattttcctaagtgtagtccggaagttccggtcttctaggtgacgtaacggctagatgacgtcacctagccgtcatacatatacagcttgattccagctcgttccttagccattccactttcatttttcaaacctagagcaattgctagcctctcccaagtgtttcttgtcttctccactcaatctagagcctaattcttgtgagaaagagagattgagagggagagaagaagatttggagatgtgtgaagactaggatcttgggtgagcacttggaatatctcgtgggctgtcatctcggtgcttattactcttcgagatgatctcctagatggttaggtgtcgcccgcgagaatccgttgcatattgtggatgtcccgggtaagtttgtgaaggatttcctctcctccgaaagggaacgaggtaagttggtgaagttcttgtgctgagattctagaggctttccaagtagagcaacccacacttgtggtggatttctagaagtaggttgagttggatcttggtggtcactcaattctagaaatttgcctaggggtgtttggggttgaaggctgtggatttcctcaggggtttttgcacaagtgaggcaaggggttaattgagacccagctctttggagctcctcaacggagagtaggatcgcaagattcgaacttcgggaaaaaatcgctcttgtctctttctgtgatgtttctgtgaatgattctgtgatatatcctctgcttagaatacctgtgcaccatcttgtgaagattggcttagtctcctgtttcaaaatttgaatttcatctctgttttgttacccggaagttcctgtcttagaacaccggaagttccgggcctagcaggccggaagttccggagttccttaccaggaagttccgggtctgtttgaattttaccgctgcgatttgtttttaagatttcagggacagcctattcacccccctctagacttcatcagcgcgttcagcaggtgaagggacgcgacggcgaagcagcgctccagcgagcaggccacctcgacaccaccgccgccgactccccacggcgcagcctcgccccgtcggccggcggcgccgacctgccaaagccgcaaagagaagattgagagagagagagagaggaggaagggagagaagaagggaaagggagaggagggtgaggtgtacacgctgacatgtgggcccacgtgggtcccacgctgacttagccgccaatggccgtggtcaaagtgccacgtaggacaaaaccgggatcaaaaccgccgagggacctcgggtgatcggttttgcatagttaatggacctcatatatctggttttgtggtttgaggacgtttttgtaactcgatgacaaattgagggaccttcggtgtactttttccatattttgggctagcgagatcgcttatggctccttttgtagcccaatccccgggaggaaggccagcgggagaaaattcaacgggccaaatcttcttgtccatttggaagcctacaaggtgggaattttatggcccaatccgcacagaatcgtgaggtcaagaaaatttcctctagctcgatacattgcgccaccgcttctccatctcgcgattgcgagcagacgatgccaccgagcctcctccagcgagatgctctcaccggtcctccttattcggtctacccctaccgctctatccctctctccttagatcttgggtatgcccttcttctttcccctcttctcctagagtttccgggtttcctatttgacaaagttggtgatgagccgctctgtcctaaagtgaacaagagttatgttatggttggcatgtctctatcttaagaggatttttccattggaatgggttagtttatctcttagatttagggtattttatataaatagatggccatattgaaagggtcttgagaatcgttaattttgcctagaggaggggtgaacgggtgctttgtgatatttcaaaacttgcagcgagattagaactaactagacaaaccgacacaacttccggtagtccaactatagatgagttggatagttcgactgctgtaggacaatccgattagtgcaacgataggaaaaatgataagtgacccgattgtccaattgctccaggacaatctggttaacacaaggatagaaacttaagtgatatagtaagaaacaaactagaaggtccacttaagcatgctttctacaagggcaagtgttgacggtcattatcgatcagttgcgaccgtcaatattaccaaaatagaggagaactagttatgcttgcaatacatatacaagttagaataataatattccactagtattgggtgtactaaccttttgcagagaataaccataaagtggaggagaatcgacatcagcacatacgataaatcaatcggacgatgtcgagaatcaaacttatgcatgaatgggccaagaactcagaattgacataatgaattgggccaaaattcacaagtctaagaagtgaagtaatggaggaggccacctaccgaattcggccgaaccccctagcaccgttggatgcagggtttcttctggatggcgtggatcactccccaatgacggttggagagcaattctgaccattccaactgccaccgaccatccccaaggagttcactctcttcacttcaacacacacctcaagcaagagctctctcatattctctcaagttagtttagtattcttaagctagtggaataggaatatagtagaaattaggtatggctctagtggctttcctttcctctttggtaagctttgtactttatttagaatacttttctatatacatttatggtattgaaatactttccgagtatatgaataccttctttacattatgttcatgttatactgaatatactgctagcttatctgggagatactttggtgcgggtataatgtttgcttatgcaattacactatgtcatgacgatgatattagagtagtatctggtagtttagacgaggtgtctagattacgggatatcattatttggggttatatgctgcggatgagaggtgggctgctgatggtgacagctcagtacaagtattcctccacgcatgtatatagtcctaagttaatttcatgggtagggtactcctccgtatttagccccggttgtatggccatgacgagctgtcgtaaggaactcaacagtcaggggtggcttctcgaagtacgaggagggcatcggatagagggtattagctagcatatcagatgactcgaatgtatgtatattatgtatactagaagtataggaatatattatctttctcttttctttccacttagcttagataatttagtatgagaatgaggagcttaatgcttgtgtgtcactctacccttgaattattttaacccctgtttagactatgattattacaagtaatatataaattattagtcaagttctctctaccatgatcttcctacgggataaaataaatacgatacccttggaatactctcgggtgaaatggtacaatggtatatccgtgcgcttgcggatgaactctgtaaccataatataccaggagtatttatgcgccattgctgggaattatatttctagtaatgtcgttaagaaataccaacagcaagctaatgataaatagaactaaacaagcaagtaaaggtcactaatagaacaatatagaaagtggtaaatacaaggtaaaagagaggaaaggatacactgatttatttactgatgtttggatccaacctatcctactctccgttgaggggttccgaaaagtcgggtctcgattaacccttttcctctccaagcaacctccgatggtgtcttggtttcttcaagcaaccgccaaggaaaagttcgtgcttcaagagacccactcggtctcaagctcggatagcatgcaactaccctccggtgaagctcgctctggcaagcaactacctagatgaagctcggcttccactcagtgacttcttccctttcaaaggcgaaatagagccttcacaagggttcctaagcaaaccacacgcgttggcggctctgagattacaaatcttttcttccacacactctcaactcaacccactattagctcacaaactcaagatcatagaaatggagagagttgggagagaatttagcgaacactctaagacaaatgatcttcaataagcacacaattctcttgaacacttcgatggattcatcatgtgaaatggggtttaatgtcttgaattgagtccatagcaccccaatttatagccctaactcctccaactagttgtttcttcccggtgaaaaagtctgctagaatttgtatagggccggattatctagtcctttatgcttttccaacagtcactgaaccacttgttgccccataaaggaacaaactatccgatagctatagaactatttagcagtgcctcctagatagtccggtaccaataggattgtccggtccttttcttctccaattgtccatctaagcattggtagcctccaaagggtgtcggacagtacggtaccgtgtcagatttgatcttttatcttccaaactttggctaatcatttccacttcaactcttttgcttttagggctgtctttactcactttagggcctaatgcctgatcattactcaataaatgaattagtcattgcttgtcatcaattagccaaaatgcactttcaatctccctctttttggtaattaatgacaacctgattaaagttcaacaaagattgaataatatttggttttgaatgcaaatggctagtttgagctccccataaatgtatgtatacaaatatgtgaagtgaaactcatatacacatatttttgagaatgctagagctccccgatgtcttttgcatttgtggggtgcaacgtgtgttaagataccaattgaaaccaactttaaaatttgaaataaatgacatcaattgaaatcttgagatcaatacttgaattttttttctcctctctccatatgcacatttaatcttttttaaccctcttcctttgatattcctctccccctttagcatcaaagcaccaaaaagagcataataagggatatgtgagccatgagtatcattgaatgatatataaaagaatgagtagattgcatttgtgatacataaacttgttaggtgggtttaatttagtacataaacttataaattgctcattttggtgcacaaacttgtctaattcgtgcaaaccaggaccacaatggcttgaaaaggttaattctagcaagctaatgttgattagaatgtgacgtccatacgtatagtgagtacgcataagatgtgctatatttataaatgaggaatttcatatatttcttaccctttctaacccttgtatcattgctcgggttttcatatatgtcggctatcactatttctcattttatcttttcattgaacaggtgtatgtccaaatataaatcttctcaggtatgtgtttatcctaactaatacctaaatcaacaggattagccatatagtgtacttttggccttggtccaaacgcactggacaagttcatgcaccaaaacaaacattttacaacttcgtgcactagattacacccacaagttcatgtactgctgatacaatttactct

SEQ ID NO: 7237 - DNA, 4292 bp, Oryza sativa
ctagagaaccattagccaaattaagctcattagctagttgttcatttttagcacattctttagctaggctctccactaaggcaaggtttctttccttctcaagaataagtaattcttcttgcctttcgagagattgttctttactatccaaagctctcattaacttagccaaatgttgcatagcgggtttgctaaaactcttaagcacatcatctaattcattatcactttcctcatcactagaatcaacatcaagagaggtatgagagggcttttgagtcatcaccttgtggccttgggccatgaaacaagagtagtggtaggagtcgtcgtcgtcatcactcaagttgttgaagagacgctccttgcttgaagaggatgacttgaaggcgacagtagcaacaccaccttctccttcaaccttgtcttttggcttgggcttgggcttgacctcgagatcttcttcatctccggagtaccacacctctgccatgtgtgcctccgccacatgagcacgctccggcttcttcttgcctcccttagccttcgcttcatttgacttgagacaatcggcaatgaagtggccatattcgccacaattgaagcaagctctctttgattgcctctttcccttgtcatcatccttcctccctttgccatagccactcttgcgaagaaagtgcttgaatctcttgacaataaaagtcatttcttcatcttcactttcttcacaacttgactcttcttctagttttgccttcaaagctacttcttgatttttgatcatggtgggattcttcaccatttgcctcacttcacgagctgtctcttcttgcatctcataagacacaattcttccaagaatgtcacttggggtgagcctcttgaaagctttcctttcccatatcattgatacaagagtgggatttcttggaccaaaagcatggagaagtcttttgaccacaaagtgatttgtcatgtcctcactcccaagtcctttaatcttgttgacaaggatcatcatcctatcatacatctcttgtggtgtctccttgtcatccatcacaaatcttccaagcctttcttccaataattcaatcttggcctcacgaacggcgggtgatccctcatgagccaattgcaaagtatcccatatctccttggcctcctcaagcccatcaaccttgttgaactcctccggactcaaggcggagagaattggattggaagcttaagcattgcggtggatgagttgctcttgctccgaagtgagctccatgtcatcatggggtacatcaatacctatacaaacaactttccaaatacttggatgcaaaaagattagatgcaacttcatcttgtgcttccaagcggcgtaatgtgtcccatcaaattgaggagcacgcctagaaggcacggagacaaagttgtgagggggaatggtaagtttgctgtaatcaaaaggtatagtagctcccttgggtgatggagtttccttgctgctcgttccatcttcatttccattttccccgttctttccccctaaatccgacatcgtggatcactcaaagcagtgaagcttgaatcaagagcaccttgctctgataccaattgaacgcgctgatgaagtctagagggggggtgaataggctgtcccctgaaatcttaaaaacaaatcgcagcggtaaaatttcaaacagacctggaacttcctagtaaggaactccggaacttccggcctgccaggcccggaacttccggtgtgctaagacaggaacttccgggtaacaaaacagagatgaaattcaaattttgaaacaggagactaagccaatcttcacaagatggtgcacaggtattctaagcagaggatatatcacagaatcattcacagaaacatcacagaaagagacaagagcgattttttcccgaagttcgaatcttgcgatcctactctccgttgaggagctccaaagagctgggtctcaattaaccccttgcctcacttgtgcaaaaacccctgaggaaatccacagccttcaaccccaaacacccctaggcaaatttctagaattgagtgaccaccaagatcaaactcaacctacttctagaaatccaccacaagtgtgggttgctctacttggaaagcctctaaaatctcagcacaagaacttcaccaacttacctcgttccctttcggaggagaggaaatccttcacaaacttacccgggacatccacaatatgcaacggattctcgcgggcgacacctaaccatctaggagatcatctccaagagtaataagcaccgagatgacagcccacgagatattccaagtgctcacccaagatcctagtcttcacacatctccaaatcttcttctctccctctcaatctctctttctcacaagaattaggctctagattgagtggagaagacaagaaacacttgggagaggctagcaatagctctaggtttgaaaaatgaaagtggaatggccaaggaacgagctggaatcgagctgtatatgtatgacggctaggtaacgtcatctagccgttactcacaaatttgaactggaaactagacaggaagttccggacctgaaagaccggaacttccggactacacttaggaaaatctttttcacaagaccggaacttccggacctggaagacaggaagttccggacttgcatttttggacagatggagtatttgcaaaaatgactcctagggaaacttgacacttggttcacactaagagcacttgatatatctcagagcatcacctggaacccctcttaatagtatagtttttcctaaaaactcgatttcaaaagataaactatcctatgcccttctcgagttccggtccgctttgattttgtacttttttgggggtctccaagcatccatcttccacaccttagactaatgcacctgaaagtcactcaatgaactcattagtcccttaaccacatttgtcattaatcaccaaaacccactagggggattaatgcactttcacctacatcccgaagaagctcctcctggcccgcgtggcgtccatctcgatccactccccctctccccacgtaggacatgggcttgataggcggcggcgttgggcgggagccagagccggtgttagaggagaagcggaggagcgagaggagacgatgcggctgggggtggtggcggctagagtgggagaggaggaggcggaggtgagccatgcgatggcggggcgtggcggcggctggctttgggcaggccggcgccgccagccgacggggcgaggccgagcggcggggagttggcggcagcagtgtcgacgtggcctgctcgccggagcgctgcttcgccctcgcgtccctccgcgtcggcgtgcaacgagctgcacgaggatgcgaggaggtcggcgatggcgaactccctgggcgcatcgcggcggtggagggcggcgaccacatctgtcgcgccgtggcggcgctcatccgaccgtcctcccaccaccagcgccgccgcgctgccttccgccctcacccaagccacctctccgccatgtccgtcgccgccgctgcctcatcgagggaggggtgcgccgccgccgacaaggccgagcgccgtcactctccatccgcggcggcggcccgtgggaggaggacatggtggcgcggcgatgcgggagcaggaggcggcatctcccctgccggccgagcgctgccacttcccatgcactctcccctgccggtcgcgcgcctcccactctccctcggccgtcgtcgttcttctccccagcctgcttccgcctggccgctgttcttctcccctgccggtcgccggtcgccggtcgccggccgccggccgccggacctcttctcctctcctacctcaccatcctcgtcggcgccgcaccaagtcgtcgcctcatcgcccgtcatcgctccactagacaaggagcaaagtgaaagaaagagaggaaaggagagaagaggggaaagagagatgatgtggcatcctgacatgtgggacccacgtgggtcccacgctgactcagccgccacgtaggacaaatccggcgtcaaaaccactgagggacctcgggtgaccggttttgtatagttaagggaccccgcaatctagttttgtggttcgaggacgcttttttatctcgctgacaagttaagggaccttcagtgtacttttttccccaaaatttgactaaaattttctctttttttagttattactactccctctgttttaggttacaagatgttttgact
